United States Patent Application Publication US 2014/0057251 A1 - sequence listing, part 101

SEQ ID NO: 186357 - DNA, 5681 bp, Cannabis indica
aaaatgaagctattgagttaagtcatcgccacgatgatgtattgataataactttggacatggcccacattcaaatgaaataaatgctagtagacacaggatgctcaacgaacatcctattcgtagaagtattgaaagaaatggaaatcaaagatctaaatgctcaagagatgcaaatgaccttagtaggtttcttaggtgaaagtgtcgttgcccaaatctatgttcagttacccatctacgctaatatagtgaacaagtcagtcaaatttgagtacttggactccccatttgttgaactgctaagtaaatgacttcaccttcttgattgtgagttgtacggtcacgtggcactgatattggccatgttgacatgccacgataactgggaaaaaattgggataacatttaccctccaagtccttatgcggacgtctatgtggatagggactttctggcttagttgggactgatgtagccttacttgagcaaatcttgttgcaatttagtctttgaaatcactactcttgattgtttgatctcatttgtttcagtaagtttactacattgtacttctacatgctttttagttgaacattgcatggcaagtaaaaaagtggtctcacagaagctatattagcttaatggagggaaacctttcttcaccttccacattacattctttttcgagaaaaagttacgtttgaaagctcctccttctctctatacgtcgaagccccagattgctaaaacttacaagatttttgagccaatttgatgatccaagctttccattctcttcactaaagttttcttgtagtgggtaagctttctattctcgctatttacgtgatttagttgatttttccatatttgcatgaagcctttctttgctttgaatgtgttctgattcccacgttagattataatcttttttggtattttgatttgcatggaagtcttaggatgtataatgtgtgatttcttaacgaaaaagatttaattttgaccttcattgtgattcttggctctttgacatgtttgagttcttgaaaaacaaatgtttagatccaacatataccctggccagccataggggtcttgttcaagacctagccagccataggttttcaccacggggtctggttggccatagggggtaccccaaaagctagctggcccatgcctagacacaaggttcctagcaggcccttggctgggtcatgggacctcaccgaccctcatgtgcttaggaaccttggtgggccaagaccaaggttccaagcgggcagccaattttttgtcttctttgaccttgacaagggtctcgtgatggccttgtaggcatatacaactgtgatcctatgcatggttcccttgggaactccgtataagacttagtggtgagtccattatagtaaagttcacaacttaggactcaccatttgtctaagtaaatatacttgagatggtactttattgatacacagtcttgtacaatgtaatttatctagaaattacccttgggtacgattaactaaaactttttccgtaccttgtagctttgtcagtcacctccccttgtctcttctatgtaggtgattttgagtgttggtgtggggaggtgacaaccactgtgtcgtaggttctatcacctttacttttgagagatatcatccaatctattcccttgctcccatctacgtggtctctagcttagtgatatactatggccagaacgaagcggttgtgtggtagtgcaccaccatatgatcctcatgtctctagggtggtagtgatggaaagagttggcataatagaggaggccaaacaaccccttgataatggaggtcgaagggttagggaggcagaggtgttggtggttgacgaaggtgctaagagttctgacactaagtttgaggtgtaggtggctgcgcctttaaggaggaagatgtataggacttgtgatgtcctctccaactaccctctaggctcacatgatgttgacaggaagccattgagtgggcttagccagccctcggtgttaagtctagaccatgtcttggtacaatcttgagaggctcagattcttgatgctggatcacaaggagacatgtgggtctctccttcatcttgtattcctgccaagacttttcataggatactggcgagtggactagtcagaggtgtccacgatgagatacccacaagggatcagagagcacaccgattcacctttggttggatggcatggttagagcaccatatcttgtaggggcagtgttgacattacacccatactttagggatatagcgcttacttcaggatttgtccaacataaatcaccccaaaaagtattaaatacctcttagcaatgtttgttctctatgctgagctacgctagcctcaacccacttattatgagattaggtattactttaatctaatatctactccaaatcaaaactggacggggtacttctacttcagtcaggttagccactagtggttgggtgacaccaacaacagacctatgtccaaagttagtggatatgcccaaaattacttcattgcttgggatgtctaggagaatcaacattgccgcttcaagtgagttcctacctacaagcactccatccctaccttgtagatcagagatagagcgaacaacatcatgtctttccccgtagcgaagaagaacataataaggttggccagtgtagccaacttttagaagtacgacatgtatcctcctaattctggtgttatgggggctgagggcccattaggtggtgtgaatggagccccagcttctgaggaggcctgcctttggggtggacatgctcttgacatggatgatgatgtgcctcgatcccgaatagtctgggattttgagaaaagagagacggtcctccaccaacgcttggattgcgggggcacaactagggatgctactctatagattaggcctaaaggtcagagctctactgggcctactcactccttacttacatctaaaggcaagggcaaggtagtcgttgaggattcaaatgattcctcttttaagaatgacggtatttgatagttcattgcaccatattttatattcttatctttcattgaatatttgtaacttgtattctaactttgttaatttttcttatacatatatgtcttccaaattcaaaggtttagctggggaccttcaaattagcctttggggcgtccgagggctaaggtggccttgaccacccgtgctggtgatgttgcaagttcatctcttcttcctcctcctacgcctgtgccagttgggtagcccaagatggatgaccctttagtgaggagggaatggccttcagccaggggcacccagaagcctagtcaaggagcaggctcagccatgggcatagagttatggaggtagttcataggtatctagatatagcctttttttactatggatagtaagttgtaggagcttggtgaggtgatccagagaggctctctttcgtcggtcttcaagagttggcctttgtaagttgcacatttaactttgctcactttttctatgttattgtaagttagttggccataggggctgttgtaggaagttggctagccattagtagtgtctttgagatgctggtcgaccttgattgcactatagaggtgctggccgaccattgttgtcttttggcactaatcttgaccttattttatttttcagggctttatgaagcttagctttttgcatggcaactctagggggtcctcgagtgctctctaggagcacgtaaaaaccctagaggctgatctctggcgagggacaaggctttggctgatatggaggctcttgtccaacagagctgagacattatttctagtttagaggtcatgctccgcaccacgaatcaggagaataccttgctcactgcttagaaccccaggttggggactaaacttagtaggtatgaggagaagttcaaggcagcccttgatggctagcaggccataagggaagaatacgtcggcttatcttcagagctgatctatgagttcaagatgtgcaactccagagctaatctttctcacatgtgagatgcttctttcccgcagagcacattggcccaagggaaaacactaattgagagcaggttagaagaggaccatatcatagttcagccagaagaatcatccttggggaagtttgataaggagatggtcgacacacctactaaggaggtggctggccaagacttcgaccaggtggtcggccagcctgcaaaggctatggccgacccacacttcggcaatccagactatgcagcttctgagtcagccccacctacacttgcacacatgtagtttcagattattagtattttggctttactattttattagtatacatattttatttcatgttctgtatggcctactcgccttttacttttgaacactacttattttcagccttagggctttcattttcatacttttggcctataggcattcaattttttgtacattactactatttagccctaaagcttttcattatggattgtgtgaccgaccaggcagtttttaatcatggctatcttcttattgccttgatatataagtatccagattcacttattttatgccaagttgaagtatgcctgcacatgacttagaggtagacttagtagcttatactaagtgttaaaatttctttgcataagttctttgtgctagtgtcatgccttgtacggtgtcactgcccccaagtgagcatgcatatttacgatctcttagtcacttgcaattcaccaagttttgtagaccttgcttgagaattttcttggggtgctacttgttgtacacatgtggaattgataaaaataactctaagaagttaatctttttagcaagtggtttagacacaatatatatggacataaaaattgttttttattcattaatttgtctttgttgttgtgaaacttacataaatttaatctacaagctttcataataaagattcacttctttatatcaaatggctacccctacttgacttgtaaagcaaaggccactgtaaaagaacggtgggcgcacaaccaaaaggatgtgggcactagctcttttttacactgatgattagttggtagaactactgcaaagtagcattctataagctgcttactggtagtgtttgcaaaggcgttctccatgttctcattgtaccttcacagcttgtaggctcccttactagttatctctgtaacttgctagggccttcccaatcgggtccaaagactcttactgctagattattgttgttcaggaatacttttcaaagcaccatgcttcccatgaagaatttcctatccttgacttgtttgtttaagtgtcttgccaccttttgctggtaggtctgcagttttaggttggcttgatctcttctctcttctattttttcaagggattttacatgcaagatgttgttcgtatcttggtcataagttgctctcctatgagatagtggcaatagatctacaagcaacattaggggtgcacacaggtcgggttttcgggcgttcgggttcgggttttcgggcttcgggtcttgtaaatgcatatccaaacccggttttcatgtgttcgggtgagtcgggtatcgggtcgggtttag

SEQ ID NO: 186358 - DNA, 1554 bp, Cannabis indica
ttgtgaatgagcaattgcaacagcgctaaaacttacatataggctaaaaggctttcccgaacaaaagagagagggagaaaagaaaagcaattacaaagacagaaaaccacaactttctcatacaaggtggagaatttcaagcagagcatacatacaagattcatgaaaagaggagatttttctgtttttctacaacttattatgaatcaaagctaactctcctcctaaccaaattcacttgtattccaaaatcatgttgttctctggagccaatccaacacaagccctcattatgttctccagcattgccctctgctttgacagtgcattcactactggggtacccggtgggacctgtttattgtagccacaatcacacaaaaatagtatttaaggtcttttccttaagtaaattcaattataacataattattatttttttcccttttttgtcttaatttgtgtatataaatacagaacagtcaattatacatatgaattcattttacaattccatttttttcctataagacacaaactttagcatgccccacagctttccagttttcttttgtttattaattacttggtcacaacaagtattataaaatttagttaataaagatatgtgtctttgacttacaagaggagccttggtgaggtaactgagaattgtagccacagggtgaaatgagtgaaacttgctctgttttttaacgcagaaagaaagatcaaatcaataatttggtatagtcactataattataagtcaactgattagaataattctagtatttttacctccccatcagccttgaactgtatacgggtgctgagctcagcgagaagaaccaagtccagaatgatgggagcagccaaaagggagtcctcacatgtgttgtggagcacaatagtgtttgtccctcccatgaatatctcagatgtatattcgtccatagctctcttgctgtcccccacatatggcacatactacaacccaaaccaaaaaaccatccacacattgcaatagtgtcaaaattcagttgataagttcatagtcttaaaaattacaaaaaagtaaaataaaatcaatagaaagtaaatattctcttggagtttaccttaatgacaactacatggtcaggatgctcgcctggctcgtaaaggattccattgctggcaaccatgtcatccacaacgttgctctttgaaatctccttagagcggaaggtttgtggggcggagaggttcataccgtcattgtttcccaaatggttgtagctcactatggaggttggctgcagtaagatcatgatcacaaatacaaaattttatgagatatttgtactgactttcatcataccaaactcatctaatgagctggaattcatggtaggactgaaacttatgtgatcaagatagtaccttgataccagccccaacaaggaaatcaaccagtacagatttcatcttggtttgaccactcttgaagtcatccccaccaatcaaagtgttgttcttaatagccaaatcaataagccctggaaataagta

SEQ ID NO: 186359 - DNA, 2599 bp, Cannabis indica
taatttgggtaatagcttagcttaggtactccctaaagaatcttaaatacaagtgttacaatgtaataatttaaatatttctccgcaaatatcaacaataataataattttgggtgaccgagctgtaactccaacctagtatctgcctccctaaacacttgacaagctaattataaacctttaccagttcaagagcgctataataatccacaggattttacagcaaaataagttaaagtatcaaaggaaagccaaatttcaatgcatagacatatcaacaaacatagctgatactacaaatatagctgatattcttcaagtacgtttttaagaatgtattttgataaagtcttatcggtagttcaaggatccatctatcacaaaaaattgtgagttctatgacctcttggaagatgaaaaaagataatagaaatcataagtgaatgttactctttccaattcattaataggaagaaaaaaaactataatttacaggactatgaatgagaccacacttgaagaacaaatatagtagtgacaatccaacaagtacctctcatctaacatcgtggaagaactcaatcatcatctctaacaatcttatctgttgctttctttctcacatcaaaaacaagaccagcttcagagacagttttatcgaacaatgcttcaatgaacctgtcatcaatctcacaacatgatgtctttgatgaaatccaagttaagtgtgtccctgacgatgaggaatagtcctagaagtataacagccattatccccgacgacataattcgctgctcgatttccataggaagctttcgtccacccctagctgcctctataagaaccaaggccaaggaacctccatccaaagctggtaatggaagtaggtttattactgcaagattaagattaagcacagctgcaaattggtaaaggccatcagtatttgaccttgcaacttcggcaccaacagcaataatggcaactggccctgaaaccttgccagctgtttgtgagaagtttaagaatgtttgtttcaaactatccaaaacattgtaagagagtccccaaaactctttcccagaaaaattaaaagcctcccatatgttctttggtatgaccttggaaaacttggtattcggtgacaattgaactccaattttaccagttccatcaagattctcatctggggtgaccccaatttcaaagtcttgttttccccttacaatcttaaataacaaatttcttttgggatttttcttaattacatcgactatctctaaaacagcattgggacctgctttgggcaactcgcttccattaacttgcaggatcacatcaccaggaagcaaaccgtcccgggaagccgccgataagggtcggacctccggcacaagtaccccaggaaaggcttcttgcacaggtaaaccaactgacaatacttgaacaaagataatcacatatgcaaatatcacattggctactacaccagctgaaatcacaatagctctatctaatacgggtctgttcttaagcaaatttttgtcatcaggtggaatatcactatctggatcattatcagggaaccccacaaacccacctaaaggaaacgctctgagagagtattccacattctttgaattgaatttagctaaaattggaccaaacccaactgcaaatttacttacatggatgccctgaagagaagcagcgaggaagtgaccactctcgtgaacgacgataatggcggttaacactgcagcagcctccaaaacagactgagcactctcaaagttgccaaaatcaaagccggagatggcgcaagtcttgaatttaacccttttcccatgtgggtttctactcttttcatagaaaagttgcttcttgaaatgaaaatctaagttggacgaagaagaaaaaggttttgacaagtgggttctagacttaaaagagaaatctgtgatgggtgacttggaatttgttaatctgagtaaagaagaagaagaagaagaggaaggaatagaacatgagagatttactaccatggtcgtagtggtttgtttggtggtgaggaattaagaaggaaaggtttggtttagcgggcgaggaatggagggagttgtggcatagtgtcaaagtttggataattccttcaaagtttgtatttttgggtttgtggacgtgaaatgaagatgaagtcagacgtctcccactttttttccacaaatttagtctaagttgggtttcagcacagtgtctttcctcacatttggattggagctttgaaacgtcttatccaaatccttcaaaggcccaatacatagttagactttatggaacgtgtgggctcggattacacaaagttagcccaaaaaaaattaaggtaattagatgtatacacacactttttagaccaaaattctaccctcacttaggtggtaactttctttaaccaattaaattgatttaaaataagttccattatgttaaaaaaagtcattgctagctaagtgggtgtagaattttagtagaaaaagaatttgcacatatcactatgcataagatcacaccaaatttttctattttttctttagtagt

SEQ ID NO: 186360 - DNA, 3309 bp, Cannabis indica
cctttggaagtacttgagtatatcttgtccatccccagacaagaagcttgttctctcaacctcctgccaaacatgcacattctggttgcttggtcgagatcttttccgaaccagtctggtttttatgtctttgatagacgaacacgtcccttagcagttttactttgcatttatggtctctcaaaattttcaagtggatgatgaatgtgaggaactgcaatatttctattattacctaccatcccaaactttagttccaggagagccaaggcctgttatactgctattttcatcttcagaagtatacgatgtgtcacttcctgagtctagatactccccatctgaattaactagagattgacttggagtatcctgaactgtaaaatgggctgagtttgtctccttgaacttatcagtatatccagactgcatgtgactgctctcagaagaactccctcttgtcacttgatctttgagattggacactgctttagtgctattctctgtaatcaattttccatgtgaggagccctgagaaacatgctcatttaagtgatcatcacctgccttgtttttgtagtttcttccttttgtccacatgttttcaaaatgttctggagccagggcttgagtttttctgagagaaacaacatccaacatatcaccccattctcctccagagcgatgtcgttgaatacctgccacatcattagtttgggaattcataggcaatgaactccatgaacgggtggatcgagtatcaatagaaagcaatggatcttttgaaagatttccattgccattctctgctgcacgtgtatctgtatcgcttcttgactgatcattttttaattggacaagttctactccagttacagaagaatccaagaatctggaaaaatgatcagatgagatatctgtaagtccctctgcattgggttgagatgactcagataccggcctaactgcgtgtttggacttgttcatattaacaaccacagattcaatacgttcattaataaacctgtcacaaaatgttgaagcaagtattactagcaataccagcatatcaagcaataaaatgatagcagcataccatgaaacaacatgattgcttcatatcaaacaaaaaagtaaacaccttggactggctaagtttaagacaggtcgtattactgcacacgcaagtagctctcgggtaacataacgaaagaaagagcattgcaggtcttcaggcttgaatgtgaaagaaatgagaccactcatcatatgctgcaaaacctgaacatagagaaagtacagtcactataattagaaacaatagttttgaatattccaggtaaaaagcacagaatgcttcctaactacttgagcatagtcataagagagataagcaaccttgtgctcagcttcagcagaaaataaagcaggatgcaacttcttgtcagaaaacatgatgagtcttaattctatgtctcggtgttcaattgttagtatcccttccttctttttaatcttagcttgagtcgcacgaaagagctccaaatgtgtgcaaatgagattaaccaggtccctgcaccatcctatgagtttcagttccagtaattatcctataaataaaagtcaaaatcatagtaaactggtctgagacattgtgggaactaaaaccttgttagaagatcaatcaaatttatatttctcatccgtcctgaaatctccccaagaacaccattgattatgtgcactagttcctctggaccttctttatcaggtgttaactttgagtaccagagatcagtcacccactcagaaactatatgtctagttaactgatctattgcatcctcgacaataggagaattcactctccttctccactcagacccatcaacaactttaggccggtcaaatggtttcttttgggtgagagtgtttgcagcaggcggtttgctgttatatgctgcagcttttctctttgtctcataatccagtgatagataacggccgactagaattaataatgcagcagcaggcagattgatccagacagaggaacttgtcactataataagagcaagataagttgaatcttaaagaaagagaatagcataaatgtcacgcacaacacaagacacaacaacctcacatacttcaatgaagcaaaaactataatgcgacctattaattcccaacagaatataattttcaactttgcattaaatgaatcaagagagagaaagagagtcagagataaatacagtattgtatttgtacccaattagaatgagcattcatatctgtaaattagatcagtgacagcgagccagcgtgtaatgaaactagacaaatatatgaataaaagaattctcaattgaaataaggggaaaatagataattacaatgcccaattgaaatctgaatatgctaattagaagcaacaatgcatgtaaagcttgaaaatcaaggtattccaacaaaagaaagtctgcacaaaattgagcataaataataattctgtaaccaattcaccaaacacaaattccaaaacattagaacaataagcagctaagaagtagtagtagtggtagaagtagaactcacatgacatgaggtatgataaacccacaacgcaaatggccagaaacacaatccgcttcttggcctcctcggccaggtcgcgaatcgtcacctgctgcctttgggagctcatttcaaatcaaatccaaaaatattcctcacacaaaaatcgaattcaatgcctcaattcaattgcaacagttccggtttgggatcacataaagaatcagcccaaaaacccaaaatgaatcgaatcaagagcattgtggggagaggtatgatcggaaacgaggtcggcgcttggcgaaaaggagaatgagagagtagttgtgagagttgaatggaacacgaggaccgttaggttttgattcttcgtccctgtggttgcgtatcgtgtttttttttttttgggtgtcactttcgttctggtttaattttctgggtgagaatgtgtgtttggattcaaccgccaagtcattgaggttggcgttttatatttcatcttttctgtacattttattttttaaaaattaattttatatatttcaattttcattttctttgaaaattagtgttgattaataaaaaaaaaagtagacctcatgcctattggagccgacaaaatgggttagacacgataatacaacttgaaatctgcacgagagttaacgggtttgagtttgccttaaatgggtaagggtcgtgttctagttgactcgtcgaacccgttta

SEQ ID NO: 186361 - DNA, 2910 bp, Cannabis indica
gtgtgtagttggagatgatcttgaagttggtggaggaggagatgttttgctaactggggaagatttagatgatggcggcggagacctccatctaatagaaggagaagatgccgaagtaggaggtggaggcgacggagccacaattggtctaggggaagaagccctttttggtgccggaggtttaggaactggctgaggctttttcttcggaacgggtctaggagaaccaccgccagtggcatcacaactgagctttctacaatcaactggacgagcagaatcagaagcgcattgcctagcagaccgttgatcagacttaccggcaatacagttctcactaccgtcaaagaccacacttttaccaccggcacaagaaggagcttcgccggtgaaatagttaaatgaataagtgaagttctgtaatctgggtagcttgcaaatcgtgtcaggaatgaccccggtgaacttgttatgagccacgtcgagttcttccaagcttctcatgtttccgattgttggcggcaatgagccctgaagcttgttaaagctaacgtcgaacacgttaagattcttcaatagcccgatctgtggtggcaaacaaccggtgagattatcgttcaagagaatgatctcgtttaatgtctttgccatttttccaatacttccaggaatacacccgccgagatcgttgttcgcaaaaaccagtacggaaaccggtgagttcccgagattctttgggataccgaatctgaacctgttgtcgttcaagaatatagcatcgagatctttatcgaagagttttgaaggaacagagccttcaaactcgttgaaacgaagatccaaatacttaagcgaaggtaatgagagaaccaccttagggaactttccgacgaagcggttgttactgatatcgagctcgtgtagaagcttcaaacgacgaaaactcagaggaacgacaccacaaaacctgttagagttaatgtggaaaagagctaagtcagtgaggagacccagttccgaggggaggtagccggcgatatcagcgtggttgagatcgataccggcgacaacacgtgtcgatgagttggcctgcgacggcgcacagtagacacccatgtaagaacacacgttggagccattccagttggttgtgaagttaaatgggtcggagaatatggctgacttccatgcttggagagctatgtaagcttgtctaagacttgggttttcgaaggttagaaggttaggatctacggtgtcgttttgtgtttgagctgagcttgtctgaaaaagaaaaacgacgaagcagagaagaacaaaaacagaaccaccgccaccaatgggaggataagaaggcctagacattgggacaaaataacatgaagaagatgaagttgattaatccttaaagagagagaaataagagagagagagttgcactgtcttcaatggtggtggcttttggacagagtgcctcttacccatattcacatgctgtatttatatataaaatctctatatgattattggtctttaacttaaaggtttttttttatttatttattttcaaaataatatttatattttaagattttcgccatatggattgttttttagggtgttttgtcaacacggttttatgagttatgataggtttaataaaaagtgtgaagtaataagtatattttttgttttttggttttggtataaagggtttttagggttttggtttttattataaagagacatggtagcacgtcttgagctggaaaattctaaagaggagtggggttcaatcaatttagagcaatgtagacttggtcactttggagaaggacaaggacaaaggtaatcaaattttaatttgtaaagagagagagagaaagagtttgacttcataagacgtggcagccagcttctcttcagttctccaccgactctgctaactcatcttactcggtttactcccactgggacagctcagccaaacgattctattcactttttttttatttgaataaaaataataggaatacaaaagaataagtttttgaaatctatttaataatttgattattgactatggtttaataaaaattgattagacaaggttctaacttgaaacatgcttattataccttaatatgtgtctatgaattaacttgttattaaaataaattggatgaaaagatataatatgtgtgatttgaataaatatgggtgttaccttacttgttccaaacatttgaagatgtacaataatgaaagtaggtgaaacagagcagaacagagtaaatgttacacaactcgagaatattatgcaagtttagcattattggggaaattttttaggtttgtgtgacaaaatgtaaatgccataatatttgatggtctagtgtattaaaccatcaatgtcagtttaggcagtgaaaataaaagtaaaataattattgtggtaaataattaggataaagttctcttatataaatgataaagaacattgctctttggcagcaatactgtatattgtgattcatttaattcagtaactaaccttgcatattttatttattttttacatgaaatgaaattttttggcaacattaactttaattgtggctgttgtaaccacaacatcaaacaggaacaaacacacaaaataaacaagaaaataattaatcgtcaaatataaatcatagactggtttatagaaatcaaagtctaaaacagaattgaaaacataaagaacacaacatatacgtggttcaagtaaatattggctagacaccattctacttcacagctaaaatcagcctcaagggcttgatgatctctttataatttgagttgtcaatctgtataataatggagtctagctccaatctctctcaataatggtacaagaaacac

SEQ ID NO: 186362 - DNA, 2479 bp, Cannabis indica
ctctctctctctctctctctctctctcgtcttgttagcgtgaatggaaaagggtgagaagtgatgactagccatcaagacaaaggattaggttaatgtaaaaaatagtattattttgattttttaataaggtgttattttttattatttgtattgggctacttttaaaatgggtttgattagaatgagagtaggctcatgatcaagatattgagtgagggattttttgaatctggctttaataaattgagtgaagtgagttaatatatgtacatatctacatgtaaaaagtttgatgtatatatttcagtgagggcttaagcctacatatgggctaaagtcccttcgtccctgctgcttgcaactagcccaagctggaaaggtgcattgcccccaactggagcttcaagatgtacatatttttgaagagtgacaagcttctgtctgatgaggaattctatctcgtctcgcaactaattacaatcatttgtgtcatgatcgtaattgtcatgataacaacaaaatttattcatgtctctcttccctaactctttcaagagaataagtttgcggtatgacactattgattgtggtcttatagatctcatctcttggagccaagataatggagtaggtggtgaaatgaggttcatactctcgtattggcctacccctagtttcagctttctttccaccagggaagttaccttatttcccactattgttggctcttttccctccgttcaaatctcttttctttccattaacctgcaatgtagtgttaagggttagggagtttggcgacttcttcttgttaccttttgagcccttggcttgggtgaaaacttcttccagcttgataaagccatctagtctatcaagaaaatcattcatggtgtagactaatttgagacaaaggtcaaaccacagaggactcatctcattgtccagttgcaagtgccataacccttgcatccttgctaagtatttttgtcttagcgcttgcctccaagaaccaatgtatatagtccttgagggactcatcttcttgttgtgtaacgtctaccaaatcattgggctcgatttggcaatgtcgggaaggaccgaattggttgccaaaagcatgcactatgtctttccatgagtcaattgatctaggggaaagcttgaggtaccatcgctgagctaagcctgttagtgtggcaaggcaaattttgtacctggcattgtctctactccttgctgatcgatcagcacttcaaagtaatcctctctttcccattgtattgatgcaaggaaggattcttgaacttcagagggattgctagagccttgattcggttagagagtggtgagcatcgctttctgtcgagttcaaacttagacaactttggggtcattattccttttattagggctgctaggttgccaaactctatactgttgactccatggatgatggtttgtgtcccaattggaacttctgttacccaatcagggtctcctctagacgctcctacttccaccaactgttttctggatagagtgtcacataggtcctttagtcttccaagtcgatcgtgcactttagtcgacttaggtctaattgttttctcctaaccacataatcgtgaaggcaacactggtgatgtttctgaaatgatttttagaacgtcttgggttaatacgttgtgggaatggtcattcaaagtattgtagtggctacttacatcaaagtagtcttcaactggatcacaagtatggagagaaatgagatggttgctcaagttcaactcctttccatgtactcgtgggaagtactcatattgttggccattggggccacaagcaatgtaatggcacaactcacctctttcatctcggaaatacttttgagtatgaagcagctcattggtccttactcgtcagatctcataacctctgaatttaaaatagagtcttcaattttttccttcgatatgagtagtaggtctctttccctctgtagggtctcgagacttggtgtcattaaagcaacaggaagaacctggtggaatagtcctgttggttctctcagtggttcatggttgcttcatatcaggtggaggatccatttattgattccctcgagcttgagccctttcagattcttgccgaggtttgcttctctctgggagtcccaacacctattttttgcttagtgcttgcacgattacaggtgtggtagtagtgtttcgtgcattaagagtttttccttgagaactagtccccacgtggccagttggccgatgggcaatctctcttacctactcagaaagaccactatgggggtagttctgtgaccaaagtgataggcttctctgattcgttgagacatgttggctctttactattcccgttcaacttgttggctctcaatgttctgcagttctcatggaaccagtttggaactgctcatgttgattgtcaagagaatattg

SEQ ID NO: 186363 - DNA, 3158 bp, Cannabis indica
ataaaaaaatatttaacaagtaataaaaataaaaaaatcctagacaaattcatctaattaacatttctcctcagttttcgccttccgcaagtaattagggaaatactaattataatttttaattaagtttcaaattttttcttgaaattttgttgttagttatatattaatattatgtaaattttaaataaattctaaataaaatacacaatacagaaaacaaaaataaatttacaaaaatggtttattataacaaataaaaaaaaattgaaaaaaaatattgcaaacatttcagataaaataagaaagaggcaacaaaaacgaagaaccaccaccacttccaaaaatggcttcattatcatgttgctgctctctcactccatcatcatcatcatcatcatccccttccattacccaattcatctccgaccaaccatacctctctttgctagaaaaacgttgcaccaccatgtccgacctccaaaacattcatgcaccactcatcaaaaccggactaatcaaagacaaaatcgccgccagtcgcgtcttggctttctgcgcttcccccgccggaaacatgagctacgctttcatggttttcaagcaaatacgacacccaaatcatttcatttggaacacaatcatcaggggcttcgctcacagctcaactcctcaaatggcagtctctctcttccttgaaatgttactcacttcatcctttgatcctcaaatattgacttacccttctgtttttaaggcctatgctcgacttgggcaggcttattttggggcccagcttcatgggagaatagcaaaattgggtcttggaagtgataggtatatacgtaacaccatcatacatatgtatgccgtttgtgggtttttgagtgaagcatggaaactgtttgatgaaagttctgagttagatgttgtttcttggaattctatgattttgggtctttctaaatgtggagaagttgatgaggctataagattgttcaataagatgccattaagaaatcccatttcttggaatactatgattagtgggtatgttaggaatgggagattatttgaggctttagagctttttggcaaaatgcagcaggagagaataaagcctagtgagtatactatggtaagcttgttaaatgcttctggtaggttaggagcaatcaggcaagggaagtggattcatgattatattataaaaaacgaaattgaattgaatgtcatagttgttacagcaattatagacatgtattgtaaatgtggttgtattagtgaagctcttcatgtgtttgagacagctcctaaactgggattatcttcttggaactctatgattatgggtctagccttgaatggttgggaggaagaagcaattgaattgttctcaaaatttgagtcctctaatcttgaaccagatgatgtgagttttcttgctgtactaatggcttgtactcactctggcatggttgataaagctactgatttattctcattaatgatagataaatacaagattgaaccatcaataaggcactatagttgtatggttgatgttttaggccaagctggatttgttgaagaagcagaaaaggtaatcttaagcctgccaataaaagcagatgccattatttgggggtcactgctttcagcttgtaggaagcatggaaacattgagatggcacaacaagcggccgagcaagtgattgagttggatcccggtgagagttcggcttatgtactaatgtcaaacctttatgctggttcaagccagtttgaggaagcaattgagcaaaggcttaacatgaaggagaaaagggtagagaaagaaccagggtgtagtcttattgaagtggatggacaagttcatgagtttgtagcttttggaaggacacatcctagagctaaagagatctactcactattgaattagtaaggactgttaaactccttgtttataaattgtaaattcagattcacaatatactttgttaatataaagaaattttacatagtttcgtcctaaattttaataactattttaaacgtgttcaaagtattaaagaagaatattaaatctttagattcacacttgtttaatacaatgaaagtggtagtataagaggtattatctaataagtgaagctagaaaatctactcagaaagctttatatattgctgaacagataacagagaacaacacagaataaaaacaccatcagtaaagagacatgggaaattcttgaaatcaaacttgagtctttgacatggttcggcatgaagcccaggagaagacctcaggagacatattaccattggtgagcaagttctgaggcatcccatataaatctgagacatctaagggatgatgacgaccattttgatagtgctgattctgcagggctgcagctacttcatcctcatccaacggtaagcgatcaaatgtggcgttcatgaacgatgcagccatgatcacaacagggcccgaggcaatgagcgagccaacaacgcatccacccacaacctggccctgagccccggccaagtagatggtcagtcctgtaatcccaggcggggctggaggaggcaggatcgaacccagcaaggagagaatctcgaacctgccatggagagttacgatggcaccagatgaggctggttgcctaagtgtgacattggttacacatccactgccactgagtatgcaaatgcctcgttgcttcctcctggcaaagttggctaagctctcactcacatcacaacctgagctcacttccatggcatgtgcccgaagtgcatttgcactgtcacgggtaacaatgatgggtggtttgggcttgtttttggagcctgctggtcttcctcgaggccgtctaatggattccctgtcggaagcagaagaaaccggtgtaactgcctttggtattttctgtgccatcagtaaggcctcaataccagatttgtggtggttagttttgtcaggttcttggctcctgtcaatggcagttttagacacaacagaagggacagcttgatcaacaccacctgccatttatccaactcgaaaggaacacaactttgttttttttttcctttttcttttcttttttccttatttaaggaaaatttagcagaaagatacagtgagg

SEQ ID NO: 186364 - DNA, 5947 bp, Cannabis indica
cacgaagaggcgatggtgaaatgttggaggcgatgtgcggctatcaagaagtatggaatgatcctcctgcgctggtgaaggtgttggttcttgcgtggtgcagttcttgtattgttcaaagaatatggaggcgatcacgaatgatctggttttggagaaggggatagaccctcatgaagccaaatgttcctgcagttccagagcttccacagcaaaacaaacaaagagatgataatgtccaatagtaaattcagtggcagcaagatataataaatccatacagctaagtgaagaatgtagtaacaaataaaagctttaaaatcagttagtttccataccttctgggcagcagaacatctgaagagagcatgttctagggtctcatcgtggtactgacatcgactgcaattgggagaggttatagtctttactgttaaaaaaggtttcggcttgtagggagtatgtcatgacagacacgccataggaagtgtttcacgtttaggaggcaaagaaaggttccaaagtgctttccaccaatcatgagaggatttgttattggagggggaaggttcagtgtggtgaagctgtctatgggcaaggtggtaaccagagttgactgtgtatgaaccatgaggggtgagggtccagtagtatgtgtccggagtggagattgtataaaggggaatggaaattatagcttgtgtaatgtctgtggggaagagagactgaatagtgtcatggttccattgtttagtaggtgtgataaggtcagccacggtcatatcagcattcgaatggtatcttagaaaggatagttttccataaccagggatccaagcatcattgtaaatattgatggtagtgccatcaccaattgatttcctaaggcctgactgaagaagttctttaccccaagtaatactcgaccaaacaagagaaggtctatggcctttgccagaatgcaggaagctagtgtgtgggaagtatcgggctttaagtagtgtggccactagcgaatgaggatgatggagtagccgccaagcttgcttggccaacatcgcctgattgaaagctttcatagaacggaacccaagaccaccatggaattttgaaaagcaaagaaaagaccaagatttccaatggattttcctggtggtctcagtgccgccccaccagaaccgagccatgagggattcaatcttagagtggaaggatgcgggaagcttaaaacacgccatggcataagaagggatggcctgaacaacagatttcaaaagtacttctttaccacctttggaaaagactttagaattccatttatttaagtgagaccaaacacgatcgtttatgtagttgaaagcatccttcttagatctcccaaaagcttgaggaagacccaggtacttatccatcgtttcccgaacagggatgccaagaagcgttgcgatttcatgctgaagttcaggagtcgtgtttggagaaaaatacaaggctgacttagtgtaattgaccagttgtccagaggcacggctgtagtcacaaagaactatcatcagcgaaaaaagagatgggagatggttggggcacgtcgagcaattttaatgccaagggcatgactccgaggttggcgttgttgggatttagagttgatgagcgaagaaagaccctcagagcagagaagaaataaatatggagagagagggtctccctggcgaatgccacgagtaggtttgactgatccaagaacttgttggttaagggagatggagaaggtagctgtggagacacaggccataataagctcaatgaatcgcttgggaaataagaacttttccataaccttacgaaggaagacccattcgacccggtcaaaagctttggccatatctagttttaatgccatccatcccagacggccggatttacgatgagagagagaatgcatgacttcctgaccgatgataatgttatccgagattaaacgtgaaggaagaaaagcactttgtgcaggagaaatgatgcgattgagaatgggcttaagacggttgactaagacccttgagatgattttatagaaggtagagcaaaggctgatgggtcgatagtcagtgatctgctcaggattattccgtttcggtataagaacaaggagcatttgattgatggctgctaagtctgcatccccattgaggaagttgagagcagcaatggtaacatcttgacccagcaagtgccaattcttttggaaaaaactaccactataaccatctaatcccggggctttatcatgggcgagttggaacgttgtagttttaacttcactagccgtgaaagtggcctgaaggagatcaatttcagcaggtgtaagactctctgagatgcctgaaagaacgtattcaatgacttcattgtcaggcatttgactttgaaaaagtgcagtaaaatattgctcaatggtggccaagattgagggtgtatcattagcccaggaaccgtccagtcgttgaagggagagaattttattggtggtgcgtctctgggaagccatgcgatggaagtaacgggtatttttatctccaagtttaagccatgtgactcgagagcgctgctgccagtaaacttcctctttttgcaataagccactcaactcttcttcaagcttttgactttgttctaattgttccgttgtaggattgggcaaagagttgattaattgaagctgggactggacaatacgaatttgggcagtaagcggtgggcccaaagacttcttccaatgattgagccgagaggaacaatttgcgagtctttcattgagatcagttaaaggattggagtgagtatttgaagtggtctgggtccaggcttcacgcaagcaatcctcaaatccaggttcagacatccaaagtttatcgaaaatgaagcgtggaggaggagtgtgaggatcgctcatgtgactcaagttgagaataagagggcgatgatcagagccaaaaaaatcaccgtgattgagatgggaagcgggaaagatggcatcccaggcctcgttagagaggcaccaatcaatccgttcctgggtgtgatgaggtggcttttggcgattagtccaagtaaagaggtttcctgacggcgtgagggggtgaagttcgtaattgtctatgaatgattggaattgtgtggatggagttcgagacatgttaccccctattttgtcagaaagggacaggtaatcattgaaatcgcccataatgagccatggctgaagcctagagttagaacccagtcggtctattaaatgccaggtgtgcaatttatttcgggcatgaggcgcaccataaaaagcagtgaaagtaaaagcattaaagttaggaaacttaagataacagtgaaaatgacttatattatatgaaagtaaggttacatccacatcatgtgtccagagcaacaaaagaccaccactaagcccgacacgtgggacctctaaaccattaggaaatttaagacttgaagcaaacttatttaaagctccaacagggagtttagactccattatatacaaaagtgttgggcggttttgcttcaccaacagggagagagaacggaatgctcgtttactccccaatccacgagcattccagctgatgatgttcatggctccagcgtcacccgcctcttcaacagtctcatcctcaagggatttggctagattgcatgtgcgtttgagcattcttctaaattcagcagcattcaagcaatcgggacgctgaggcttgaacttcctaacccttgtggaacttggagtggggttggtagaagagcccacagcgaagcgaggtggctgagctgggttcaggtccgataatatggtagaaaaagcttgtgagatctgcaccacatgttgagagaccccggtggtggccactagtgcctcggcagtggtggaaatgggcctaagaagaggtgttgcaagttgttcagcagtagtgatgggaggaaatgttggtaggtgagatggagcagtgatatttggtgatacagcaggggattgtgctcgtgaggccatggttgcagcagcagcaacagtttggtgagccggccaaaaggtggtagtggggggtgagtgattgagattgaagtgaggggaagagagattagcgtgcaatcccattagtgtagtttgtggttggctgagatgttggattccataggctgaagtaggttcgttgaaagggccttcagtaataacaggggcttggtgaaatcggtaaggagatgatggtgccaaagaggcagggttagctatatgaggccgcaggcgggtgcgtgagcatgcgatataaaaaggattggaggttatccgaatttttgccccgagagattggtcatagtgaagcagaggaggcgctgatgaagagtcacacttagcaaggaactcgtggcagtgattcacaatgtgactaagtcgaccacagtaatgacaaaaatcaggtaagttttcaaagcggaatttgagccaaaccggggcagccataccatgaaaatggaagcccgttccacgcgggagtggctgagtttcatccatttcaatacgaactcggagatatgggccccaagtttctttgagggatgcagtatcgacttcgataaatcgccccaagacttcaccaagtctttgtgcaagagcacgggaccgtttcaggaatggtataccagagacttaaatcaaaaagggggtggtagtaagggcttcagcagtaacgacagagccagcttccaatggagtcatgactataagcttatagtcaaaatgccaaggttggccaatgagaactctgcgtctatccccgaaacagccaaattcaacagtgtagaagttgggttctttttcaagaacattgattgaaaaacgttcgggccacatctgcttgaggcggttcttgaacgcttcggaattgaaatgacgagtggtcaaaagcttgacggctaagaaagcaaatggttcttcgcgtccatcatcctctggatggtcaggtgcttcggtaaaggaatggatttgtgtttcaagagccgtgaggtggcattgaaggtattggacaagtcgtccatttttggaacaggggtgaagatttggggataaatagaaaaggaaagattgatatagatgcaaagatatattaggaaattatgctgaagaggacagtgtgcagaaagaaacaaaaagagaagggatatataaaggcagaactggtcgagtatgtactctggcaaaagaatatcagcaacaattaaactcttcatgtcaggaggtgtatcgattatacctgcagaattgacagtggctcctagaattgggatagtgtcctctacgattgtagagctaaatcattgtccaggggtggttcaggatgtgtgggtttctattaatgttaaatccgaaaaagaggggttttacttataaaggaaagattgagaaattggaaagggaatgcagagcaaaattaaacccagatgggacagtagtgctggagtaatggtagattagaggtttacctgtgaagggagatgacagaatttattgtgagattccgtctaatggcagcaaacggagtctggggatgaggggagaaaccgtcactggactgggggaatggtggacggactgtaacgccgatgaacggcgacgacgacaacagcagcatcaacgacgacagtatacggcgagccctagttcacacttgtcttcagaagagctttccacaaaagaattagttacatataaccaaaaggttagtgtttagacatgagccctcaccttcagctaatgtggtatgcaatatgtaggagcaaggctataacttagcatttaatcattccaaaatattccttataccgtgttacatacaattgtatcaataatttgtattaattttgtaataacttttatttt

SEQ ID NO: 186365 - DNA, 2493 bp, Cannabis indica
ggggctttcaagggatgcaaactgaaaacgactgaccttatctcgtcattggaagggcttttcatcagatcttcattcgattgattggagatgcgatttacaaacagctcttcaagatcattatcaataattggccgagaagaggaatagagatccaggaagtaggaattgatggtccttgctatattattcttgtctttccaagtcatcccatctttatccttgattgaccaaatattgtttctccttcttttaatgacagtggctgtgtggaaatattttgtattgcgatcaccaagagcaagccaaacctccctggatttctgcctccacatactttcttgtttcagccaggcttccatcaactgggattgaattctgaactcttcttcactggaggcatccgagataggttgttgctgaatccaatctaaccttcgctccaagttctttatatcatctatattgacattcttcaaactccttctccatacttgcagcgcgtttcttgtactgcttacattttgcaaaagagtgttagtcgctccacgactagataaacaccacgacttaaccacttccattctgcaggagtcctcccatgtccaggcttcaaaaaatcgaaacggaataaagccttttgtaacaaataaatgtgtatccagaacgatcggtgcatgatccgagatggaaataggtagattttgtactcccgagtcaacatattcagtcacccagttagcagagcacaacgctctatctaacctttctctgataagtccccccttgaatcttttgttttgccatgtgtatttgccaccgataaatcgaacatcgacacaccctgtattctcaaaaaagtttctgagccatcgtgtttcagcataagtcactttgtttcctcccatcttttcttcttggttttcaatacagttgagatcacctaccattacccaggggatttgacaattgttgacctccttttccaaactactccaaaaaacatctttaacttgattgtaaggggtgccatatgcagcatacagtttccattgaaactggatttgtccatcccaaacagttgcctcaaaaaaaccttcagccgcatagttaattaccatattaatattacgattccaaattagacatgaacctccagcaaggccattcgcactaaaacagcttatctcagaaaatcccaaattacgagccagagcctccattttttctttccttactttcgtctccatcaaaaaaatacaatccggattgtattttttaacccaaaccattaaggcttgggatgtcgggtctcttgcgaggccccgacaattccacgataggcacttcatggggcggttgggggcttgataagggccgcctcctcgcccgagtgaaaattttgtgagcattccacctgaacctcaacaaggttaagagtatcaataagatttctatttgtttcatcttgaatagttgtcgttgccttttgaattgcctctttctcagcagtcgttttccttgatcgggacccttttctccggcgtttatcattctttagagaagaggatgtagcacctgagcccatcttaaaaggagtgtccaaagtggaagaaaattcagggagtttgggcacctcataggagaactccatggtgttttcgggtgtgtgctgaacataaggaacaagagtgagactggcttttctcttcttttcttgggggcatggatggattaggttggttacatcttctgggtcatgaaacaaggttgggatgggctcaaatttttctatggatggagggcccattaactcttcagccaacccaatttcctcagcgtaaatgggccaagggaagtgggtgggctcagggtgtttatggggttgtcttgacacacaaagttcagcatggggtttctctatcatttgttcatatgtgggcccagtttgggccatgatagtggtgagaatcccattatccttagggttaggagggggtcttgaggaaaacttttgtaatatatcattgtctgataaggtacaagaataaccttgattatgtatttgatgcaccctaggagaaactgaccgagttttcctttccctgagattacttcttgatggtagagaaccagctggcagaggtttgtttttatccctcgggcaagaaggcaatttttccacaattttcaaatttttaccaaacttggctcctggagagttttcgttgaccctgataactttccttaatggtttgctagcctggaccggttgcagggtaggttcactgtcgatgtcgatgaccggttgctttcctttgtccttggtttttgcactattttgtggtggtctcctcaccgacattgtagtccggcttccctcttctctgtaatactgaagttggtttctagtgttaaaacagctaaacactgttgattctgccttcatccaagggccataagctggtaccgtgttaggttatttttagtatt

SEQ ID NO: 186366 - DNA, 2077 bp, Cannabis indica
tcctgttgccgtggtggccaacaacaaccaaaagctccgcacggttggattcggtgtcaatgctaggaacaatgagaggaacttcattgctggtaactcgactaaacctcttggctaaagataatagaaaaactcactttatattaacctgatttaaaatttgggcatgcagggaaagacaacattatcaagcaacttgagaaagaagcacaagagcttgcctttaacatgcaaggaagtgaagttgaacagatattcaaccaaccaaagctgtcttattttgtatctcagcaacaacaagaagagggacgtggccaaagccaccctctgtcatcaattttgaacttggcaggattcgcttaaggaaacaaagtttgtaacatgtgatataagcatgtaaaggagacttagttttgacttttttttttcctttttcttttttgttgtgtacttaacgttttggctagctatagttcacctttagtgtgagcctagcttatgtgtttaccgataaaaaaacagaagagagctgtagctttctgcttcatatataaataaaataatgttttcttgtcaagttagtttttcaactctccacatgttaacttgaatattaatgattataataaatatttcccatctggtctaacaaacgaataacctcatacataccaaacaatcactagttcaacattttatacaaagcttatatactaatatgcgaattattattaagaaccaaatctagtagtacctttcacttgcttttacttatttctctaatatataagtgtgtgtgtgtcaacaaaatgaggtggacggtagattaatatgaattgttataatgcaagttaatcttactttcagaaaggaaaaaaaaccataaattatttgtttgcatatatgcaacttctatacacagagatcatacttaacataaaaatttaaattaaggagctgtcagttttgtagctggttattgccatattaaaatatctatcaaagctatacaagttagaaccatatactcgaaagaattaattgacaatttcgtatcaatctggactttaatttattttttgcttttgttttcttagctggactaaaacaagggagtagactttatatggtaataaattaaagcaaattaatatatagatgactgttagaaaacaaaaaagatgaaataacagactttctttatagatatccaaaatttatgatatatagatatctagtatttatgacagtatctttaaaatagtcaaattagataagtattaaaagatgattcctgaacaaaaaaaagtattactgcctttgttcgaaggagaaaaaaggattactgtcattaatatcacatccaaagtcacaattcaattttaatctatctattataaaacccccttaaatagtcgcagtctaccaacctaaactaaaccctcctatatccctttttatatgctaaaattgtaagaactaaaaatggctaattcctctgtttcctcttccttgctcctagctctccttgtatgcattgcaggttagtactaattcttattcaaacaactttgtttcttcttttggtgaatggcgatctttgtttaaataattttttctcatatttaactgaaaaaattatgtatgtaacttattcaaaaactcactaatcttgatcgattgattgattgttattgtgtgaagtgaaaagtagcttattacctattgtggaaggatgctacgtggcggtggtgggaggtggttgtcccaatgcggaagcatgccgaatgacttgtgctccttgctaccgtggaattggatatatcagcgccttctgtcgtgccgccggcggaggaatgccctacgaatcgtgcgtgtgcacgttttcacgaggcgcaccatgtccaccgcctggtccacctcgttgcccgggtggcggtgctgcctttattatgattaatgaaactcaccatgagtagcttatcacagctataagaaattaacatgtattagaataatattgaagcttatgtatacaaagttttaaattttactgattatatactttataagcttc

SEQ ID NO: 186367 - DNA, 3488 bp, Cannabis indica
ttgcaaattgacacttatcaatagttttagtgccagtagagctgaacttaactgagatttctccacttattttattctattgaaaaactacacaaagttctaaacttcatacctgagagagtatgatggggcctccttgagactcaaataaatgttcactcttcattaacccaacaattcttttcagtaaacccttgcattgcattctagaaaacaccatataagaagactattttagtataaaatatagaaattttgaaactggggttgcaataaaattagtgaaggaaaccttaaaaggctcattgtctgttctgaagctgataccaggaacatactttagccttaaacaggaaaacctctagtgaaaaaattaaagtgttaaaatggtgaattaaactcaattatgaaaattcaaagatgaccaaacatagtcaaagttatgaagatctagctagaaaaagaggagtgagtacccaaaattccattctgcacaaacatatggtccaatacgaaggtgagcatagagaccagctttctgaatggtttttacaaaccttaccaaatcatacctcccttcaaaattgtactgcaaaaaacccaccaagaaaaatacaaagttaggaggaatcttctaagaaaacaaagccaaaaacactgtacggacagtaataatagttgaaatgagtatgaagagaagaggacaagtacattgccgggagaaggctcatgcacattccaaaacacataagtttcaaccacatcaagaccaccatctttagccttctgtatcagatcttcccacatctaaaacacaccccattttcccaagaaaattaggaacaaataaaaaaccacaaaaaaaaaaacaaacaaaaaaaagtaagagaaaggatttttggtacctcaggagtgcttctggggtaatgtattgaaccagaaataagaattcttctttgcccattaatcacaatggctttcctatcataagtaacactacattgaatcaattctaaactcaaaacacaaaccaaacccattaaaaaacacagcttggaacaaatgtttatccccattttctctcttatcttcgtctgatacccaattgggtagagtataaaatgaaaatggtcaaaagagtagaggaagaagaaaaaagagaggtaataaagaaaagggtgtctcagactcagagaggaagagataaagttcccattttcttcttcttcttcttcaactctctcttcactaaatatggtctgagactctgagcagaagggctgtatgtataataagtaatatatatacacacaaaggcaccagctttcactcattcacagtccacaagtgtcgtgggtcgttacacagcgtggctacgaattaagaaaaataaataaataaaaatgaaaactttgtaaaaaccgaatgaaaagtttaataaaaaacagtaagagttaataattataattaataaaaatcaaagctttatacagttcattcattggttaatgaagatttattaactgagttgttaacatgcgttttacagaatcctgtaaagtgtacttttgaggctatttccttataacttgtcagtattccttttgctttagcgccaaattttcttcctaatgtgctttagactaatacttaataaactatacataatgtacatgatgtgacagctttcaatacaaagttttttgtgtaatactaccagtcatttacaaaaattaaaatgtattatattaaaagggtatatttatggaaattaaactaacccaattcatcaaattttcattttcttttttgtttaaatgttttccatcttgattaaaaccacattttgaccaatcgcatgttgccacacgactctagaaatgttattatcgagtcctaatgtaagattggataatagtaatatttcctatcataactcttttgtatttattttagtttttgggacatttttcaattgaaatgaccaaaataaccttgctgtagtaatgacacaaggaaggtgagtgtggctacaccaaaccaaagcatatgtcttcatatcacatttttgctgcgtctgtcaaatagttggctttccacaaagggcatgacataccgtaccatttccatgtgaacaacaaaaccccttttattttcttttcatttaattattttgggggctattctttcatgttcacatgaaaaaagaaaaatatgtgtgtatatgtatggaatagaacttcctccattcctatctttctttcatcttcatatttttttctttgtcattatctttctttgcttttcttcctaacttttttattgtctcaattaaaactcatatcatcatatctatatgtcaatcttcaaccttccatggatctgttatgctatctctgcctaagatcctcatcaaagaccagctgtcaattcatgctacagattacaataatactaatatttttgttctcttaccaatttttattcaattgtgataattctgactcacttttctatgcactactaacatagaaaattttgttagtatcccaataccctcatacacttgtatcataatgtgggtccgaattttttgttattttttttccttcttaaaattaaaaataatgtgtacattgtttacaatctctaatctaacaaagcctattgtataagatatagtataatataatacattctctagaaaaataaaaaagttgaaccctcttcacaatgatagggtaaaagcaccactaaacggatggaaccctcatccttggttacaaagttagatagttttttcggtatcatacagcgtaattaagtattgaatttcatataatttaaaaaaataacttttaatttaaaaaaataacttttagagaatatcgctaactaatcataggacgaaacctataaaaaatattaagtagtgttagtacccaataacaatgttcttattaaatcaatagtagaattttatcgtacaattattaattattaaaagtttaagaatactaaattaagacccacacgatgaattttaaattaaagcaaattaagattgttgtctttcgaattttggtatgcaaaatcgtatcttttgaatttttgaaattgttaaaaattcacctcaagttattaaaattgttgaaatcaatgacttatggttaattttattaatggactcctaacatggtgttgctcatgtaccgattgtgtccttcaaactttgttatatactaaaattgtgcttatgctctttaatatataccaaatcgtgtttcatgagctttcatttacgtcatgcgtttggacaaaagtccttaaatcccacaatcttaatagttcaaacaaaaaattctaatatatctaaaaagtttagaatacttaattcaatatatgtcatcaattttatggacacaaattctaattagctttaaataaaatatatacaaagtctatttaataaataaacccaataatta

SEQ ID NO: 186368 - DNA, 4413 bp, Cannabis indica
ttatggtttcgaaatggtgagtcgaattattcgtaattgttttgctattttttcgtttctaattgattgattttaagctcttttttagctttaaggattaaaaaaaaggagtgtttggataaaacataaaagttgcttctcccaaatggatttttgagaagctatcttttaagatatccaaactttttgaaaagagcttttcactaaaaatggatctttatataatagttatccaagctgaaaaaaagttaagccaaagttttacttattttatacttttagcaattagcaaaagtaaaagttaagccaacctaggccattatatgcttgcatcttttgcttgcgaacggtcttggatttatttatctgatttttgcatatggacttattaattagtttccttgatgctgattggtcaatttagttggtcgtatgctaatgattttaaattggttttatgtaggaaacatttgaatttctcaatatattacaagtccatggctttccaaaggtcatgggagttcttactcacctcgataagttcaacgatgcaaagaagttgaggaagacaaagcagcagcttaaacatcgattctggactgaaatatacgatggggctaaattgttttatttatctggtctaattcacgataagtaagtatcacctgaccattttgttgccaaggaccattcatgtttatgcaaaccaataaagcctatttagcatccttattctttacacgttttgtatttaacattttctcttttgatgagtaggtatcttaaacgtgaagtacataatcttgcacggtttatatctgttacaaagttccatcctttgtcttggcgagcttctcatccttatgttttggtagatcgttttgaagatgccacacatcctaacgaagtgcatcagaatagaaaatgtgacaggaacgtcatactttatggttacttgcgtggctgtaactttaaaaagggaactaaggtatgtatatacttaaaagtctgtcattgttacttcaatttgatttggtgaaaactcttctattcgttctaattgttttatattctcttggtggggttactttaaaatttttgtcacttctgttgcaaagtttatctttattgttctatgtatatttattatttgttttgtcttgtcattgagaatcagaagttgatttttttctctctcacaaaagaaatatgaacaaattattgccatgttttctcgagacaggttcatattgctggcgttggtgattatgctgctagtgtttctaacttgcccgacccttgtcctttgccatcagctgcaaaaaagaagggtttacgtgacaaggaaaaattattttatgctcctatgtctggacttggagatttagtctacgacaaagatgcggtatatgttaatataaaccgtcattttctccaatactccacagttgatcaagaagaggaaaataaagaaaatggggaagcaacaaaagaaggtgacttgtttaaagactgatagaaaattttccttcattgttgcaagtactataattgtaattactaagcatttgacttgacatattaacagaaaaggaagatgaggtgggtgtggctttggtaaaatctcttcaaaaggcaaaatattcagttgatgaaaagttagagaagagcttcatttcactttttggtcggaagcctgaatcagaatcacaagaagataatgaaaagttagatcaagctgaagctactgaaggagatgcagtgatggatagtgaagcagaggtttcagatgaagataacgatgatgatgtttcagagcaacaaactgagcaaaacgagcaagtgaaggaacatgttgaatttcatggaggaaggctaaggagaaaagctgtttttggagaagacattgctgatgataatgggaaggtgaatttggtgaacttatttatagctttgctaattgaaaatatgaattgaagaatgtccaatttaataacacaagtacttgttaaaaagctggatttggtgtatcattaagggatttgccctttcttgtgattcctacagatgggaatgaggccttgaaataagaatgttgcataaacaattttatggttatgcatgtttttgatgaggttaatgatgttattatgttgatttgattgattatgaactataaatggttatgtcatttaaattagaaaaatgttcttcattttatactaaggttctctacatttgtgtcgttgtaggatttagatgatgaggatgaagatgatgttggtggtagtgattcagaaaatgaagcagcttctggttcagatgcctctggtgatgatgaagagattgatgaagcagagggtacatttcaacgtttcttttgaatttataatacactagtgttcttatttttcatatagcagtgctactcattatcaaaagtgtgtaaatttttacatgatcattaacttgatggaaaatggtcgattagtatgctgtttttgtttattgaagttagtaaattgtaagtcaggctgcttaatatattatcactttctgcaatattttggtcctgatttcagagggcatgggaaatatttcgagatggaaagagtctataatagaaagaactaactcgagacaaactactagccttatggaacttgtatatgggaagactacatcaattaatgaagaagagagtggtgaggaaagtgatggagatgagttctttaagccaaaaggtgaatggagcaaggtttgtactgcacagttttttttgtgaagtcttcttgatggttctttccctgacgttttaacatgcaattcttgcatttgttttcctttataacaccaaacaacatgcttttttactttttttctttgctttcgcgtttctctttattctttagaagaaaacaagtgatggcgttgatggtgagaatctgaatcccgaggactgttccaaattcagaaatcgttctagtctcaaggactggaaagaggacgacaagcttattgcaagtattcgtgatcgctttgttactggtgactggtcgaaagctgctcaaagaaataagacatcagaagacaacattgaagatgatgatgtgtatggtgacttcgaagatttagaaactggagagaagcatggcgggagtcatgcagatcaagttggcaaaggcactgatcacaaggaagatgagttagcaaatgaagagcggaggttaaaaaagcttgcacttcgtgcaaagtttgatgctcaatatccttttttaagcaatatacttatagtttttacattatctatccactcattgccttccaaaatataacttagaaatttattagacaaagggttttgaaaattattcttttagttatctgttatttgtaggctcgttatagtttctatattgagtcatcaccctatagtatttgggagcaaggaaatactagcatgggaatcaaacctcagaacttccctatgccattattttcactctcttaggtattagaacctgtgtgaaatttctgtgaccttaacttcgatgtacttttgaagaagctgaattatcagaagaagaattagatggtaaacatggagccaaggttcctagagatcagcctaaagaaattggatattttgacaaggtaaactctctgacataatcctagtaagtttatctgcaatgtaaactgtaggagggcactaacttcttagctgatgcatgttttccagttgaaggaggagattgaaattcagaagcaaatgaacatggctgaacttaatgaacttgacaatgataccagattggagatagaaggatttcgaactgggacttacgtcaggttggagattcatggtgtccctgttgagatggttgatcattttgatccctgccaacctattttggttggtggaattggtctcggggaagaaagcgtcggatatatgcaggttgacttacattacaaaaagttattctctttctttgctgtgcttattttcttctcgatgttgtataatttgcctattatcatttctcactaccaggtttgttgagacataagaggtttttttttacctgcatttgttccataccattcttattctgtttggtttctctctaactatatttagaggtgttggtttttgcttataagaagtttcgtagacactttggcctgttggctagagaaaatcgttgcttctttaaatcgtcaaacaacccaaatataaattagtaatcttgtatactctccctagttaataatttacatgtcatttgtataattattaaaactgaatcatccatgttcgtgaaaaagttttgtgatcaactgaacaagaatgaaatgagtgcttttgtataattattagaaagtattgattgagcttattttataaat

SEQ ID NO: 186369 - DNA, 599 bp, Cannabis indica
aaaaccttaaaatttgaataactctacagttttagaggaagatgaaattactatgaaccctaacccaaaagataacgcaagatgaattttttttttgaagaaataccttaaagaaatatgaagaaaaaatcagggctttctcattatggtgaaggatacgataatgtaaaaggataagaaaatacctcatgtatcatgaaaatagagctctttataaaatgaattatttttttaacttttatttaagattattaattggctatatttaaattgttagaaaataaaaaatacagttcagaaggtatttggtcctttcaaaatttatttcattaaaactaagtttaaaggactttctttactatttcacataacagaaggtcccttatttagtttataaaaaaaacaggtttttgttgtattcagcaaaaactcaggaaccatattggtgtaaaccatttaaagaaaaaaataatgatagattagaaagatcatttattatgctatgattttattacttaatttatgcggtcttttttttttttttatcaaggacggttattatagtaatagttagaggaaaattgaagaaaaaaaaaaaa

SEQ ID NO: 186370 - DNA, 4416 bp, Cannabis indica
gcaattagggctctctcatggcacactcggatccatgttgcagcacagatttgctctggcctctcctatctccacctggccaagcccatacccattgtccattcccaactcacaatctccaacatttttctcgaccgcaaccttgttgccaagattggtggatttgggctttcacaagcccatcatgaatcccacgttgtatccgatgtgcaggcctttgggcttttgcttattcagctgttgactggtaggaattgggctgggcttgtggacgaagctatgcttgttgataagactgcccttgtccaggtcttggatgagacaggtggagcgtggccattggatattgtggagagacttgccttgttggcatttagatgtttgggccccacaaaattgaaggtggaagtggcgatggaagagcttgaagagttgaagaaaaagtgtgttgaattagttgatagaagaagaggtgagattagcagtattgatggaggagaaggacatgagtcttgtgaagtaccatgtgtgttcctttgccctatatacaaggtaagtaagatcgttgagtttttgtttttgttttgtaacatgacataaatctcatccgtatatactcttagcaataggtaataggtatcattctctaaattcattaggtaattaatttaaaattattaattttatttttatttttaggttttaattagatattgaaattggatcatattagttttaaagtctaagtttcaaatttttaaaatagttgaaaacttatataactatctgacaatgattgtgtgtgacacacttgtgtaccttatcattagtgatgtggttccatacattgttagatttatactaatatggtccctgagtttttgctaaatacaacaaaggatccaagttttcataaactaaataaggcaccttttgttatgtttaaaaaacaaaaacctttaacttagttttaatgaaataattttttaaaacaaccaaaataccctctatacgaatcgaaatgtcttctacaagactcccttctccacttatagtgctctttagagtgctttcagtcggcaacaacgacaaagaaagtcaaagattacgacaaaggatgaaagaagttagcaaagacgacgaaagtaaaaggaagtacgatgcactacggtgagtggtatacctctgttcttgttctgaaagtaaagtaaggtttaagttcatctcattaggtctaaacaaatctgaataattgatgaaagttttaattttgactatttaaaatcaaagtacacggaatggggttgagtttgggcaatgcgtattaaaacagtactactacaaaaaagactttttggtttagtttttatgtaacatataagatattcttcagttggtgtaactaatgctatagccgtagatgcaaatactgacattttttgcttcactcattaacagacactaaaatatttttatttcggtttatagccgaaacaaatattaatacgcagcaatgcaaattggtttttttgctttgactatgaaccaaagtaaaacaataaaaaaatttgaatcaccacgataaccaccaccaccaccaccacatcaaaccattcagatttgaacgaaatatagaaccaacctagaaagaacatataaacacaacagatcttaaaacaaaaatacaatttatatcacaattctgaagttggaaaaagagggggaaaattaaaagaagagatctaaaaataagatcaaagaaagaattaaaaaaaaatgagttgaagcttgggcgaggcgctgcttggaatttttgggcttgggtgctggggccgtcagagcttctgtggtcggtgtggttgggatttttgaagcttgggcgctggagcttctcgagttcaagccatcaaggatgaagataaagagatagagagacagagagaatgagttaaagccgacagttaggttattatatatcacttaggtttaggttttcatttcaggatattttagggcttgaaataagtgattgtgatgtttttttttatttcaagtaatttagcgtcgattgtgcattgatgcaaaatttgcgtcggtgcacaactaacgcaaaaaacatgtaaactgacgctaaatggtgtgtttggacaatattgacacaaaattcaacccttcatatttgtgtaattttcttttaaaagtttatctttagcgtcagtttttgttttgtgttgaagtaagaatcgatgtattattatttatgtctgttaacaatcgaagcaaaaaagtaatagttgactttaatgttgatcaacgagtttgaccagatacgttgactgacacaaacttctttttgtaatagtgaaatctcaatgatcaaaatagattttgaccattttaaaatctaagcattattacaccaatagtcttttaattttaaaccataaaaattaacaaaaataactagcaaggaaaatgaaaatgagaaaacaatttgaaccaaaacaaaactaagaaccatatctacattagagaaatcataatttaactaagaactatatttgcattagagaaagcttaatctacatatatgcataaaaaaaataattattctagattcaataaggcaaataatttatatttatatttagatacataaatgtatttatagtggcttataattacccaaaaaaatatttatatattctatagtagcaggtcaagagaatcgaacataattgcacatatcataatcaaaatattaatttttgttagagagttccacattgataatgtgatgaaactaatatcatatatacataaccatacactttcacatcttaacatggtatcagagccaaactaaaaaaactctaatgaatatctaattcaaatccaaatatcggtctaaaagacgagccaaaaagagtcgcttgtgattcggggatagtgagttaaaaaatagttgttgtgagccaaaaagaaccacttgtgatcgagacgtgcaagattggtgagcagaaaaaaatagttaccatcttgagagggatattaaagagttccacattgataatgtgttgacaccaaagcaagattaaaaacctagtcaaataatcatctattaaaatcctaaaatttgaataaccctttaattttagaagaagatgaaattactatgaatatgaaccctatataacccaagaagaaagaaacttaaagaaatacatttactttaaagagatatggagaaaaaattaagagcttgtgaaggagaagatcatgtgaaagactctataacaataattttcaaggagaaaaaaataccttgatatgtatcgtaaaatagagctctttataaaaagaattatttttttcgtttaatatttattaaggttattaattggttatttttaaatttttagaaaaataaaaataatattaaagaaggtattttggtctttttgaaaatttatttcattaaaactaagttgaatgaacttatttttaccattttacagaaggtctcttgttatatttataaaaacttggggttcattgttgtatttagcaaaaattcaggataccatattagtggcctacattattattatgttgagacaaactatcattaattactcttatttgatttgtgtttaattgggaacaaggattaattaattaatgaacccaaatttgatgagtagttcttatgagttcaggatgtgatgagaaatccacatgtagcggcagatgggttttcatatgaaaaggaagctattgaagcttggatgagaatgggaaaggatacttcacccatgacaaacttaaagctcaaacacaacttcctcatccctaataactatctccactctctcattacagattggcacattaaaagatccattccaccaccttaattaaatataatttattaattagttactactacatataatgacaaacacatagttcaccatgcatatgtattactatactattagcttgtatttattgagtggaaacaaagctctcttacataatctactattgtttgttgatttccctttatatgcacatatacatatctttcaaagaattatcatcccaaatcttaaactaataaataaaataaactcagtttagaaaaagacaaaaaatcattctaaaccgccaaataatcccattcaagtattgtcatatctttatgtatgattataaaacattattactcaataattattgtataatatattaaatattttgggaaatatttttaaatggtgtcctaaagaatctattaaaggcatattcttaattcctctacatccgattccgaggcagtgaggcaaaccgtgaccctaattagatattataattaatgcacaaatattgggacacattaagttttttatatat

SEQ ID NO: 186371 - DNA, 2622 bp, Cannabis indica
aaaacattggcagccaaaaacacaaaagtgggcataagaaggaaggttatgatacaagacttgaaaggggctttgagaaaaaagaacacgagttggcatgcgattaataaggtaaatggttgtgcttaaagcatagggccaaaaatgtgtattccttaagatggtactaaaacattacaagagtatatataagaacaataaagtatcacataaagaatggacaactgtccaaaagggtaaaaagggaaagaacaaaatataaatccgattattttttaacactatacaagttataaattcaattgtaaccttaaaaacaaacaaaaatgtcaacaaaaataagttgaatctcaagtttaactattcaagattcaagattaagcttaaagtctagtcgcctcaaccaaattgagtgaagcaccatgtggatcacatcaaagggttgggctggcctattaaccataaaatgcctcttaacttttgaaattctcttatacattttaaggtactcctcattagagatcccttttaggatgcttttaatttctggtattttcgaaactggaatatgtattgaaaatttgctccagtcaagtacatcactgaaaggtagtgagtaattactagagatgatcactggcacacaccctacattgattgactccaccaatcttgggcttgcaacttcatacccacttgggcacaaacaaaacttgctttggcccattaagacagtgtaaccttggggccccaaaaccttttcatggacttgaacttcgttgtctttgtccttccaatgttggaataagatcttcctcacatacccatgttctccacctgcaaagaaggccaaaattgagcgattactaggagccaggcccaaatttggtgggcctaaagttccagggggcaagttaagttcaggtattgagacatctctattgggctgaaatccttcggaggtgttggcattgcagaggcctcttatcaagttgttgaatatttcaggattgccatgagaaatttctggtgcctacaatcataataagtaataatttattttatgtgtatctttttgtggctaccgttaagccaaaaacaaaataaaggtttatctactacctaaaatggacaaactttttaggtaccatttaatattatgcaacaatttatttattggaacattttatgatgtcacttttgttcctacaagatatttctatttttaacacttacaaaaattatagttcaattttttttatatgactatgtacattttagttataaaagatattccatctgtttttataaaatttaacaatttgtaaggtcaaaaatataattcacacatttagctgcacgcttaaaaaaatggtgtccaataaatattatgagaaatttataaaaatattggattttggtttaatttttacaaaaatattataacacgaaatttttttaaaaatactgtattttataaaataacagtggaacacaaaacagaacaactaaaaataacagtagaacaactaaaaaataatcgtagaacaacagtgaaaatttaacacagtacacggtataaaacttacgcagtatgtttgaaaaaaattccaacccacagtataaaagtaaaaaagttgaaagtatagtatgtggtgtaattatcccatatttttatatatatatatatatatatatatatatttaaatacgaattcttttttactttctaggactgtgggcactaatcatgaataaaagtgaattgtcctaaatattcatgtattgaaagcgaccttcaaaaaaaaacaactattttccttatgatacatcatatgaagatgcaaattgtttatagcttaatagaattaagattcccttatgtatattttcaccactaatttttaaacaacacaccaagtttgaaaagcccacaagtgaatagctggaagaaaaaaacaagcgtaagaaccaaaatgagtgattgagtagagagaactgacccaatcatgacaagagaccatgaaatgatcagcaccattgctcctattccaatagggatacttattggtgacaacctcaacatagtcattcacaactctaaacagacgatctctgttgtaatcagctttggaacggataggattgtaaataaattggactatattagatacactcaggggcagaaaaaatgtgtgtgcctcctcaatatttgtagccctgaaagggctcttttcactctctatttcatccatgaattgtccttctatggcatatatgttgttcactggtgccatatggaatattgggggctctccttccttgtagctccacactttaaacctcttcaccatctctatgtgactcctgattttgttcaaaaatatttactataagtaacaataccacaaatttatctatcataagagaaattagtattgcttactgatgaaaagcatatgaatttttgtatatagatcctcttgggacaaagctctcagctttctctgacttataagttttagagacaatggcttcacgaatagctgctcgagccataaccaaaccatgctcaagtttatccaaattactctgcctctgctaataaaaaaaaaaaaaaaa

SEQ ID NO: 186372 - DNA, 3065 bp, Cannabis indica
aaaattgtgtttttttcaaaaagaaatagaaaaagtgactgaaaattcaagaaagttattacgaaaacattttgtgtgtatattttttcaattatatcaaatttgattagtaaatctaattttagcaaagctaagttaagaaattacttaagaaattaaaaagcgaaatttgtgtatttttgattaaaaagcaaaaatcattaatggcggcggagatgatgatcagaggaggtggcgcgtcgagttcaccgccagctttgattctaacatctggagcaagtggaagaataagagcgattttctctccacgcgctttacggagtcttctgacgttgatctacgccttcgttttgattttgattttgccttttcgtggtcggagaagagcatcgtcgtcggagaagaaggatcgtgatgagatgatgaagcaggagattattatttgtggcggtggatcttcatcttcatcatcatcatcatcatcgtcgtcgtcgtcgcagcagaagcttaggaaaggatcatcgacggttgtgatgagagttccttcggctatggtttcgtggagaagagcggcggcgatggatcatgaggttgcggcgaggagagctttgtcgattaagcgtgttttagaagaagaggagaagtgttgtttggttagggatttttcgttgtttgtaacggcgagaggtgatactgtgtttactcagtcgtgggctccgccgtcatcggtgaagatcaggttagtcttccgaccaccgccatttttaattaaatttactttttcagaaattgatttattattattatttttttaatttttaaaataaaaaaataacattttcagaacatttacgctaatttaaaatattccttttataaagaaaataagataagttgctttttcatttctgattctgaaaatgacccttgagaatttattaatatataaggaaattctatagtacccaaaaaaaagtatggtagtaataatttaaaagagtcatgaattgtttgttgaaaatatacacaatcatgttataatttttttttcttttttgagaaatgttgttatcagttattattatataatattgaatatttgatgtaatttattggaattgttacttattaatttttaaagaatatcactaatcaatcgcaagtattaatagtaatagtaatgttctgtgtctaaattttagtcacttttaattgtgttgttgggataattacacttagttaaaatggtgtgtgatttgagaatgtctcaatcattattgttaagtaattggtttaactctaaattggtgaaaaaataataaaccaaaatggtgcaatcgttggagatataatttatgaatttgttgcaggttgattggttttttatactctgtgaatgtaactgtttcaattttgtttttgtacaatattattctatgttttggataataattttaaaatgggataaaattgtacttgtaatttatcaaaataaattcatttgacttatattataatatatttagtcaaacacagattggatatattttgttgataatgattagaagatttaataagtaaataaaatcaaaccatgacctgatgatgaattttcctttttgggtatattatatatatttatgtttgctcctatatatatatatattcttgtttgtatcaaattcaatgacgtgatattcactcttaagatttcaaaggaattattataagataatatatattctttggatgatgtatgtcctatatgcaatttcctatctttgtttgttacagagaggaccatgccccaagaaattcaaatccctagtaataaattcagctattttttcatggttgggggtcccctctactgttctttgttaatgcaaattaatggttgattaggcttgtgccttgaattgttagttgtgatattcaatatagttaagtgggcacagtttatagttagttgatatcaaattaaaattgtttaaataatgaatgctaatcatatcaatctcaaatgatattaatagtccttgatgaggtaactaaaatttaatgtgcagtttcaatttgattggaccatttttcttatcatcatatatagtaacaaaatcctaaatgtattttccaggggcttggttattattttgcacggtttgaatgaacacaggtttgttagttgttgatatgtattttcggttgattttattatttgatgattttgtttgttgataatcttttacttcatgttcaacagtggtagatacagtgattttgcaaagcagcttaattcctatggttacaaggtgtacggaatggattggattggtaagttttcgagaccacattttcgcattctagttgttatttggtactaaactcgacagacttacactacttagcatatatcgattattgtgttctatataattttcatctagcttcggcctgatcgttctagtcgttatgactagctcgatcattggggtctactaattccatttccatctagttccaacttccatggagtgttgatgatacaagaatcatctaatattgaaacttttcattatgaattttgtatttcgacttgaaaagaaatcggggtttcgggaaatgatttcttgttttttaaaatttgaattcaatatgtacaccacttgccatgtcctatgtatatgtttggccctttttttttaacttggcctccttgaagcacggtcctagttctatcttcgggataagtgtaagtatgaggcactggtggtcatgggtggtagtgagtctcacatattctattttcgattaaaatatgttcgatattaaattgtactaatagtaataacaatagtactgctgtccctatagaagagtaaataattcaattttccttaaaggaatctgcatttaattcctattaatattttcacttagtttatgtataaatgtttgtttctatcttcaattaactctctacacactaatactttagtcacagagagttattttctcttttctgttttgtttagagtaaatgtcattagttaatgaatcaacat

SEQ ID NO: 186373 - DNA, 4221 bp, Cannabis indica
agtgtcagataaaagaaaattcatctcatcgtattaaattaattaaagtttgaaatgccaaacaataccattaatatatattgtagcatgttagtcaagagaaccttgtttagttgtcacacaataccgaacccaaagaataacaaagtagttttcacatgatgcagtataaaattctagggaataatcctaggatcagctgccttgaaatatataaatatatataaatatatatatatgtatatatttatatgggtgtatctcagaatattaagactaaacaattttctacaatttacccaacatgctccatccaactatactagaaacccatatttatattttatactaattaagtttgatttaatattgtgtccaagtccaagacaaaacacaatatcttatacgtgattctgtagatttttatttttctcaattacaataaattatactatagcttgacacctctttggtcatgatatttctttttttattaaaaaaattattagtgctgtctactttaagggagaatacatgatacactgtcatttgtatatataaataataatatgtcaatctgttcaaaaaccaaaaaaataaatagtaaatcgcatcgtgaaccttttatttaaatattgctagctagataaataggtacatattttaataagagtacgcccgaaagcactactctaaatatgggtgaggtttttttacaccacgaaatcggtatgagctcgagtggcacgtacacaaccaggtatgaaaaaacatggacttggacatgctacacattagcacgatctcaaaaattcgagctgcacatttatacgataaatacgaataatataatacgtaagtacaaatagatattagtcaaaaaaacacgacacaagacaaacttaaaaaaacacgacatgacacattaaaaaatactataatttaataaatatagaattaaaactatatattaacgtggtttttggtcacacttttatttttaaatttttttaattacaaaattaaaagtaaatttttgttttaaaattgtgtttttgaaaaataaaaatatattttataaccacttttatttttaattttaaaaataaaaaataaaaaagtgtactgtaaattttatttttatttgtttgattttgtttaagtcgggtctgggttccaaggtctaggttggggtggaagtttaaaatattgataaaaaaatatgttttaaaaaaatttgaaagtcacttttttttgttctcaaaattttaaaaattttgattctcaattaaaaaactataaagtaaaaatagttttatagaatatgattttgaaaatatttttatttttctaattttttttttgtaaatcagcaagaaatttatcactctaaacatcaactttacatcctaatagcatcttcaatttgaagacctagacatctccaactatacagtataatgattgtttatagaaaaattccctattatagtccttctactggtttttcttttactttcctcaataaatttacaatgttgcaaaccaattcgtatctgctatactaacacttttaggccaaacataactaattcttctcttaactttctctttgatcttacacactaattgatcttcttttctctcagctgaattctaaagaatgtcatttctggcatgccaaagatgatacacaagggttgcagtagcagcagctaaaactagcttcccgaatctactgatttttgcccgatcgacccacctcatgagcttacacaatgagctcgattcagctccccaatccaagcaacatttcatctgttttagataaaccaaagggaatgaacaagtaaggaaacgatgctccattgtctctgtttgtgatctgcagaacagacagcaaccatcaagaataatattgtgtttctcaagcctctcccttgtttgtaatctatcttgaatagctatccacaagacaaaattgtgtcttggaatattatgtatacccgtacttcttggctccatctgaccttattttaaataggacaaagaagcttgtaaccgttagaaatcttatattgatcattagaaaactgctgaatatcaataagactcttgatttggttcttgactctaatcagccttctccaatactagcttccttgtgttggagcttgatagctccaccaattttctccattgatgtacacacaattaatccacctaattcacaagttatcttctttgttcgctttgcccaaacatacttagtaatggatgatgtgctctaatctgctattttcttaaaaccaattccccctgctaccttaggttgataaatattatccaagctataggtcctgagccttgaaacataagttagcccttccatagataagctcgacatatagcttctatgcccttggtaactttcttcggtaaaatcatgatttggctctaatataaatgaacagacaaatatactgaattaattagcactgctccacctacacatgataaattttgagaactccaaacttttattctagctatcattttgtcagctaaaatattacatttcttgcttgaaatttgtttggcacaaataggaatacataagtatttgaatggtacatctttcttgcaaaaacctgaaatatcaataatgcgttggatttctctgttcttcattttatagcattagattgttgactttgaaggattaggttgcaatccaggagaacatgaaaataacatcaagccttacaagacataatgaatacttttgaaatcaccatgacagaataaaataacatcatctacgtacaaacatcaattgattcagttttaactccacacacctatcatgaaatttaaactctggtttggctcctattcgtagcatgattcttgacaaatactccattctaaggacaaaaagaaatagagatatatgatctccttatcgtaaccctcttttcccctcaaaataaccatgcaatgtgtcattgaacataagtgagaatctaggagtacaaacacatgtcattactagcttaacaaatttatcaaaaaaattaaaagcttgtaacatttcttccaagaaatcccattctaaagtcccaactatctcgcatttggatttctttcagtcggatcacagggctcttaaggtatcaatttctcctcatatgcctgctccaacctagaaatttaaatcatgatttaggtttgaaaagctttggctgcaagaagatgcttgtactgacatcatctgctaggaattggaactccaccactgctgatccaactactcaaatactccacaatttgacagcttgctctctccaattacaaatgtggcataggaataaatttggagaccttcctaagaaaattaagatttcccagaagaaggtagaagcacttcacaactcgatggatgttagtcgctcccactttgaagagtttaaattaagtgaaaatatcctagatgaactattggcacaataggaagattattaacaggagcgtgctaaaatttcatggctaaaatcaggagactccaacaccaagttctttcatcaaagagctaatagcagacataacaatgatacaattaattcccttcttgatgatcaaggtgttatgcgaactacacaagctgaaattggacaaatcatagagagttattttctgaacatttatgctacagctggggtcgatttagaagctctgcaacaagtcttactcactgtcctatgtactatcactgctgaatttaaccaaattcttactctaccgtacattgtagatgatattttcaatgttctttcctctatgagtgatgacaacagctcaggttcggatggtatattcgtaatgttttacactagttattggcatatagttggagatttagtttataaagaaattttgagagttcttaatgacagaggagacccatcttattttaatcaaactttgatcaccttgatacctaaagccaagaagcctacttctatgtctcaattgcatcccattagcctctgcactgtcctatataagttggtttctaaagttattgtcctcggcttgaagccttttctctcattggtaatttcaaaatctcagagtgctttccttcaatcaaggtttatcactgacaatgtgttggttgcctttgaactattgcattctttaaaacatttgaagaggggg

SEQ ID NO: 186374 - DNA, 2047 bp, Cannabis indica
cccacaagtactttacaaccccaaatttcaagcctcagaagctgcagcctgcttcaaacagtcaacattacacaacccaaccgatctcaccatgtctcctaagctgccaccattcaagaacagtaatgagtacaatagtaataattaaagcatgcaatgaatgagtggggaaaagaattcagaaacatggattgaaaatttgaaaacacaaaccggtcaaagctatttcttgctctttctgaatgatctatgctgatccttgcctttcctgatcgatctatgctcttccttgacttgtctctcttgtcagtgctggttcttgatttttctctgctgtctgtgctaagcctagatttttctctttgcccagtactacttctggacttattctctttttgatcagtgctagaccttgccccattctctgtgttgatgatgcctgttgtgttcttctgaggactgtctggtttatctgtggtggtagtggtagtggtagtggtagcctgctcagttgaaacagcaatgcgtggaagtttctcaacagctgatatgaactttctgagatgtcttaagtaatctggatagagttctaagttgcagtgatttcctcctttaagccacagtggttcatacttctcttgacatagctcccaaagctgtttcccatgggaaaaatccactatttcatcttctgttccctatgaatttttccaacaacataactaattaagttaatgcaccaaatttgatcaaaatcattatgaatgaaaaatgctgccaagaaaatagctcacttacatgaattaccaaaactgggcatttgacgaatgggattttgtcaatattctgcagaagaataaccaaaccaaaccaaagacctttgaagtgaagaattgaacttaacataacataacaaaccaagaacaacctatgttattattatgcgattgaccttataaatgtcgaaccagaacgttcttttgactggatacataactcgaaggcctgaaaggattggactatgcagaattacagctctcaaacgaggcaatttaacagccaattccaaagcaggtccactcccaactgactgtccgtacaaaattgtgtcttcctcttttactccatacttttcttccagacatttatatgcagcctctatgtctgcatatgtgtcctgttcacttgcctaatagaccaaaatatattaaatcacttctattactatcacacaaaagactaattattccactatgatctctacatattaacgaacaacatgggataattttacaagagaaacaatgctaagcttaatgatctctttatctgaaatcaaactacctagcctttcctctttgacttttattaccatttaaaaatgaataaacattattacacgtgccaacacatcaaacatcaaacgtacctttccagtagattgcccatagccagagtaatcgtacctggacacataaaaacagataatatttttctcataaacttggtgtactgaagtgagtatgatttttgttttcttgttatgtaaatgaaagtaagaatataataaaaactcgtggagagaaaggctaaccccataagattaacacccagatgaagactaagctcggtgaaaatgtgatacatctgaccaagatcagcagcgttgccatgagagtaaagcaaagtgagtgaagcagaggggtttttcacatacatagccactatctcattccctttcttggtgtttagcttcataacgtccacctcatctctctgatgaacatctgacatcttcatttttccagttgattcatccaagtatatgttgtatgaaggagggtctggtgggaaaaaagcaaacttggccgccattgatgaggttgcagaccccattttttttaatcacagacaaagcttcaactttggcagaatagaatagttttagattttttgggtgacaaaagttgacaagaaatgcatggtgtgagaagcttaagcctatgaatgaatcaaaattaataagagaagagacaattgagtcaat

SEQ ID NO: 186375 - DNA, 5043 bp, Cannabis indica
aaaaataataaataaaataaattattagaattagaaggaaggaaagaatccattgccggctatggaagcgccacgaagacgccatttcctcccgccaccaatacacttctccccgccatggattcaccaaagcctttaactttccaattcctctctccttccccatacaaacccaatttctccttttccattttctcaggaaaattcgtaatgagagtttcacacaaatggaccactacgaggtactgggtctgaccaagaacgccaccaaggacgaaatcaaggatgctttccgacgattagccgttaaatttcaccccgacaagcattctggatcttccaaatctgtcaaggacaccgctactctcagattcaaacaggtctctgaagcttatcagatcctcagcgacgatcggaagcgcgccgactataatttccgatatcggtatcataattctggtggtgctactggtaattcttatgggtatggttatggctatggtcaacacaattatggtagtgaatatcgacctggttctggttctgggtctggctctaatgggttcatttcgaaatttgagaatgttcttcgttacttaactacgagagcttttcttcttaatgtggcttttgctgggtaagattcttaatcctttagagttcatttctttattcgtaatttgtgaatttgggtgagaattttatttgattatatagtgtttgtgacctaaattgtaagaattagtttatgatgagatttcccattgaattagtttatggaacttgagaattgagatactagaatttgacatattggtaaatgccaaatgaaacaattgtatggtggaaatcattgaatttgttgtttgattgtagttaggagtgaattgggtttgagattatagtttgaattagattatacattgacttgaaagtccctctggattctgtaacttaagttggtatagtgaactgattgggtttgtaaaatatattgggtggattgattattttaatctctagcaagaatcccaagtttggaacttctgttcttctcatattgaaagaaactatctgaatttcttggtgagggtgttaatctatcatttgcaagattgttttcccaataaatttgccaatttgggatagttgctttcctcatgtttagataatgttataatcaaatcacaactcttgatatgaacggggcacaccgttctcttatgccttgatggaatttgatatattttccttgtcaagctgtgatacaatttctggaattcagaaacatagatgttggtgattttaagcaagtatcaatactcttgtttttttggcttagttgttcagaatcgttgtgcttaatagccgttattcctatttaggctctgctgtattatgaatgctagtatgtttcgtaatggagtacgaatttcagcagtttactggttgaaagttaagactgattttaagacattgatttgattctgtatacagtgctttactaggtgggatgtttgtaatcgatatgggcaaggacgcattgtggaagatgcataattccggggtatgttactctactctctacaaccttaattcctgtttcaaccaaccattgccattattatgtctttcaacataaaatcatacttgcataattcgaaaattacataatagaaatgattagagcaaaatgaggagagcagacacaaactaatgttaacaggccaagtagccaactcctcatccagttcccatgttcaatgttgtgcaacttaagctgttttttcggttttataatattgtttatctattgctgtgttcagaaatcttttgaagaaaccatggagtctattgagaaagccaaagcagagaaggataagacataagacggcttccatcgaagctgtccgacaaagagggtttcttctgatctgttgtttggctcctttcaatgagataataacatacaagaatacacgtgaagataataaaaaatcaataatatagagtaaaataccatactattttttgtattaactgtaaaagatttgttcatgcaataatctacacagtttgtatgtaattaattctcctatattccttgacatgtgagtgattcatgtaaatagagattatgtcagtttgtgctaatgactaataagtgaacatttatttatcttcaactgcactatttattatgtcctatactattcctagaaactttgaaaaagagtgagttttgagacaaggcttaatcccaaatgtgtggctcagtggctcttgaactaaatccatctgagtttcaaaatgtgtagtactcaacaattacatgcaatattattacatattaagaaacttatacacttaacttcattggcataacaatggttaaattggattgggacaacatttttaagtgtatccaaaattgtctttttaaattgataatcaaaatggactcctttaacaaaaactcttaaccttgttttggcctcttttgaattgaaaaaatataacttgaaaacaagaaatagttcaaaaaaacaatcaaatcattacaacaaaaaatctcatatttcatttcaagtattcttagatttcttccttgcagaagttcttttgccaattctcaaatgagcagcctcagcagcataacttctgagtttctgaagaatccttctctcgctaattcgaagcgccaaagaatggtacaatttcttatctcttacgcaacaacacttctccaacgtttcaatatcatcctctaacgaatttgaaccataaagactctctctaatatttgcaaccgataaaagagtgtcgccaacacttttgttcatgaacatgtcattgctcggttttgtgatttctttcaacaaaaacatgccctttccttcctttaattccccaaccgaattcacacaagttgacactgcagaatccaactcgtaatatgtatcctcaggtaacagaattatgtgtaacaatattcgtagctctatttgaggctctccatcgaacgagatctcaaaataatcagactcttcttgactttcacacccagagaaaccgagtttttcccatagtgatacccttgctctagtgcatcggctagaaagtaaagacgagctccattcgagtactatttccatgtcgatattcactatgtcatatgggttattaggctctgtaaatccatacctgtgaagtaatgcagcattacctaatgagccataagtgttgtaaacctgacaaaagaagaaaatgattaaaaaataacttaactaccaaaaccaacctaacaactcattttcaaagtaaagcttatgttaagtcaaaaagaatgaaatttcattggctactaagtcgatgaaaatcaaacacattgtgcgtgtttctatgatagatttaatcacaccaaacacagcatttacccaattactgaaaccctctgatggggttaaggtttggtagcaattaagtgtaatataaacttcacaaatcactcacacataagcgatgtgatacaaaatacgcacacacaagttaagttggcatgaatgggaattgtaatgaaatctaaatttcaattctattgtttgttttgctttcaaaaaccttgtaatgcaatcaataaaagcacaataaagcaagaagcaaaatgactactgtaccttcctatatcgaaatataactaacaaaacagaaaaactaaccaacaaatcccaaatattccatgattgcaacccctaacatttcacagaaacatatgaaaaaactaacctcagatccagctttaacatctttgaccataatcatctccatagctgaaggttcatcccccaattcagaagaagactcccccgaagacttcgtccccgaaggactgatctctatctctgaatcactgttagcataggtatcaccattcatttgggcaatatcagcttcactatcagattcagagtgagaagaaacagacgtgaagtgaacatcctcagctcctgttttatgattaaagctgaaaaaatcaatagaaggatgtaaaacttaaggagtgatatgaacaaaagggtaatcaaattcgacataacaattaacttacagatcagccaagggaaccattcctgaaccatggaagtcatcaatcataaaggaccgagaagcaataagagttttagcagcgaaataatcttggacgcgaaagaaggtacgatcaagctgaaaagattccatttctaacagaggttgaatactctcttcccagtcttcacatataagagcttgatcttccttcactgtctacctacatcttatctaacatgtcaaagctctgtactttttaaagaaaaaaatataccaataaccattgcacattcatagataacataatctacattgcaaagattttgcctttttctaaaacatcatcaacccattacacaaaatggtctttggtttggtaaaaacaaacacacacatgaatagatacatattctatagttcagagttgtgtatttcctaaaactccatcaatgcattacagatgatcatctttaacactaacagtcaaaagattaaagaataaattggtattttggcccttgaactttgacctgaaagatcatgccctcctaaattactacttatgttaaatattttgcctgaacagaagtctaacgaagtcccatatttcactaatgttcatatttaacattgctaataatttggagggcacaatcttattagtgacaaactttcaggagacaaaatacctatttattcatacatatactacaaatataattgtatgtatttactaaaacaccatcaacccatcaaaaatatggtcttaacatagaataaacataaattacacatgacaaaaaatgctaaggagccacaagagcaggcatactgtaaaatacaatatcgagtctcacacatttgattaaataaacaaaacagaaaattactaacaacattccatatcggtatagtgttgtccacctaagcttaaagtgcctaatagcattgctc

SEQ ID NO: 186376 - DNA, 3651 bp, Cannabis indica
tttttatcgctgtggactggctatagtacaaatttggcaccacgaacttcaagatcatggcgttcatttcatcatcatcttccttccccatttcacctgccaccttccatgcccaaccttactctgatcctccatacaagcttctgcaaaagcattcatctctgaccctcctctctcgatgcaacaacatccacactctcaaacaagttcacgcccacatcatcaagactggtctccacaatacccatttcgccctgagcaagctcattgagttttgcgcagtttctccctctggagatctctcttatgctatctctatactcgaaactattcaagaccccaaccagttcatgtggaacaccatcattcgtggcctttcattgagctctgaccctgctctggcaatcgttttctacaatcgaatgattctttctggaattgagccgaattcttatactttcccgattcttttgaagacttgtgcgaaaatggcggttacccatgtagggaaacaactccacggacaaattttgaagcttgggcttggttctgatgtttttgtgaactcttctcttatcaatatgtatgctcaatgtagtgagttagataatgcacgtttagtgtttgataaaagtgtcgttcgaaatgaggtttcatttacggccttaataactggttatgcttcaagaggtcgcatggcggaggctcgatgcctttttgacaaaatacccattagagatgcggtgtcttggaatgctatgatttcgggttatggtcatagtggccggtttggagaagccttgttattttttaaggagatgctgaaagcaaatgtgaagccaaatgagagtactattgtcactgtgctttcttcttgtgctcagtcagggtctcttgaattagggaattgggttcggtcttgggttgaggaccatgaccttggttcaaatcttcgggttgttaatgcactaattgatatgtactcaaagtgtgggaatctagataaggctagagatttattcaatggtctaaatcaaaagaatgttgtatcatggaatgccatgataggtggatatactcagatgagcaactataaagaagcactgtctctctttcgtgtcatgcttagatcagatatagagcctaacgatgtcacattattatgcgttcttcctgcatgtgcacacttgggtgcacttgaccttggtaaatggattcattcttatatagacaaaaacttcttgacttatacaaataaatccctttgtacaagcctcattgacatgtatgccaaatgtggaaatattaaggcagcacaacaagtctttgatggtatggaagttagaagcctggcttcttggaatgcaatgatatctgggttagcaatacacggtcatgcaagtatggcgtttgagcttttttcgaaaatggtggacttgggattcatgccggatgatataacatttgttggtgttttatctgcttgcaaccatgctggtcttgtagaccttggacgtcactatttcagttcaatgattcaagattacaacatttcacctaaactgcaacactatggaattatgatagatcttcttggccaagccaagttgtttgatgaagctgagtctctgataaaaaatatggagatgaagccggatggtgctatttggggttctctacttggagcttgcaaagtccataatcgcgtagaattgggcgaatatgttgcccaacacctctttgaattagaacctgaaaatcctggcgcttatgtgctgttatcgaacatatatgcagcagctggtaggtgggatgatgtagcaaagataaggactagactacatgataaagggttgaagaaagttccaggttgtacctcaattgaggtggacaatgttgttcatgagttccttgtaggggacaaagtacatcctttaagcaaagatatttataaaatgttgaatgaagtagataggcttttggacatgtctggctttaagccagatacatctgaggttctctctgatatggatgatgatttgaaagaaggagctttgagccatcacagtgaaaagttggccatcgcttttggtttaattagtacaaaaccagggacaactattagaattgttaagaatcttcgtgtatgtggaaattgtcattctgctacaaagctaatatccaagatcttcaagagggaaattatagccagagatcgaaatcgtttccaccactttaaagatggttcttgctcatgtaacgactattggtgaaaccgaaaactttgaaaagggtaatatttggatatgtaagcacacacacactaatacgaatgtatataatgttctaaagctgtttcttcatagaaatataaattgaaaacataaatatataaatgtatgcatcttcattgctggtacatattgagctgaggttcaactaaggtagagtggtagagcatacaaatctctcttggtctaagaaaagcaccctatctttttatttatttatcgagatgggattacataattaaaatgtttccttagatcactgattttcgctcaagtacaattggatattaaatccgttgtgacagtatttttgagtctatgcttctatgtttgaggcttgcttgaaggagttctttcttgctgtagccaggacagtcttgtcagcaactatgaaatatgccgccccagccgctgccatcagattaaaatctctttaataaaccaaatacttgacatacaaaaagaaatacttatttagtatgatgaagatggtaacctgtggagataatgagggcctgagcagtggggttgagatgggcttttgcccaaggcagcatcctcgcactagcaagctgcaagttaagaagcatattgtaagtcaatcttatagtaaaattcccttttaaattgctacccccccaaaaaaaaagttcctttaaataatatttggtgccatctgagaattcgtcttctttttcaatttttattttgttatatatatttaaatttgtatgcatgagctagtatagattttcaaaagatgtagggacttacagttggaatggcagtaacaatactagcaacaatagctgccttagctcctgctttcacaccttctgttattgtgttaaaaagaaaaaagaaattagaggggatggtaaaaggtaaaacatcataacatgttatcacaatgattcttcaatattgctctgagtcattgttcattgaagaaaataattattttcattcataataaccttgtaatgattttttatgacgacttccaagttctcatcacacatatctaaaacaaaaaccatttttagtatgggccttcactataacgtacttttctcaactttttatcccaaaatacaaaaatctttataatttcacttggtggttggggccatcaaccaccaaatcttaatgaaataattgtaacacatggtatctatctcatagattttggatttaaccgatgcaagaaatatctttaggtaaccatgatgatacttgatatcatgaagagccacatgatactaatacaacttttagcccaaactcaaaaccataattgaaaagaaaaaagagaaagtaccaaaaacatagaatgtgtgttttgtataatttttttttt

SEQ ID NO: 186377 - DNA, 5956 bp, Cannabis indica
aataatcctaaggaaatttctcagaagcttcatcttccaagtcaatttgatgaaaaatatgcacaaaaaggtgaacctaaatttaagctaaccatttctataattaattcaaaattttcataaattctggtatcaaactttaaataggacaaacaaatatataattctatacgcagaataaattaaagataggattcaaaatttaatggggtgttaaatgtaatgtaagagttttatttaatggacattaatttagaggtattgagattaatgtaagagtatgaaattatctcacaaataaatttaaatatgggaccacacaatatttttttttttaagaaaataatcaaaaactttattaaattttaaactctgctaccaagcaaggcaacaaatcagttagacatcccccgtactgaaagtacgatcaggataaaaactaaaagctcttgcaaatgaatgagctactgagtttgctgaacgttttacaaaataaattaaaacattacccaattccataagtaaagctttacaaccaaagctagaaatcatggtcaagggtcttcggattgcttgtatgaccaacaagcagtcagattctagtgttacctgctagtaccagccattggctttgatccaacttgcctcacgaaccccaatcgcctccgctaactcaggtctaaccacccccaaataagagcgtgcaacaccctcaattagataatcgaattcattcctagcaacaacaccaaagccatagccttgtgacccttcaaaaactacaacatcaacattaaccttgacaccatttgaaacaggggagctccaccgcttggctccataaccagcagccagctgagatgactcaaaaggagtttgagtggtcttccattggccaaggtaagtaatagcaaaagcaatagtcgaataaacattaggcagcttgttattccacaccttatcgttctgagctttccaaatggcccaacaaagaacagcaaccaagcattgggtttcattagaagcagaatcgaaagtggtagcacaccagtctaagaaatccataccagtcgcgatagttgtgttcacaccagcctttgcccagcaagtcgctgccacagaacatgtgacaagagcatggagaatggtttcatcatgtgattcacaaatcgggcatagactactaacatctactctcttggttattagcatgaccattgtagggagatagtaagagggaccacacaaatataaattataccaaatttaaatttaatttacatttctcattgaaagcccatatcaaatacccctatatgagagaaacagagtgattgaatggagaagataaagttttattgatccaattgaattgttgaaagttacatgagccttatgtataggcaattggatatagtcagtttagggagagaagctaacaaactaacataacaaaatcctaattgtataaccaaagaaactaattctaatagctttcctcaagatggagtataaatattgagtacacccatcttgaatacaatattagaaaaatgagtaggtagaagggctttggtaaatatatcagccagattctgctgtgaggagacgtgcatcaattgtagcaagccttgttggatcttctctcttatgaaatggcaatcaatttctacatgtttggtacgctcatgataaacatggtttttactaatgtggatggcagtaatattgtcacaatacatctttgcaggagtgatcggagatacaccaaagtctttaaggagagcaaggattcaagtaagttcaaatgttgcattttccatggctcggtattcagctttagcagaggatcgagagacaacttgttttttagcaaggatagaaagttgtcaaggaagatacagtaacttgaaacggatctccttgtatcttggcagttgccccagtctgcatcatgcatcagtaaaaaacgaaaactgaacattggctgaagacaagctagtttcagcaaaggcagtgatgctagggatagttttttaagggaaaaaatgccttgacctggagtctttttaagatattgtaggactctatgagtggcatgcatatggggaacccgtggacaagataagaattgactaaggtggttaactgcgtatgaaatatcaagcctcgtgattgtgaggtatatcaattttccaatgaggctgcggtaggaagtcgggttagtgagtatttctcacatctattatcacatactcatcacttgtttatttctcttatttcctttgactcttctaacctctcaaacactctatgggtagtgctcttgtaacatttaactttatataacattgcttaattatcaaaaaaaaaaaaaattatgtaaaattattattataaaataatgatgaaagataaaaaaaaaataagagtaatttgcagtataagtatttaagtttaactctcagttgtagataaatatttaagtttatttctttacggtaataatatttaagttatatttttgtaacttctgtaggtacatgattgctaagtgttaagtaaattactatataacaatcattaattggtccatgtcattaaatttttattcttttaaaaaaattaatttaaatatatcaatataaaaatgacgcgtgcataatgatttgatatgtaacggtcaactacttacagagttctagaaatataacttaggtaatactacccaccaaaaattaaatctagatatttatttataaatgagagttaaatttaagtatttatgccgcaaattactccaaaaataataataaaactttaaggttagtttataatatgcttcaatctattttagtgtctagaagaattttttcatcttattttttttataattgtgtatgttgtagctattcatgactatatgtaattttttaaaaaaatcctaaatagtttaaaatattaaaaaataatatccaaacaattatttactataagtataaaaaaataattacatgtgcaataaaatatgtaattataaactttcaaatttttagacgattataaataaaacatgcataattattaaaaaaaaaaaaaatcctttaattaccgaaacaaataaatgatatgccaaacttttttttagtatctcaaatttcgaaacatgttttgtaataaccatgaaatttaatttcttttcttattaatagacgtctattcattcaagaaaaaatgaaatggaaagtgaaagttttattataaaaaatggaaagtgaaggagaaggacttatacacgtgaaggtttagtttagcacgtgtgttcggtgtaaatcgtaatacagtccaacaaactcatcaatcggtccaaaaagtctacttccaaccccaatggccaatcgaatcgtacgctcaccgcctattaagccaaaaaatggaacattatcaaagctaaattgtgttgtgtttgaaactacaaatatcatttcaaaatatatataatataaaaaaaaaaactacatatataaaggcaacttaaaatttttaacactatattaatatagcacgttgtaagttgttggtgaattaataattttttatattatttattaaattaaaatatgtaaaattcaatattaaatttcatcaatattaatatatcatcttttgtgatacttggcattttaaagtatcccttggcattttttattatgagttaaataaccaaaactatattcataatttattctaataagtatgttgtttacccgaaaattgactatggtgacgtggacatcaatatttaacacgtgacaagaaaaaaaaaatctcggatttgagtagtttcgtatcatagcaatcgaattaggaggggtctataaccctgcgcccagattgccttcgagaactccggaatgggtgtttggatcccgtcaagttgttttcaattcaccatatttcagtattctaaatcaagaaaataaaaagaattcaagtccaatgtctggaaactgaaaagagacaaaacaacaccccgaaagtcaactcgggtgccgagagttttcaccaagcgcccagattgacatcccaacaagggttttagtgtttgcgtccgtcttagtgcaaatggctcaaactttggactttggcataaataagacatgtcacgaacatatttgaggcgacaaaattagagtcgaaacacttttaattttgagcacccgagacactaggtgctcagggcacccagcgcccaggttgacatactatcaacattgggcatttccaaccacaatatgaagaagtatcctgagcattttattcgtctctattcaaaacaaaaaatcaagtacttttgggaaagaaacagatcgccatggaaggcaaagcaaggacctagtgtccaggttgacctatgcgttgggcccaacgcctaaattgacactttgtcaatttgggtcatttccaacaacaattcaaaagaagtcttccgagaatattctcctttgtcatcaactaggattttggtattttcgggaaacaagcagagtcatgtaggagatagagctgggacccaatgcccaagttgacctaggcattgggtccagcgtctaggtttacatattgtcaatttgggccattttcaataaacttttctaagaagtctactgggtatattctctgtttttgtgaataattgagatacaagattttccaaaaatcaaacagaaccatttggtggtaaaaagttagacccaacgtccagtttgacactagagttgggcccagcacccaggttgacattttgtcaacctaggatattttcagtcatttttcatgaaatgtgttataggcatcctttttgtcttcaagaataatgaagatacaagtgatcttggggagcaaacgagatttttgggggtcgaaacagggacccagcgcctaggttgacatgggcattgacccaacgcccagattgacatgcaacttggttcacatgttttcgctcctcaaacgcaaattttgctccgagtatccttcttattttggtaaaaaaaaaatggggtaggagacctcgttcacaatcttgaatgccctagaagtatcaaaacgagccccgggaagcacccaatgcccaggttgacgcgtgacctggtgtgttgggttttgcttatcagaatttgattttgtttcgaccatttgactatttttttagtaaacgagagctacgacttgtgacaggtcaaatttacactttaatattttacattttcaacaaggtggaatatcaataaaatcaggaagtttcgagtctaccctatttcaccaaaaagcgacatcttcgcgaattggagaataactttaccaggacaaagaatctaactaagtgaagtcaagatatcacttaggcatcaaaaattacaagtttgagaccttttttcacttacccaacgttcaggttgacgccaggatgtcaacctgggcattaagtgctgaacaacctttagaaaaatgaccataactccctcaatattgatctaattgatgtaatcgaacttgtctttcgaagctattttaaagatctatcaagtcatgtctcacatccatatcgcaattctgaagattttaagtctaaaattcgtgcttaagatagttacaattttttccataaattaccggagaatgatctgacggacgagattcaatctctgaaaattgataattttcaccattagatcatcatccatggcaaagatctccaagtgattttttcatattttttgtaatagtttattaatattttaataagacctcactccctataaaaggagagccctctagtttatttttcacatttttctaagtccccataaggttagatcatgtctctctactttctctctctagaaattgaaggtcttgcctcagccaatttcttgtaattctcataagaaat

SEQ ID NO: 186378 - DNA, 12196 bp, Cannabis indica
aatataaaactataagtgcatttcaagttaatctcatatacttgatgtcctaatcaaatgtagcatttagcataaactatgtaataggatctaatagattgtatttagtattaaccttttccaccatcgcgttttccttagtcacaaagtacgtgaatttgtgtatttctcatctatatattttactcctcttagggtacaggattctttattgtttagtaattgcatttgtgttatagcgaaatcacactagcaattattccatgtttagaaatatgctagattttgtatccaacttttcctagtaatcccaacattctaaatgtccaactaagttgccctcttacagtacaggattctttactgtttggctattgcatctgtgctataacagattcacactagcaattattccatgtctcgaaatatgccaaattttgtatcgaactttcccaagtaatcctaacattctaaatgtctaactaagtttctctgctaaatctaaaatactcatctgtatctaagtgattctaatagtcaaatcgtcacattctactgttgtcagatataaaatatgaaaatataaaatttcatatataacatacattatacacctaaaattaaaatatatctccataattgcaaaaataataattatctgctagttctcataataaagttaagcagacattactttatctttctctcttataatgtgcactagtattataatgtgaagtagtagatattgacatatcacatgccaaaaaaggcatacatcatgtacattttcagtgctaagaactgatgtaagagaagaatgtaccatagctagggttcacaactgtgtcctatcttagaatttaaaaatgaattatgcatggcttgtctaattaatgttcactgtagagaatgagttgtttgtcaaatatccagaaattgttcaacaatcatactacttataagatacctttttctactgctaattaagttctctcaatcaaaatgttttgacctttctcatttcaagctatcgcacattattagtatgcaatgatgaagagaatttattcaaaattaacacatatactcgagctctaaattccaaaagcatagaaagagagaaaaagtgagtatgattacatctctgaaaattcagctactttaatacagcaactcattctctcccattaaatgacaatatgtcctcttcaacagcagcctccatagattatgagtcaactgcagatcgtttcttggtggtatatgggtagtactccttgccgttgtcaattcttgtggtctgacctccagcatcaatagcagcagatgtgactgccaatgctgctccagcagaaattgctgttgagatgcttcttcctataacacagaaaacaaagccaatccataagtagacatttgttttgaaattaactgcaattgaatgttttaaactctccaccaatctaaactgtccatgaattgaggaatgaaagcttaacaaaattatggcttaacagatactttataagcatacaatctcctatgactaatagctacatgcagactgcatgattcaagattatcttggaaaaggggaggcaaatcatctccatttggcttattaaaaaataaatcaatgcacaagtttagagtattttaaacatagcaatgagtaaaatctgtgaaattctactctttttttttttggaaagtagtaatattatttttattttttaaattctactatttgattttgaaatttcagaccaatggacaatgaaacatacgcatggatttgatgcagcagaatcagattataattagcgagaaaaaaaatgtacagtgttaaaagaaatatgcagattaggagagtagagcaactttattgtcacactcacacactgtatttcccacttaagcctgtaatgggaaaaaaaaaatacaagaacagttgagcactcagtttctggtaggaaatatgaagcttgtgatagtgttagcatctcaagttgaccaagtacgagattggttagtagaatataaatacttggcaccttcctctcttaagctagcttttaggagtaaattctacccaggcagttgtatcaaacccatgcactcccaagtgggattgacgtcacaaaacgagagacttgtgtattaggcccagagtaggccaccgtagagtgggtcgccgtatacattggctccacaagggggtgtattgttaggatcccgcattaaccatgtatgagagtagtatataactaccggcatatcctcctaactcaaactaagtggttgtatcagatcggtaagtaataaccaaggatcatatactaagacatttgaatccagaaaaatcagaactattcctatttagttatgggaacagacatgaggatatcaagccaaagatgtttcattctaataagctggcatataaaatgttcaatctctagacaagaatcagctgcattatcccctcaacccttattgttcttccaatgaaaattgcagctaaagcattgataccacctatatgtgatgatttgaaagaaactaaattttatactagtatatcaactacgaaaccaaataaaatctaattttccactccttacatcaagacattaaagcaattagtcattcaatctaatgaaatgctaacctctgtaaccaagaatagttgacccagcaacaaaaccaccaacagctccattgacaaagtctctctttttcctatagttctgcatgagctgctcaacaccaatgtaaactcccccaatggcagcaaatgtggccccatagttacccatcatcttcaaggtcctaatcagcccagggagagcaacacttctttcgacacgaggcacatcataccaagtagcaacaatggttccaaaaatagttccagtgacaaaacctgtagtagcacctttcattgttttcacaactggtgaatcttcatcctccaaatacctgcgctcagctgggtccatggctcttaactaaatgggtacttaagcaaactgcaatatattacaaaagacaaatgcttagtaatttcccaaagggaaaaatcattacaccaaaaaatctccatacttctctatatcaaaccattgaaaaactattcataaatcttatttctaacgattaaggttattttatgatctaataaactatcaacttgacaagacccaaatttcactttccgtaatcgatacaaacaaattgagcattttccccaacatattataacttaaatttatctattcgatagtgcgtttctgaatagaaatatagcatagacaaatacagtgaaaaacaaaaatcccaattctatgaaaaaccaatacatctaacattttttttttggtaattcggattaaagaaaaaatgtaccaaaatcatattggttctcgtacacagagactcgtgaaataaaaaataaataaataacagatcaaatcgtgaggaatcgtaaaacgaatttctatatcggatgatttgaaaccctgcaaaaattatataatataatatgtatgaaataggagatattgcaagggaaatagggaaaaagagtacctatagagatgaaacagagaatatgcaagcagaactaagaagaggctgttgtagctgttgctgttgccgctggggaagccgtcgaaagtctcactccgatttcatctgcacctcggctgacttacgttaatagccttgtgcctataacattctcaatggcccatctccaactattttattattcgcatattttcataaatacccaaaaaaaaataaaggaaaagttacaaaaatactaaaatttaggttagtttttataaaaatactcacatataatttttttcaaaaatattgtatttttataaaacaatagcataacataaaacagaacaactaaaaacagagtagaacaactaaaaaaacaactaaaaacaagcagtaaaacaactaaaaaaacaactgtagaacaacagtaaaaacttaacacaatactcaatatttttaaaaaaaaaatctgctatcacaataaattgtataaaagttagaaatttaaatgtgttgtataaataatctaaaataaaaacaaaattataaaattatggatctacagttttttcaattttttttacaaaaatatgactgttgttttcacattgctttatattaaaataattattactatttctaaaacttaattatttaaaatactacatataatatggaatcttttcaactttaatctggaaatttattagtatttctttttttgtattaagataaatctatgtgtttttaataatatataagaagagaaatttataaagaaattctagtgattatatgttatttttaaagtcatagtttgaaaatggtaaaattctaaattaaggcccgaaagagaagaggtcagaaaagcccaacgcatcaatcaaaattgtctgaatgaatggcattggcaatgggaggctccataggtgaaactccgagaagaagatcggaggaaagcacagataggacgacgactcacactgctgttgcaacttgttactcaattattattctactggaatcagaaattttcctggaaaactagaaacaaaaatgcagaattccgatgacattcgtaatctacccatagacattacgttttctcgtcttggaggtaacgccacttctctcccttgctctctgaaatcctgaccaaatgaaactgacctattagtatatgtgtgtgtgtgtgtgtgtgtgtcgattaattgttgtgctttcctttttgggttgttattgaatttgaagagtggctggttgatcgcaagaggatacccaatgattggcggaagcgaatggctgccattagagttctcatagctaaagagtttgcttcacttcctaaggatattgatccctatttccagaccttagactctgaaggttagttttcctgatatgatttgcatgtggtgtgttgttctagtcgtcgtcgattacaataaattatatgggaactgggtttactttgggacttgattttaattttgtcagaagaattagcttcgagggaaattgttgaaattttgttcgattactctcagcttagcttacaaaacatggaaaacaaaggagatactgtgaaggtcactttagtttcaaacattatttgtaattcattttgaaggccgaggattgatgtttaaaccagtatgagctgctttcctcgttgagtttggggattttatattgtataatgaaatttctatgaatgaactcgaggaggtttactatggagcttgtcttgttgagctgcttaactctgctattttggccactaagagaagaaatctactattcaatcttattatgatttgataattgtattaaatatgggtctattctacattgtcaggaataagttacttagaggccaaaaaaatatatgagattcttctcaagtgcactcccgaaagccggaatatatttggtcggctatcaggcgctgctgtaagacagttatctctcccctctctttagcgcataaccatgtgttctcatgctagtgtacaagtaatatttttgttctttctgcagggggtatgggaagcaattgtgcgttcttttgaaaaggattacatttatcttggtgaggcagctcaaataatggtccaaaatgtgaattatgagatgtaaggatgtacattttgcatctgctttgtgatgagatggatcaatcatggaagtttcctttgtgttcagtttgtattgattccactttttgttgtgaagcccatatcagaaaaaacatgtgcaaaagatacagcaccaattagcagaacttgagcgcaaggaggctgatatcaaaagaaatgcagctctatcagcatctaagtatgtagaggcttgtcaagagcttggtttgcaggttttcatggagaatccctaaactggtcgttttgctgagttggtttggtttacttttctcataagtgtttttacaattggaatgtttttattgttcaggggaaaaatgtgaggtgtgaacttctagagactgcgaaatcacttccaggaacatttagcagcattttggaagtgttaaacagtgattcagtgataaaggctatggagtactattctaactttgttagagatatccacacagaaaaggacgtaaggcacacattgttagttataaatctcatgattgctttatattatctcacaatttgttataggtaggtttcttttgttatctgcggatactgatgaaggatactttaaactaattcatgtgtttgggaatgtactttcagaaatctgtggctgtcttgttgaacttgaaggacgtacgtgaacatccaccatctctgaatgtctctgtagcctctgagattgctgactcaatgaacatcctatcaagctgtgatgaattaaatagagacactggtgttaatgtggataatattgattgggatatttctgttgatagttctcagattgattgggatattggtattgttgaggaaactgatgatactggtaatggtttaggcccttatgaaatggtaaatgccagtgacattccgcagggttctttgccaaatgaagcaatggaatccattcaagtcccattagatgaagatgttaatccggccccagagattactgtgtcagatatatcttgggatattagtgttgaaactcctcaagtggacgtaattgatgatgttagtttgccaaatgttgggtcagaaagtcacacatatgaaaatttaagtcaagcaactgaaaccaaggaagaaaggagccagcttttggagacagattacaggaataagattcttgatgatctgaatgaggtacatggttctttatagtacttttatctgtatgctttttttatcctaatttactttctctctcatactctggctagaataatgatgatgatatgttctctgaagtgtttgtacagtagtatatttattcattatttttgttttctaatcttatcaggtcaaatcattcttaaatcagcgattagttgaattaaagagtgaagaaaccttatctttacaacatcaagtacaggctgttgctccttttgtgctgcaacagtatgcccctgacgccattgaaacaatgttatcagatgtttcatcagccatttccttactcacaaacaggaaaacacgagatttgatcatgattctcaattccaaaaggtataagctggttttggggtttttttttcagtatgtttcaggattgtatccttttccacctgcagttacgcatggtgatttggtaatcatgtattttaggaagctatgctttaattcttagatcttagtgagatataatacttttattgcttcttgacacatatgatgatgatcttcatatcagattcctagacagactagtgagtacactggaggagaagaagcatcatgaggtgaagttaaaagagggtttgaaagatatggctacaaaacgcatggagttgcaaaattcactatcttccacctggccgaaacaggtaataatttttctactatatgttaaggtgtttctagtttaaaactgttgtaactatgttctgggcaaatgatgtttgtgtaaagtttcttaaatgaacataaagctacttttgtgtaaatataaacgatgagataattgattgactgccttagaaaatggagtgtatctaaatattactggtggtgttgtgttaattgcaggaagcagctcttacaaaaactagggagctaaagaagctatgtgagaacacactttcgtcgatgtttgatggaagacctgttcatattattggggagataaatactctcttaactagtagccttggtgtgtagctatgggaatgataacaacaatgaaatgaacaagtggcattttttcactttctatacccaactcttggtgtaatgctcaaatcggcttagtgaattgaatatgggatactgtttttgattaacgtgtatagagatgttttgagactttgttcctttgattttattgtgaaatctaaaatttatcattactactgttggttgaatttataaagagctactatttaaactcaagacatagcaacttcaacttaatatttaaactctgttttcggcactaaattatttataatttttcaaaaattagtaaagtgtctaacaaaaatttgctgttataattaggaaatttgaatttctatgtttcgtaattcaaaaaaaaaatctcaaacaatacatcacaattttaggcaaatcattaccattgttccaacaaacaaataccccaactatattttcctctgtttctctctaacttaatcccttcatcgtctcctatctattatttgaaattgattttaagaaacaaactaccaatgagtgaatttaatgcaccccacaaaatttaagttttcaaaatcaaaaagttatctccaaataagattccagccctaatatttgagttgtgacttgtgagtatatcattattcctgcaatgatgttcctccatagatacattgggagattcatcaccaaaagaaccatcttcgtttggtgctagaattcacaattggctcatcttttttcctactctccattcctaccttcaaggattccaatctcttcctgcaaagaaatcagatttttcagtatggcactaaacttttgaggttttaaaacaattaattcgctattattacccataaaatatgtaatgagaataaaagtaattcttttctctttcccttaataaaaaattaaagacaatctctattttaattttttattatatcattgttgttgttgttgttttcttgaggccattcatatctgtgttattctggagatgaatagatgtgctattctactaaaataaaatacccttttccatagttgacatatagcaacagactgaagcagagatacttctctaacaaaccaatgtattaaaaagtagcaacaatggtttatttctagatatcagataagttcaatacgtagattaatgaacatacaaggatatgttctgtgcatttatttatttatctacttaattacgtacttggtatctgtaagacggccatgcaaactccatctctggcgaaaaccttccaccccttcagctccacttgcaagaatgaagtgcctgaaattgaagtaatggcacatgaaaataattctcaaagatgcctaaatgatttacataattagtaactgtatgtaagaatgtttccgaatgaccaacatgttgttgcttaatttaaaatgcagatgtgacatgatatacgcctgcaacgttttctaatcatgacaccctaagcaacgggttaagaaaaagtttataaaggtgattcttaaattccattagacttgctcaaaaaccatgtttggatcccttctaatttgaaattcataatgaacttattaaaggccaacaattggaaacgatttgatgtgctggggtaaaaagttcctaactcgtgcagtaaaataagatgtccccaagataaaatgatagtttttgcaaaagttaagcaaaaatatgggaatagttgggccgtgagcacgatatatggtataaatcattgtgatttatctctatactggtttcttttcctttcagtcaccaattctttatccttttttttcctttcttatattcctattcctcacatttctatctattattcttatctctcttatctttcagttctcatctatttctggtttcatccttcattagagcaacaaacattacttgaattaaatttcgcacatcaatatgataatgtataaccgcaaaaaacatatttaagtgatgagataataatacaaggaactgtgaatgaatacggcaccagaagcaacaataacagcacaaaaatacagtaaactcatcagaatatacctctctaatgatgtgatctctgattcaagctggatagccctttcctttgcttgctctaaaggcattgataatcccaatttgtgctcactctcctcgagtcgtttccttagttctttatcctgatttttttttagagaaaaaaaaacattttcatctatgtaatttaagtatttgaaggaagtggagaaagaaaacaaaaggaaaaaacacagagaacaaaaccacaaaaatctagtccaactaaaagataattacagagacaagaacatctttacaatcatttgggcataaattgaagccataatttcatcctgttcctatctagagacacattctttgaaaactgcatgataaaaagtcaacacttgatacttttataaagaacaccttctttatatggattccagatgtctatccgagcacgaattaaattgaaaaccatacattttaaactcatgtcaaggagataatgactatatgaaaaacacctcacccttttttcagcacattcccgatacaatgcaatctcatcctgacaaaatggctcaatgtcgttgatttgcaaacctacaaatatacatcaattactgtgacacattatttagaaacatgaaagtgacaactaagtttcaactaaacaatcccatgccagtgggaggtgtcttcgaaactgttgattatctacaagctactacaatcatcacacggcatcttattcacatttttcctttcttttaaataaaaagtggaagaagataagtgtgtttagaattcaaatgaacttctactgcacacaacttagtagtctcactctcacattatgcattttagcctatttacaaagtaattttttctccagtgttcatgtatgtgaaacactttgacataatccaattaatcatgtcaaatgttctttagtgacaggttaacccgccacaacaaatgattgtacaactacaatttgaaataggaactatagcctataagttttttcttttttttttgaaaatgaaatagcaattagcaacttcattgaaatttagcattcggaatacagaaaggcttgtaaatcagccggaacattatgactaagaatgctacgatcagaaagaaatcaagcttcctagctacatagtaagcaactcaatttgctgatcgtctaacaaagcaaagactgacatttaacaatttgaaataggaactatagcctataagttcatcaccaaagtaagagtcaattttaaacaatgaattacaaaactcagaacttacacaagaatagatttctcaatagcccatcacacaattcaacaccttcaaggacatgagaagcaatctctggtggaatgacaggtgagggtggtcccgtcatcagatcatcaccaaccaaaatagtctcctccatagtttgctgtgaatcaactgaactccaaaaacagtagcaatgcacaagtatatcactatattgtacattgatttaaaaactaaaacatagattcaataaaaaagctgcactgttacaatcttaagcaaaatagctcactatcttaaaactaagtacggatttttaggcacagcaatatacaaaaaattctggacaaaaatttggaactcaccaaaaataagtgaaaaaaaaaaactatatacacattttgttgttttacacacaccataattgattgttttggaaaagcataactatgaaaagtagtttttaacataccgtccatgattgcttttcaggtggaaaaacccaatactcgattaagtagagtgagctgaagttacaaagcaatctattaactcccacctgctccagaaacaaagattgaaaaagaagaaagaataaattcagtggagagaaggtatagtaagaagataattgaattgacggggtcatcttacgcgtggtcgttgagcgaggcagcgcgaaaggaagaaatctccggcgcagccaaaattctatggagaggtctagggaggcagtagagttaaaaagtagattattatatttacatatatatatatatatatatatatatatataggagagaaggttgtgtgagcggagatagatattgtattgtagaggtagtaaatgaggtggattcaatcgatgctcagggacacactctcactctgggcttccaatcgctggttgttagaatttgagattgaatggtgttcatctctaaaatttttttttttttttttttatttttttttaagt

SEQ ID NO: 186379 - DNA, 3684 bp, Cannabis indica
taaataatgcaggcatcagttgcatttttggcttttgaagtgggtgcaacatttattttctgagtttgcatctcctaagttcttttattcaggaacttcttactttaaagatgacatgctagaaacctagagaatgtatcaaaacatctttactaatttatacttcagtaggaatgttgaaaggaatgttgatttgagagaggaagaaaacgacttaaagatgatgttcagctgttttcacctaagaaaaattacaggtccacatgcctgggaatggatataataactttcagtaaagatgttgattacttctgttggataaaatgcttttattagaatttatcttcttcatgtaatcttcacacatatcttatctcagaaacttgggagctttatggagatgctgtttggtggacgatatgtacttctgttgatgtcgctattttcaatatactgtggtttgatttacaatgagttcttctctgttccttttcacatatttggcgggtctgcttaccattgtagagacacaagttgcaggtattgtctttttctttttttccaatttctgctcattctcatactcacactcatctgatgttttttgtttgcaattttttctaggcctttgttacattttaagtatacaatttttttatattgatttttccaaattccattttttttttctttttatcaccaccaccctgtggcaactagacaaatgtgcacagtactcaattaataaatgttttgagcttacgtttgtcttcttgtaaataccatggtctatgtggaattttgtgttctaggatccttcaatgtttgttgaatatgttgctctctttgatgtctatgcttctgtgttgaagttacctttgctggttggttttagtttcatttctcatttaatagatatgatttggctttatcaaaggggttagagattatgcacttcaaaccagctctagattcctagaattcgaatacagctgcatctcatttgttaatgggcctaattttgtagatctatagatgtgggtcctccttttatggttttcagttcgatgattagcttatataaatttcaatgctataattaaatatcactgtttacagaatgaaatctagatattaactatcactgtttacataatgaaatccagaaatggctatcctcactaaaactttcgtggtttattttattttattgctttagattaatctccactaccctcccattaagctcagttattttttccttgctgacagaatcttgttgactaatgtgtttttttgtgcttgggtatttatgtataaatatatgggtatgtgtgctcatgcataacttcacaccttttttgtatttatcttaatgtatgtacgtagtgtaatgtatcgtatgagaacatgcctatattatttatttatttgtgtgaacagtgatgctacaactgctggcttggtcaaattccgagaaccgtacccatttggtgtggaccctagttggcgtggaagtcgtacagagctcccgttcttgaactctctcaaaatgaagatgtctattttgttgggtgtatcacaaatgaacttgggaatcattataagctacttcaatgcacgcttttttagcagctctatcgatataaggtgtctctttttgctgtgtctttgttgtttatctttcttctgtcttgatccaatttatcttctgagtgctgaccaacttttaaaggtaaacagaaaaaggtctgattcgtgtgctgtattgttaggtaccagtttgtgccgcagttgatctttcttaacagcctgtttggatatctttcacttcttattatcatcaagtggtgcactggctctcaagcagacctctatcatgtgatgatttacatgtttcttagtcctaccgatgatcttggtgaaaatcaattgttttggggacaaagaccacttcaggcacaatctaaactcctttctgtataattgctttgctcatgtaattgtttgtggctaattaagcttttaatattgcagatcatattgttgcttttggctttaattgcagttccgtggatgctttttccaaaaccttttattttgaggaagcttcacacagaggtatatacttaaaattggccagcattcatatcaaaatattacattcctgaaatttgattaagctatgcaatcatctacacttttgacttcaaggtttttcttagttataaagtactttgtcagctaaaaagtctcttactacgtaagagtattttagttgtgtcatcaataagtagttttcaaggaaagtttcactagatgggaaaattgcaacatctttgtttctttccagagatttcaaggtcgcatgtatggtgtccttggtacctcagagatggatctcgacgtggaacctgattccgctaggcaacatcacgaggagtttaattttagtgaagtatttgtacaccaaatgatacactccatagaattcgttcttggtgcagtttctaatacagcctcatatcttcgactttgggctttgaggttcggatatgaattattattattttcttacaaattagactctctctgtgatctatttcttcttacttgatatttgttacttgttttacagtttggcacactcagaactttcaactgtattctatgagaaagtcctcctcctagcttgggggtgagtttaaatttcatttcatttcatttggtgctctgttcattttgctcttgaaacgtaccaattcaattatttttgggtgtgctcgggccaacgactagagtataggagtttttgttcaccgatttcagttgagactgagcatatattgttgcctgtgctattgacattaatttgctattacacttgataacgacaggtacgacaattttgctatccgtctagttgggttaacggttttcgcctttgcaactgcattcatactactcatgatggaaacactaagtgcttttcttcatgctttacgtctacactgggttgaatttcagaacaagttttaccacggtgatggctacaagttcaaacccttctcgttttcctccttgaccgaggatgaggaataatacacacctgtacagaagaaggaagatagttgagaaaaaaagctttaaaccatcagaatccaaaaaaactgaccacaactaccacctgtttcggttgactagaagaacagcctagcctgtttttctttaacatataatgatatgatgtcgcgattttgactccaacgaatgtaatatctcggctcgtaattctttggtgtattggttatattagtgtttttttggttacagttgctggtaatcttccatgtagaggtgttactttccttttaaattttcttagttatatggaaaaagaggaaggtaagggaagatggaccagttgtaaaaaggagctgggaattattatggtacataaaggcatatcattttggggaggaggaagattattattatagctatactttcacacacaaacaaatcaaaaacaaaaaacaaaagtacacaagacttgattttgtagggatttgtcttccaaatttaattttgtttttctttctcttttaaatgtttcattattgtagtagctacttatcaatttgttttagaaaagttacattttgtaagaggatttatcattga

SEQ ID NO: 186380 - DNA, 1856 bp, Cannabis indica
tatatatatatatatactttatgtacatcaaatgaatgtgaaaataatattcttaaatggagaccacgatgaggagatttacatggaataactagaggtttttattctcaaaggacatgaacataaagtgtgtaaacttgtgaagtccttatagggactaaaacaagctccaaaaaaattgcatcataagtttgatcaagctattagattggatgggtttagacatactattgcagacaagctcttatacactaagacttgtggtgacttagtcattatagtatgcttatataacttatatagtgatgacatgttaattttgagtaaccaaataaaaggcataataaaaacaaaggggtctctctcttccactttcataataaaagatcttggagagattgataccattttgggtataaaagtgaaaacgaatagtgaaaattttctttacgtcaaagtcactacattgagaaagtgcatgacgaatttggttacctcactataaaagagtcaaatacaccattttattcaagttaaaacaatggtagagtcattgttcagcttgaatatgcaagtacattagggagcttaatgtacgatgctcattgtactagagcgaatattgcatattcggttagtaaacttagtaggtttactagcaacccaaatattgaggattggaaagctattaaaagggtcctagggtaccttaaaaggaacaagaagctaagccttcaatattcaagctttccaagtgtacttgaagggtatttcaacgcaagttggataccaagtgtgggagataatctctccacaaactggttgggtgtttatgatcaatggaggagcgatttcttggggatccaagaaacaaacatttatcacacactcaaccatggatgtcaagtttatagctctagtgaaaaccgaaaaagaggtcgagtggcttaaggatctcatggtgaaaatccttttttctttgaaaaaggtatcaatgatctcgatacattgtgattgtcaagccacgctagctagagactataatggaacatataatgggaagtttagacacataaatcgaagacataattatgtgagataattaattcaatatggaaatctcatatgtgagacttagtgagaacttagtagatccattcattcaccaaactgcttaagagagaagcaattagttctacatctagagggatgggattaaaactccttgaatataagttcaccatgatggtaacccagttataatcttgacaacttcaagtgaaagaatttacaattggtaagaacaagtcattggtggatagtttcaaaatacagttttaatcccatctaagatgatttgtgttggttgcaaccattgaggttaagcttaatgcttttaatgaagttcaattgtgcaaaaacaaaaactctaaaggtagcaaagatgatataagaacatcacttatgtgaacctagaggtggtgccgcctctcatgggagtggagtttttccccggaaggttcatgaattggatagagcacgtggccataatagtcttgagctagaaatagtgagaagtaacaaaaagtaaccaattggaagtttgtgaggcattactagttttattacacaggagtcgttggttcaatccctagtgaaccaatcactttgataaaactgtatagtgctttcactaaggtaaaatttaaatcaaaatatattttattttatgcaccaacactattgagttagcaaagagaggattacacttaaccaagtgggggaatgttgagattggttaagtgtaataataaaggttaaacacattgtggtgtttcacacctttgaaatttttt

SEQ ID NO: 186381 - DNA, 7282 bp, Cannabis indica
tagctcattttttaagtttagaatagtagtcataaggttagaacatctctctctaatttatctctatagaaattagtgcatccaaacttagccatttttctgcagtccatctcatgaaaaataaaacttgaagtagacgtagcttcattactatcgcgacatagagagtaaactactataaactgatgtgtctctctacttatacttaactcataatttattctcgccaatctagcgagcgggtctggcccagagatatgtgtctagatttctgagtcagcaccaaccatcccactgaagccaaggagcataacacagctcaacgcttcgacccaagcctatcgaatagccactctcttctctaacaaagtcacgaatttcaaaacttcccttgttcacataggagcaatacgagtaagagcacttaaaagtttctattgttttaatatttgtcatggaaaactttgctccaaggtgcattaaaccccgaggccaaggtctaacccgacttagccaaaagagctttgttaaaatcgacaccttctaaaaccaaagttgccacacttttttgtcttacacgaagagtcccaacaagtcaacgccatgaatctatccttactttcataacccgtctactagaaatgccttgtggctttattaatgacattccaataatcttgggcatgaggaaatttgaattactgtaaaccagaatggtttgcacaacaccacaaatcaaagtttctctcctggcttgggaaagtaacttagaactccaaccctgaaatctctgcgcgaatttagccacaacaaagtaaaagtcttccactttgttattggaaagaaataagggatttcccaagaattttcccctcctaatcaagctattataacctaaaattcccttaaccaaagttgatagtctattggaaggacaatatgagctccaaaagcacctctctaagtctattggcgaacaacttaccactttgtaaaccacattgcaatgactaatgtgtctgaaattgtttcaccttttagcattaaacttcttagggataagcactagaaaggttttgttaactcccttagtgaactcccctattcgaaaaaattccttaacaaaacaagatacatcaccaccaacgatatcctaattatgcttgtagagctcagttggcataacatcaagacctagttggaggcaatgccaatgagtttcaagttcatcttgttcgagacagctgacaattatagttcctccaagtttggtggctcgaacagtttaatggattcgaacaaatgagtgaacctcgaattggaatattccccctattttcgcccatcatgcagccaaaaaaggtcgttttcagaaatgacccaaatatggtttttcttccttctcaccaacatagaagtgtggaaaaattgagagttttcatcaccatgattcaaaagctccctacacttttggcccatatgaagcttgtctctaattaatctattgaatttccaactgtaaaggcacctccagctcaagattgagatctgcagaagttccaaattccaccaaaaaacaattatgaagcttcaatttttccgagcataatctgaaaacctctttattccattttggttagtaaattggtttttttgtaatactgcctagctcattataaataaatacataaataatataaactcagtctactattctcactccaaagtccaaatctctctttgtcaaaatccaataaaattacactatccattaaagacattgataaaatttctcatttgccaattcttcacctaactaaacaaacccccatttgcttctttttttcctaatggaaggtaaaaaaaaacatcagctgttcaataagaaaacttgcacacaaagaaactcaggacacgtgatatataatatattacaaacaatcaaatgttgttgttgttgttcctaattacataataataatataatttaagagagaacaagctttcactaaaagacagcaacatcacacaaaagaagaagaaataaaaaaatgtcagatacacactaaatttagacattaagcaaatgaggttgaccttgaagcttgagacaaagcatcttcaaactgatcatcatcattcttctcagcattcaagcttggtggaatgaatgatttgaaaatctgttccaagttgggaatttccttcggttcacgaactacaatttctagagcagtgtcagcgaaagagcggtagaatttcgtgtggcaaaagaaggcaaagagaagggaaatgatgggaagcacgactaggaatggcgtgtagtagaatttcttcaatgtgaagtaaccgagcatggtaacttggtacaataccagcgcggcgattattcgcacagcaatgtgtggccacattctaccatagctttcgtatgatggaacataaactttaagggcctgcaagcataacaagatgtagcaagtaaataaacaaactttaaggtaaaaatggtgcaatgtcgggtgagtgcagcagcaggattacctgattacgaaggatgagccatccaagaccaaaatatgctaccccgaatggaataattactggagcaatgacagaatagcaaagaacaatggtggcaatgagcaagtcaccaggaattcgagtcccatatttaagatctcccggaaaccatgcttcttttacctctgcttctgtcttacacgaatattttctcttgatatggaagataataagaggaactattcgggtaagttcaagcccataaccgacgaaaaacctgagatcaaaagtaaaataaaattcagttatatcagaaacattcaaaccaacatgacaatgggaaaaagaaataaagatagtcttcttacttaagagccacaaaggtgaggaaaaaggctgcacttcccgggatgctactagctagaacaccgacaatggagtttggatcattctgaatgtccttcaatgttctgtataaagttccagcaagtgtaaatccaataaacacattcaacacagtgaagtaaaaatacttccccgaagcagctcttattgcgtggctcatagagggaattccctcggccttagatagaaacagaagtaacttaggcaacaaagccaagaacacaatgagtgcaatttgtgggaggtaagcttccaatacagtccttattgcactctgtttcaatattggcttcaaaaacggcataagtttcatcaagttctttaacgtcgtgaatgcagagataatcccaattggaatcatgtagaataaaatagccagagccacaagaatgtacacaccatattgccgtacttgcctctcatagaatgttttcttaagattagtccaaattatttgacgaggctcgggagcttcaattactgtccatttatcaaccagttgagcatgaagactctgagcagcagaagctgcagctattctgcttgtgaaaaaaacaattgctgcacctaactgcttgtccctaagagtagtcttttgttcagcttctagtttcggtactagttcactaattttctcggtgtagaactcaatgctgtctactttctttccaagaataccaagacaaccagttttgtgagtcggtctaacttcagacttgcctgttctttttccctctgcatacactgcttcagcgcgtagaagcttcttcttgtaaccttctaactctttaaaaagtttgtcaacctgtaacgattaaactaaacagtaagtgaaaccgagtaatggaagaaaaaaccagcttatctgaacaaactaacacgagtacaatacctctttattgtctgtgacaatcattgacctgtaaaatgtttcgggatagatcatcttaaagtatgaatcgacctgttcttttctagactgtccttcaacagaaggtatgtctctaacgagaattgcatactgttcaggcttcaattcaggtgacattgatgcattagttctcaaattggaaatgtgattataagccctccataaaaggtaataagtaacaaaagaaacacagtagactgcaaacagaaatgcccacaatcttggactcttttcctgtaaacaaataaaaacaaaaatcagttaaaacatcgaatatcgaattcaagcttaagcaaaggtgaaagaacttacagtgacatttcccattgtcaatttgtccagaatagtgaagttattagctcctaactgctccaaacgattatcggttgcagcaactggtagaagagatggtagtagaactaggccacatataatcaatattcccaaaactgccaaaccaattaggaaaattagaatctttagtttatcagcattgtaagcactaagcataaagcatgtttaaagtgaatctagttcaatggacatcaatgatgagacactttttttttattccatcaagttaaacatgtctaaaggacattgttttttttttggttaggataccaaatcaaagaaccattcatgtacatgaagtacaactataaaagttcagaaaaaagtacaagtttgaaacagtagagacactaaaattgaggattttttttttttctgtttttttgttttttttacaaacaacaatactaatgtttggggtttaaaaaatgtaattaattcataataagataatcctcagatgttggaacagttgacaccaaagaaactagagtaagataataaaattaaattgtaataggtcgctattcccttagactaaaactattgacaaaaagtaggtgaaaaaggtagaaaaaagttaaacaaaaactgtcattaaattataaactaaaacaaaatcaacaaaaaatcaaacccaaaacccctatatccctaaaaaaataataaaagaaatctacagaagctgaaatcaaactaaataattactatatattcctctaacccaatcaaattctgcagataaatacacttttccataaataatctaaaattctaaatatgacttttttaacaaacaataaagtaaacccaaaaaaaaatccaaacctattaaattcgtacaaatataaaattactacaacagaaaacgacaaaagaaagtgaaagaggagagaagaaacaaaccagtgctgaggaagacgaagtagacagcagtgtcaacccctgacatggctataacattctcttctgaagaagacatagcttctcggatccaggcaaaagggctacaagaggcggatctgttctcattcggatccatccctttcaagatccgattcggatagtaaacgacggcgtttccaggcttacttgagagccatgagtaaatcagaaccaaaaccacaaatattacaaaagacgtccctaaagacgtcaaaaaggaactcaaatccatctgggtatctctctacaacgctaaaaattcagtctttattatatatctaaacgaagccaaactcaaaaaccatgaaaagggtatgaacaaaaacgaagctttaaaacaaagaaagaaactttttaaagtgggaaacgaaatgagagccgttaaggggtcatttaagaaaatgaaagtaaccgttgtgagaagattaaagagaaaaacaaaagagtgagtattgaagaagaagaagaaaggagaagaagagtgtgttgagagcttaaatggtgttatgtatgtatggaacggttagttgggttgtagctgttataatcaacagaaaaaaaaatataaatctaaaaagggaaaaggaaatgcttttgtaataaaataaatagataaataaataaataaaatcagagaaaaatatcttcgtggttataccgtgtttgtgttgtgttctctctttttttctaatctttgtaataaccactttttttttaagatgaacgtggtggggttggttttttgtttttgttaattgtttgaattttttttttagagtattgttatttggtattattttagtattttttagatgagtaattttttaattgatgtatagaagaatgttaacgttttagcccttttttttaaaaaaaaaaatatattgtattttttaataaataataatggtattttgtttttttttggctttagaatgcaaaaagagaggaaccagaatgtgtggcagagctagggcaacgtaaagagtagattaaaagagatggtggagatttttttgtggaaaaaatataatattataaaaatatcccctataaattataaaattatatatttacacacctttgagtttttgaatatcattttgtgctacattttttttatatatcttaatgcttcacatttgccattttagaccactaaaataattatcttttttttttatttgtaataaataaaacaatataattaattgtagaaagaaagaaagaaaaaaaatgaaggcttagtgatagtaatgttatttgttttctttgtcttttgtggaatattgagacaaagttggtaggttatatgagtaagattatgttgcacgcacatgcatggtttttgtttttcttattaattattattagtgacattaattcctacataattaggttttataatttggtggaatctgaacaagacttgcacccttgtttagggaaaaagtaaaacatgagaaaagaaaagaacaatgaaaatggaaatagaaagaaggtataagaattttggaggaatatgtgtttacttatccattgatttaataattggttagtgtaggaaggttcattgtttttgaagcaatactataatttttgcttcaatgtatatatatcatggagattcaaacaagggtcaaaactatttagttatgtataagaattttatatataataaatctatattttaataattaatgtaattattatttgacatttaaacatacattatttgccaaacataaaaataaaaattagtatgtaattattatttgacatttaaacatacatctagttcgtcaagtaataagaattgaaaatgtattatttgtaacgtgtatataataatgattgcagcaaatttaaaatttgcattctataaaaaaaaaaaaaaaaaaaaaaaaaaaaattacaaattatcacattaatgatgccttcaatcatgagtataatagtacacaaggaaaatattatatatgtatatagacaaatgttaaagggtacgactgtttaattaacactctcttatgtgttaatatcgctattggttcaattatgtatcgggtcccatataatttaaaataataatttttagagagtatcgctagtcaatcgtaacac

SEQ ID NO: 186382 - DNA, 6640 bp, Cannabis indica
tttgataatgatgatagtgtgaattgctcaaacagcatcgcaccacttcatgtttttacggtgtgatttttgcggtttgaagatctcatggtgtagttgcggtttgagaaactacaaaaatgcatatgcggtttggtttgaaaaaagaccacaacccacaccctccaccgcgaacacccctactcccaactgttaaggggatctattgatgtattcgtccacccactgtagagataaacaactttaaatcaagctcgccataattcagattgttcaaaatggtgtttaatttggggggatgcctaatgaaggtccaaacatgcacataactaattttctagagttgtgtgctacattaaaaatgaatgaagtaagttatgatgagtgaagagttagtttatctcactacaaactaactcaatatctactaaggagaacttgctcaaaagtttcttgccaaattctttcctccatccaagggtgctcgtttaagaggagagatcaataatttctatcaattgaatggagaatcactatatgatgcttggaaaatattcaaagacctacacaggaagtgtcctcatcatgacatcaaaaagtgaatgtttgtgcacaattttatataacagtctatgtgataatacaaaaaataaaataattgaggcaataatagctggaggtacatttatgagtaaaagtgggaataaagcccataaattgttagacgagatgaccaggaataagtataattggacatttgaacgagaaaataagaaagtggttggagttctagatgttgatcctattgctatgcttacttcccaaattactttgtaaaactcaatgtccgggcaagcaatgtaattacaagctacacctacttgtaaaatgtttggagaggagctcatccttatacacaatatactgttgccaataataataataataataataataataataataataataataataataataataataataataataataatattgatgatactcctttaaagcaaatccaagttattggcaattatccaagacagctgaataataatccttactcaaacacttatactcctatttagagaaatcaccctaatctatcacggaataataatcaagggcaataatcaaaatatctacaatatccacatctttatccaccacatcgaccaacctatgggctttatcctagacaatattatagccctcaaagaccacaaataccacagcagccatcagcacctcttcaagtgaccaaatttaaaccatctcccaacacaatcaactgattcataattgaaacaagatcatctattcgtaagttagaaattcaaatgagtcaaattacaaaaattttgttagaccgaaatcaaaggactttacctagttcaatagtggtaaaccccaaagagaaatatcaagccattactttgaggagtggaaccagttatgaaaggccaacaatgaaagacaaggaaaagaagactaaagatcaacatgtcactagtccagcaaaagaaaatgttgctgaagaccttcctaagaaggagaagcctaagtatgaagagcctacaccaaagcttccatatcctcaaaggcttcataaaaataaacttgataagaaattttccaagctcttagaagtattcaagaagctgcatattaatatttcctttgttgaggtacttgagaaaattcccttttctaattttttttatggagattctatcgaagaaaataaagtgggaggaatatgagacaataataattcttgaggagtgtaacaaaattttgcaaaagaaactacctatcaagctcaaagatctgggtagtttcaatactccatgttctattagagactcggttaaaaacaaaggccttatgtgatttaggggatagtgtgaatataatacctctctctatcttctgaacactaaaattgagagaaactcacccttctactgtttcattacagatggcagatagtttagttaagcatcctcatggagtgattgatgatatcctagtaaaggttggtaaaattaactttcctgttgattttcttattctcaatatggaggatgatgcaaatattctgatcatactagcaagactatttttagctatcggaagagcactaattgatgtacaaaagggagaattgaagtcgcatgtgcaagatgaagaggtaacatttaatgtcttttaagcaatagatattcctacttgttgtagagttgaggtggtgaatgaccatcaaagaataaatttttaaaagaagaagaaaaccaaagaacaattttgtgctgctcgacatcggatgaaaatattgttttgttgggataattaaaataatattctcaacaataaaataatatttatcacatatcatattttagaactcaaggacgcaccaggtggacttgactcgagttgagtttgaagagaagtgagcgtcaagctgaagacgttaaatgaaattctcttgggaagcaacccaattttacttttagcattttttttcaaatttaatttttgttgaacacattttaatttattgtgttttagaaggtgtagttttattttatttacttatataagatgaatcgtgcaatatgtaaaaaaaaacacaacgttcgaaatcatggctcttagaggcagagccttggctccgtaaaattaatgaaaaagagaaaaaaatttgtccaaggagcctcaaccccactatggagccatggcacctggaagggatgctaaaaaaaacccattcttttgaggagacaaggttcctcaccttggacccataaactttggccccgtatgaaatctacgagcaacttaaaatatggtccacttcgaatttcttttcaaattttcacatcaaagtgttgccacaaccaaagttttgatatgcttgtcaagagtttcagatatgttttctttcttttatgtttaattaagtcatgttacccaattctgctcaccttggagctataaatttagctccgtataaaatctacaatgtgtttaataagtttgggagagcattcttatttattattatatgtttagttatataatttgtcatatgtattgtgtttttgtgtctagtaattagtaggtggtttggttattgtgagttaagttgtcaattcatgagccgataatacactaatactaagaatgaatatgtagcatgacttgaagaaaattttgattattgttggacctaactattggtaaaattgcattgtgatctaacaaaagtcagtgaagggtgatcgctatcaaattatttctcgttatttgatacgatcttttgtggaaggtcaaaatgacatactatatttttgatgataaagtctagggccttcttggaggtgactgtgttcatcaattctgcttccacccacttggtgaagtaatcaacaacgactatggcgtatttgactcctcctttcccagtcggaagataacctaccaggtcaattcccaaaacatcaaaagcccatggactgttcatgagggtaatttctgttggtggagctcgcgaaaccttggcatagcgccgccattttttacacttttggacatacttgatgcaatatcttttcatatttggacaaaagtatccttgtcaaagaattttcttggacaggcttggtcaacttcatgaatgacaacgccaatctctgttccggctatgcatctcaaatatggattaaacaaccccctgcgataaagtcttccatctagaatgacgtatctggaagcttgatactgaatcttccgggtagcaaacctatcggccagaagctctccagaattcaaaaactagaagattaggcctatccagaagttctaatgatcaatgacatttacccactgtgtttcaatgcttggggctttcagatgatcaattggcactattccgtactgctctatttctagacctgttgccaattttgctaacatgtccgcaaatgaattctgatccgtcgaaatcttacggatgttatatctcttgaaatgttacaatagttccctagatcgagatacgtaggcaaccattctttcacccattgtccgatactctttgaatatttgatttacgactatttaggagtctctatatacttcaatattatgagcttttatttccttggttaattgcaggccaaatatcatggcttcatgctccacttcattattcgaggtagggaattcaaggcgaataccactctggagttggtgtccctatggagagaccaagatttttcttgctccagcgccctttacatttaaggttccatcaacgtagactttctagaactgtagttcggaaactagctcatccggatcatcattcattttggtgcactcaaccatgaagtctgataaagcctactctttaatggaaactcgaagttgatattgaatgtcaaattggctgagctccatagtccattttaataaccttctgaatgactctggtttatgtaatacttggcggagagggtggtttgttagcaccttaatgacatgggcttaaaagtagggttgcagcttccgcaaggcgattagtaagcaaaaggaaaaattctctatcataggatatctaaactatgcgtccaacaatcttttacttatataatacaccagaagttagaccttttcttcgcgcactaatgcgatacttatagcatgatctgacacgactaagtacagttataacgactctccctcaaccgacttcgaaagaattggggctttggtcaaatgttccttacccatttattgtctgaaatcgggtaggccacaccaacatctaaccactttactacttcctttctcattacctcgttcattggtggattaagtcttcgttgtgcatcgatgctcgacttagctccatcttccattaaaattttgtgcaaaactattgagggactaatttccttgatatcgccaatgtccacccaatggcctttgtatgtgttctaagtactctcaacaatttatcaatctccacattagaaagtgaaactgacactatgactaggaacgaattcatatctcaaatgattaggaagtacaactgaagctctggttgcttctctacagacgagacatgcctccttggaacgacccctaactcttcaaagtattttctattcaatggctcataggagtcaagtcattttgcatattccataacctcactcacatcttgctcatttaaatcctcttcgattaaactcacttccaacgaatcctcaatcaattttttcttctccactactgtgtccacgagatcaacagagaaatagttatcactagcctttggaaaattccttgccttaagaacattaaaaaccacttcttccctttccaccctcagtttcaatttgcccttctgaacatcttccaatgcttagcctattgccaagaatggtctcccaaggatgatgggcatgttgctatcttcttgcatgtccagaacaataaaatctgctaagaaaataaacttatctactttgactagcacatcttcaatgaccccccttggatgagccaacaaatgatcgacaagctggaaggttacggttgttggcttcctctcccaattgaaatcttctaaaaactgacagcgacatcaaattgatgcttgctcccaaatcacaatgagcattcatcccctctattcttctgatggtacaaggtatggtaaaactcccaagatctctaattttaggagggagtttcttctgtagtattgcattgcactcttcggttaatgccattgtctcataattctccattttctcttcttggcaggatttccttcatgaacttgacatagcttggcgtttgttccaaggcttccgtgaaagggatgttgatgtaaaacttcttgaatacttctaaaaactttgaaaactgcttgtccaaattggtcttttggagcctctgcaggataagagatctttacatggtgctcaatgttgatcggaggcgttgcttcttttgatgtgagactttcagttttcttcttctcttcggatgtcaatgcttgctggtcttaaacctcttcttccacttgttgtttctcattagacccctcatacctcttcccacttctcaaagttattgcctcacaattttcctttcggttcacctccgttgtacttggaaagttaccttgagggcgggtagccatttgagtagccaattgccccatctgattctctaaggcttttatggatgatctagtctctgtcatgaactatagtagcaatctgtttgaagactagaccctccactagaaccttgttgttgcggctgttgttggttttactggggctgatttctctactggtaaaacccctactactgctgattagaggactgccctcgaaaatttggtcgactacccccctccttgattgtacccataattattatcttaagaataattcctaatggctttttcttgatccattggcaaactgtccacatccacggggcatgtgtcataggtatgagggtccccgcatagctcacaagtgacttgagcttgtttttcctgcacagccattaacttcgttagggcctccacttg

SEQ ID NO: 186383 - DNA, 3032 bp, Cannabis indica
caaaaaaaaaaaaaagtgtaaaattttatttttagacacatgacgcgattttaactcaatctaaaatgggagagtagagtggaggaagcaaaatagtgtgcattgaaacttgtttactactccccaagaaaagcacaaggcagaagcagatctaccagacaacccaaatccatctctttttgtctacaatttgcattctgattttgatctacgccttctttctgatccctggctggcaatgcccgaatcatattgatccactcttttctttctaagatctaaggtaggtacaattctgctctctttcttgttccttttaataatatcttctattgaagcaatgtaatcccaaactcattccttaagattttggctcaaattgaagcaaagctaagttcttggcttcgatcgaaattttgtcaagcaatcccaaatgcgcttactgtccatcactttttcaaaaactgaacggagctggcttaatatttgtttggatagcttattcgaatgattcacattcaagatttactttttgttgatttagctttggttttggatttcaatgtgttatggtttgaaaattgagcgggaacgaagttgatgaaattctataccaagagtaatagagtgaatgggcaagttttcgtagtaaaaggccatcgatcttggcaagtctctatagtggtgtgattcagctctgggattacaggatggggactctcattaatcgatctgatgagcacgatgggccagttcctggcattcatttccataagtcgcagccactatttattttcgggggtagaattcttcaacgctgataaaatattattattgcttgcttgttctatttcttgcctaatatgaattatgagaatgctgatttactgcaattgacgagatttaatgtattcttatgtgctgttaatgccttttgatattgcaaaaaaattaaagcattttataatgatattcttcttatctactactaatataagccattgacaatatagtaaatggtgaggttggtgtttgtatatctctgaacgagggtcgtaatgtcagttatcttaatttagttatatgtttgcatataattggcaatctcgtacatgcatttctgtgcttaccaggcacaatcattatgtcatgtgtgtctcatttcatccaaagaaggaccttgttgtctcagcgtccttagataaaattattcgtgtttgggacatcagtgctcttaagaagaagtcaggcacatctgctcatgttgatgacatcttacggttgggtcaaatgaactcagatttatttggaggtgttgattctgttattaaatatgtcttagaaggtcatgatcgggtgttaattgggcctcattccatccaacactcccactgattgtgtctggagcagatgatcgtcaagtgaaactttagagaatgaatggtaatataataatttttctgttctactttatattagttattgatacagttatcatacttcaaatatatatatatcacaaacccgagaggattaactcaaacgattaggcacttacttaacaataggtatagtttcatgatcgcaaatattgtcgggttgggcggaagtttaatttctccaacaacagaataaaaaattatcacaagattgagttaaacaaagttggaaatgcatttctcctttaaatgtcaagataaaggaaaagaattaccagccttattttgaagttttttcatattctccatcttgatattttctgaatttatccttcagttcaattattcgtagttgggatccacttgtgatttgtattttgattgagctgattgcgtaaatcaggtgtattttggtttagatgctcgcgaaggtcaggttgtcattgatttaagtgctcacgaaggtcaggctgccttctttcataatttctcacaaatcttgtcttcgagtaactcttggattgataactctgtgagttgcttatgctttcttggtcagcataataacgtcgagatctacttccttctcacatttgtctatctgaccgactatgccctcgagacctggattgtctcgagcttgagcttgcttcatctcgcaccgaccttctcctttggaagagattagaaatgcgtcctctattcaagtacgtgtgtacactttctctatctgctcgagaaggacgttaagtatgtctcggaggaagcccgcttgtccttagttgatttcccgagtttctctcattattgcgagggattccctggttccctggtcgaggctgccttgcctcttcattcctgtgagatgcttctgtcacgtcaggtcgttcattcccttggttagcaaatccatgggaagtttgtggaacatctcgttgatgttcttgattccttgcattagtgggatttgtttgattatccattggggcatcccttgtatctccaggttcttcatcctgggtattttggggattcccctagtttgtttcctgcctcatggtcctagatcctcgaggtcttcttcgtggtcttcttgctataggatcaggttggttctgaggtactatcacctatgcggccctggctgctgtagcctctcactccaactcagtgtttcatcagtttgattcagccattgtcaaagttgcctattttccaactccaccaatggatcgcatctagttgggtcataagcatcttcactcctaggcacgtatctggttattggcactctccattaccatcgttcctccttgaacgtggtatttcaaaagtgttgggtctttgagatcccatgggctctttgccagggcaatgggttgtttcctcaaattgattattgttgtgttgatcatcaccacccattgagtatgggtagataatgtttataaggaggaattttttcagagtttttatcaccaagactctcaatgaaagcaccataacacagatttttgttaatcaaattaaatagcctttttgcaataaatatactacaaaaatgaatatataattaataaatacaagattttt

SEQ ID NO: 186384 - DNA, 5051 bp, Cannabis indica
tattttttttaattagtattttgaactttgactctatcctagacttgggacctaaactccaaccctgtctctattctcggactcgaaccatggtcttagccccaaactcggatctggatctgacttaaataaaattaaaaaataaaaataaaaattatgcaacatactaatgttttctgtttttaaaattaaaaaacaagagtggttatacaacatatttttattttctaaaaacaaaattttgaaaatataaattttatttttatttttgtaattaaaaaataaaaaaacaaaagtatttctaaatgttcttataaaaataatataaaatataaagggaaatttacagaaatactgaaatttgggttaatttttacaaaaatactgtcacacggaaaagttttcaaatatattgtgtttttataaaacactagtaaaatacaaaacagaacaactcaaaacaacagtagaacaactaaaaatatcagtgaaaacttaacaaagtatactgcagtatgaaacatataaaaaaatacagtaaaaaagtaaaaataccgcttaacagtatttttgtaaaaaaataacaaaaattagtataccatgtaaatttcccaatataaaagcatcaacattgtttatgtctattttagttaaaatataagaaaattctcataatttagtaatctctgggctcaatatgggcctaaaagttaaacaggcccaagttagtaattcaaatggtaagaatgagaccgtaccgtatcgaattacgtcaatggaaaatcgaaacgcgtacgaaacccacctggtctgctcgactgactcacccgagttcactcacttgactcgggccctgactcgttcatccctcgtcgcactcgacgcggaatggaagccaactcggactcggcaatccaccttccccactgtgtcccttctccaactcgcgtgtcgactcagtcccagactcgttgggagctcgaatgagctgctactgcccgaagagaatcggtggttttcttggtggaccttattttgattcctccaccttcaatctgggaattgttgagagacctctttgtatctccggatattctgaaattgggttttagattcaagcaggatttggtgtacttgtcatcaactttcagctcccatggatgtaatcttggatttgataaggtaagatctctgcttttagaataatgggattgtttggttactgagaaaatgcatgaaattgagggaattgataaaattgagacctgggtttttcttttctcttcttcataaatggaaatgagaaagctttttatgctagttactttggttagaatagagagacacgtgctcaagattttcttggctaaaaatcaattgtgttagacctaatatataaaatagattctatgtatttgttttgatgcaatgcatttataacaaatgaatatctttattccatggctaatgtactacaattaaggccatgattttcttgttattttaggtggaaccatttttggacattacaagtatatacaatcatctacaagacaaacaacctgaaaggagaatatcaaaggatatcaaaagtttagctactatctgcaaagaagtcttaggcatctctctttcaaaggtttgatttatgttaaacaagtcaagagattgttggttatgttacataatatatgaacaaatattccttatgcatattttaaattagattaaccttaatgaatttattaagttgaacttgctttgacattatcatctctctcactctcaggttatgctttaatatttgtgcttattacaatgtagagtagtctaggacaatgcattagttatagctattagtaattgagatccctgtaattacattaggttgtttttgattactatgatagtgtattgaaacaatttatatctcctttgtaggaacttcaatgtagtgactggtcagttcgtcctcttacagaagaacaaagaacgtatgctgctctggatgcacactgcttgcttgatatatttgaagtatttcaggccaaggtcatcaaagaaggtatgtatgccttacttggtatgccaatttagcgaatccttactgatttagctttaccccgaaagtattatttacagggtacactttcttgatgtagaagagagcagaaagagaataaacaataggaaaagggaaattaactaataattttaaaacataccaaattctgtttaataaaatgaagcctaatgataattcaaatgattttgggatctcctatctcactgctgagtacttatctcatatccctgttgtgtgcaaatgaattggtcatttcaggtaatataattcagaatgttcctgatcaactttcctcgatttcaattcttgggttgaaagagattcttgaggaagatgacttgtgtaataaaataatgaagacgggatttgttgaagccgtggatgtagttcgagctactgcttgttctgatgtttctcgagaaatagcctcagaagaaggaatggttatgagatctcaacataggagtagtttgcctatgggtgaatccctgttgaatgtagtgaaaaaatatggtgaaaaacttttattggaagaatctgataaaaacccaaaaaaatcaagaaagaaaggcagaagacgaccttcagctagtttgattcgaaaagaaaggctgttagaaatttcagatgaatggcaaggccccccaccatgggatttgtccgtgggaggaaatggatgcccaaagtttctttgtgatgtgatggtatgtctataaaattttcgacatatattatacttcattagatagtgtaaggtaagtctaccccttttacatgttcaaatgtctgtcatcttagagatttatttacgcataaaacggttcacactagtatccacaagggctttgatagctaatgtcatttggtagctaatggaacattcactcaggttgcagggttggcaaaacatttaagatgtgttggaatggatgctgcaatcccatgttcaagaaaacctgatcccaggtattcttctccggaatatgtcaaatatacaatgctattataggtataaatacacgtttaggtagacgtaattttgtttcatctatgtagggagttaatagatcaagcgctcaaagagaatagagtgctcttgacacgggatgctaagcttctgagatatggttatatactaaataatcaaatatatagggtgaagagtcttctgaaaaatgaacaactacttgaggtaagttgtttagttcttgttgttctgaagtattattagagttcatgctgcggttggctgaaattgtaagtgttcttgtaggtcatagaaacttttcagctgaaagtcagtgaggatcaattgttgtcaaggtgccccaaatgcaatggtagatttatccaaaaaccattatcgactgaagaggctgtggaagctgcaaaaggtttccaacgaattccagattgcttgtttgacaaaaacctattgttttggcagtgcatggactgtaagcaactttactgggaggtaacgtccttaacttctttcattatttccttttacttgaaccatagatggtcaaagaagcaatatttacgaaattcatgaaaaactgtatccaaaaggggtagctcaaatgttcatcgcttaagttcgagtcccaacttggataccaacattgtaattgctatagtttcttcaccaccgaagagtagagtttagccaagatgacttgctagtttcttatcattagtagaaaagcttcattagtttcttttttattgattataaaactcctatttaaaaggcaacatggacaaaagccaatggaacatgtgcacagtacagaaaataacaatatacaagagacttattatatattattataacaagccctttagttgtccttgaaaaaaggggctctaattaaagttgattatctccaataaatgtgaatactgttgattgtggtaggataggatgtgtgtaatcaacttctttacattctcaacatagtttagtgcttatgcaaccccacttcaagtagaagcaaaaagagatttatctttaggttctcaaacttggacattaagccccttttattgaaaaaagaaaatcagtcaatcaataaagacttattaaaaaaaaaagtaaatttgtttgctaaaacaagtctcctttttaagcaaaatatatctagacataagatcatgatttgacttgtagcttctcttgtttgtcatatggtaaaaaaaaaaacactttgaaactaggtgtgaacttttgacaaaaatggagtcatgcatggtgatgatgataatgttgattatgatagtggttgatattgttggtagccagctttgattaaattctgtgttgttttttcagggaacccagtataagaatgcaatccagaaattcatagacgtttgcaatttgaataacataactccaaatttgtaatcattgtctacacagttatgtcatttggtttgggcaaatgtctttgtcggttatacttgtaatatactcatttacattcatgtgttttaagtaaagtacgtcactttttttattttattatatatatatatacatatattgtataagtctactataatcagcctatcacaacatgtgcccccactttgttttgttcatcactctgtattttattgggagaatctttgatttgatggtggtaaaagctgttggccaaagttagagaatgaaaaagagacatatccaagttgagtagaatatgttgtgttttctatcaagatatatacaaatctttttatttgtatactttttcttatatgggtattataagttatttaaagaatgttctttgaaaaattgtatatttgaaaaactatagagatattaatatacatattcttccataccaactctcacaaaaatatgctaagaaacttagtttgggggacaaatgcacctgagttaacggctttaatgtaaatgtatggaccttttatttattttttatttttt

SEQ ID NO: 186385 - DNA, 2730 bp, Cannabis indica
gccattgtaactgaaaaaatggaacctttaggaaacaagtataaacaaaatcttgactgtgatttgcatcaataaacataagaacctctagatgcaaaaaacgtagaaagggtaaaattattaactccaaatagaaacttcaaggacaactaattttcagaagctacattctgcaaacctataaaaagaattagcatatgtacctgtgttcccctataaaatgacaattctgcctaaatctctccatttctacacaatcatttctatctttaccaagtgcaagcaaatacaaacaacctgacgtgcatatgttactccacaactccaaaccaatgaatcatcacaagtaattatgaattacgattatttgccatacaggaaaaaaaaaatcaaaaggatccaagtttaactttgtgatattcaagggatggtaaaaggaaccaaaatcttgaataaaatcatgaaacaatcaaaaaaggaaactggcagtaaactaaagtttattcataagttacatcacatctgtaattacacctaatttctctcataatgcaagcataagaccaggagagcaaaggaaagtcatgccctttctgtgtaattttagcaaactgattggtgccaaggaaaaatcaatagttaaaaataaaacagctgcataaactaaattgaaatatggagacaaggagaaaaaaaaaagaaaaagaaacactaatgtttgatttggtagaatggaatagtaataatggtaatagtaatgtaatagaacatgaatagtaatatgaatcgattatgatatttggtttgttgttggaatgaatattggaatagatgacatattgacaaaattgtccgtactttaatttttatatttatatagaaaagggtactaaggttttagtttagtttatttaaccatttgtaatgtaatcctcattacacaattttaattgatgtaatgaggattcatgtatatgatgtaatcattattacattgtaatcccatcacatcactttaaaaacaaaccaaacaatgtaatgaagattttgattccattacaacacccattacaacaaaccaaacatcaccagtctaaaactaaaaaatatgcatctaaaaaagaaaataaagaatgggtattgatagagtgatagtttgcaagaatgatcaagaaatacatatatatatatataaatatatatatcttaattccaagcaataaaaagagaaatagaaaaaattgatgatttgaaaagcaaaagaacagtcaaagggacttaccaatacaaaggaaaaaagatgacagagaagagagtctcactcatataagctctctctggaccaagctcctacggtacaaaataaaaaaatattaaaacatatgtacaactagaaattgtgagccatcaacaaccaactgtatgaaccaagcaaaactggtacccaccggaagaagaaagaacccggcatcctgaagtgttggtcccgggcgatgcagataatgaactccatgagcagccaagccatgtaaatacttcaaataacaacaaatatgatgaacgtcaaagaagtgagtaattgggcttaaacacaagtttgtattataatagaacaagagtcattaaacagctaaaaaaatcagaagctaaaataagcataattctgtttgaaagagaaacaacaaaaatgacaaggtacattctcatacacacaacattttattcaaagagcttccaatatcgtagttattctcttagtgaagaccttaaatttgaagtttaaacaagattaaaaatcttttataaaactattaccagatggaacataacattgttagctgcttgtcacacgataaaaaagccaaatacagctagtaacaaaattacaccacaacactaaaaatggaagaatagttgttctgatctatctagtatttacttaataactataaccaaaccaggtggagaaactgttaaatacgttctcacagaaacatattatataaacctcgcaggccaaacaaatttgataggcatcccttcattatacatacaacaacatttaattagtgataatactgttatataaaaatataaaattagagaattacgcatattttgaagaaaaagaaataggaaagtaaacctgaacaaaaattccaccgagaaggaacttccaattctcggaaagaagcgaaacctctacagatgtctctgagcaaattttcctccatagcttcacatttttcaggcacaaattaatcaaaattctcacccagaaaagtaaacaaaaaaataatgacaaagagattggaaatgaatgaaaaaaccttaggagcctcacgagcgacgtaaagcggcattatcatgattcagttacggtgttgttgttgatgatgatgatgatgattttatgatgaaattaaagttcgacattaatcactatctgaaacaatgccaaaatataaacaaaattcaacattttctgttccaaatttcaatttgtaaaatcatacatttaaatttcggaagtatctcatacataaacagattttcaccaatatccaatccaaagcaacactttctcgctcttctctttctctctctcactcttgaacgaggcagttgagaagaaagttctaaaattggggtgcaacttcaaaataattcatttattctaaagaaaaattactaaatgacctgttttatttttttaattttattatttac

SEQ ID NO: 186386 - DNA, 4328 bp, Cannabis indica
ataaagatacgatcattaccattaatgaaatgaattattactcccttgaaactgtagatttgtttttacttatcgagtactttatcgggaaacgatagtgacatacgtagctcgtggataacgagtggtaaggatgttctatgaagcattaaagtaggattgtctaataaggtaattaattgattatgtgattatgtactaagtaaatatctttttattacgatgataatgttgttgactatgattttcttataatgtgtaatatatgtgtttgtatagacgttaaattacatatgtatgttgaatatgtaatgaatcatgagtatgtatattatgtcatattgtgattacttttgtattacatcgtgacttagtagcttttcttgctaagtctttgtgactcacgggtgcttcatggtgcatgtatggaggataggaactgtgttcgaccatgattcagaggtctcccaacgaagtacatatcagtcgtggtgtcatggcttccaagaaatagggtcaaccctttggctatgtttgaaaatgtaaccttacttttgtaatagcatttttgagacttgttgtaaaagaatttataaacagaggattcccacattaaggtggtattttgtatgaaagttttattttaatttaatcaaaaaagttttaattaaaccacacatttcctaaactaatagattagttagaaataagtttgtaaaagcacacacatagcgtctgtgtgagtcaaggcgttacagactcgactttgattgttagtgctaatcgtagtccttctaggagtgcctcatgctctgcttcattgttggtttcagtaaaatcgaactgcattgcactgtgagttcaaaatccctttgcagtaactaagatgagtctagcaccaaaactgtgctcgtttgaagagccatctacgtatagtttctaggttggtccactgtccctctgagctgcagtctcaagtgtgcagacctcgtcttcacaaatcatgagattgtctttgtcgaggccagtacattcagtaatgaagtctactagtgcttgtcctttgattgttgtttgaggatggtaggtgatctcaaactgacctagtttagttgcccacttgagtaggtgccctgattcttcttgcatcatctaaacttacctatgtggttggtcagttagtaccataactgtgagagcttagaagtatgaccttagctttctagaggccaggacaaattagtaagctacattctcaatgggaggataccttgactccactctgatgagacacttcctgatgtagtacataggatgttgtaccccttcttattcatgcaccagagcatcactggctgcatgcttggtgattgccaaataaatttatagttcttcaccatctattgggttggataggatggaagagcatggaaggcttgctcacattgatcagtccattcaaaccccttgttgcttcttttaagttattaaagaagggaacacacttgtcggttgacttagagatgaatctaatgagtgcaacaattcatccggttaggctttacatgtcttttatctgcgacagtgacttcatgtcttgtaaggcctttatcttctcaggattcgcttcaatacctcttgatttgataataaatttgagaaatgtttttgactggacgctgaaagcacattttagagggttgagcttcattcaatattcctgtaggatgttaaagcattcctctaggtcattgatgtggtcttcagatcttttcgacttaattagcacatcatcgacatagacttccatattgtttcaaatttggttgaggagtgtacggttcactagtctttgataagtgcacctgtattcttaagtccgaaaggcattactttgtaacaataaaatctgatattagtttggaaactagtatgctctaatatattaagtttatacaaagctaaacaagactcgtgtgaatatttatctcggaaatgagaatcgggtcaatttttaaagacctgaacctatgagacactcaagaaataagtgagatctgaacaaatattgttatttcatagagacattggacataccactgacggatgtcgccaattaaaagatgagatcaaaggacggatttcccaatgctatttaaggttgtacgtaagaaatagagggaatgaacaaaacctaccaaacaaacagaatcaaaaccaaggtgtacaacctcccccaaattgaggggaggatatcttggttaatactagaggatcgcatctcgcaggaaacaacaatagttccctaaagaggtatataaatcaagttaagaaccaacaatcagactttgcaccagagctcctcaagcgagcgaagcctgaggaactaccaataatctccattgatgaacatgcagtacatgtgtagtttccacatttagacccctaggttattacagtctagctcgcaaataaaagaataaaaagggttctcatcgacaacgggtgttctatcaatattctttacaaagaaacactaaagaagatgggtttggaagaggcaaatttagatcatgcgtggtgaacttacgtcgcttcacgggggaattcgtctgagccttggcaccatttaactcccactcactatgcgagagccgccactatcagcgacccaaatgatagatatcccttcgatatacaacatgctaatgggtcatcctgcactaatatgactaggggtagtaagcttaataaagcgaatgtccttgaaattccaactcatcctggagtctagatagtgaaaggtgaccaactgttggccagacagttctatagtgtcaaatcaaagaatcgaagggaaacccactagctaatggtaattttgatagaggagaatgaggaatacgagatggaagacttggatcctaggatccaagctgagtacaactcactaaaacgaacagaagagttggaagaaataaatttagacccaaatgacccaactaaatgtgttaacattgagaaggatttgggggaagaactaaaatagaaattaatcacattttgaaggcaaaccaagatcagtttgcttggagccactcagacatggtcgacatcgacccaaatataatttttcaccatatcaacattgatacctcgtatcctttgaagcatcagaagaggcatcccttggatcccgagcgacaaaatactttgaaaggagaagttaacaaatttttaaccgacaacttcataagagaagaattttatccctcatggatctcaaatactgttctcgtcttgaaaccaaataagacatggagaacctacgtagacttttttgacttgaataaaacttgttcgaaggacagttttctattgccatggattgacaaattggttggtgcgatagaagaacatgagctgatgacctttatagatgcatattttggatataaccagattaagatgtacattccaaatcaagaacacacaagcattgttacaaatatagggttgtattgttacaaggtcatgccattcagactcaaaaatgctggagcaacatatcaatgtctcatgaatggtatattcaagaactagataggtcagaatttggaactgtatgtatatgccatattggtaaaatcaatcaagagtgaggaccatgcagaagaccttgtagagtgcttgcaatattaaaaaagttcaatatgaagctaaatcctaaaaaatgttcatttggtgtgtcgtcgagaaagttccttggttttattataaatgtaataggaattgaggctcactctgagaaaataaaggcattgctcaaaatgccttctccaagaaaaccaaaggagctcaaatctttgactggaataatggtagcctaaagtagatatatctcaaaatcaatcgataaatgtctcccattctaaaatgttttgcgaggcaacaaaaaattcaagtggaatgaataatacaagtaggccttatcaaaagacatctttcaatgccaccagtaatggaaaaaccaataattggagaactgttgtacatttacttagccatctaaaaaaataccattagtgcagtattagtgcgagaagagggaaaatacaagcaacaagtttattatataagtaaacggttactaggagaagaatcgaggtaccatccacttgagaaactctcacttagcttggtacatgccttgagaaaattacgagcctattttaaaccgcaccccatcaatgtaaggacttaccaacctctgtgacaaatattatcaaaacctgatgcctcaaaaagattgattaaatggtcaatcg

SEQ ID NO: 186387 - DNA, 2326 bp, Cannabis indica
tccctcaaaccattacatctgcaatttgtttatcttttcttgcatatactagtatcgccttttaagaagtccctatattgaagtactttaattatactatgtctcaatacagcatgggcagacaattgtgctcctgattcatatgatggtcctgttccatccatttctaaccaagttcagatggaagaccaaaataatgaggtactttcaaacagtgaagcacatgaagctacttcggcacttggcttattagctttacattatggaaactcatcagactctgaggaagatcaggttcgagaagatgattcaatctatgaaaatgaaaccaacatggcaaattgttctccagaaagcaaatatcgttgtgagagttctggtctctctttccaaaatagtctgagtgatgcagctggcgatgatggtcgctcaccacaagaacttgatttaggggaagaacgtgcatctcaaaatgctgattttcataaggaaaatgggcacaacagagatgatgtcaaatatagcaatcgtcaaaatgttggttgttctgttgatgcatctaataatgttgcttccactgaaacaaattgcttggttggtaaaataagagatcctatgatagtttcacaaacatgttccgcagatacatatgatgcagaagctacaaggttctgcaagggtattgtaccaatgaagaatgaaggcgtgccattggctccgttatctgatgaagactcttctagaatgcatgtgttttgtctagagcatgctgtagaggtagaacaacagcttcgtcaaatcggaggtgtccatatactactcctttgtcatccaggtgtgctgtgcttccaatactgacgctcttacaaagttacagatattataattctctctttttgctatcgtcatagaattagtggcatcaagattttgtattaccgaaacatgctaggatctgttaatggaaggacctatgttttgtgtgatcatctttatgtttcgcatttcccagtctattatgtttggtgtttttaccttataaagtgaaggatcgttaactccccgtgtcatcgtatgttatttgttttttgcagattatccaaagatagagactgaagcaaagtcaattgcagaggaactgggaattaattgtgccttgaatgatactacattcagggatgccaccaaagatgatcaggagaagatccagtcagctctggatagcgaggatgccatgcctaagaatggggactgggctgtaaaacttggaatcaatctcttttatagtgccaacctcagccgctctccactttatagtaagcagatgccttataattctgttatatacaatgcatttggtcgcacttctccaacaagttcatccgtgagatctgatggatttgggaggagatctgtcaagaaaaaggttgtggcggggaaatggtgtggtaaagtctggatgtcaaaccaggtacatcccttactagtaaaaagaaatcctgaggacgaagaagagagaggcatccttgcttgggctacaccagatgagaatcttgatagaaatcatgacactccacacagaaatagtaacaccatggttgctaaaaagtatgtgaggaagaggaaaatgaaagtaggaaatgagtcaatcaagaaagccaaatgcattaagggagaggatatagtttctgaaaattcaatggatgatgattctcatgagccccataggaggccttttggaaacaatcaagccacgcggattggaggtgggtcaacaaagaaaggaaaacaacatattcagagggaagatgcagtttctgatgattcaatgtatgtttctctcaagcagtgtaagaggactcttagaaccaaggtagccacttctgttgagacagatgacatagtttcagatgattctttaggagttatttctaattaccggaaccgaaagaaccctagaagtgagaaggccaaacatgtaagagatgcaggaatacaagatgtggtttcagatgactcacttgattttgagtctaatcagcggggtgggaggattcctaaaagcaagcaagctaaattcatggaggaagaagattcagcttcagatgatcttcctcgtactaatttgtataagcaacagaccagaatttataaaagcaagtatgctaagtccattgagagagaagatgacgtttctgatgagccagtggaggattatgcttgcgatgaagacaagagagttcttcgaagcaagccaacaaaatctcctatgcagccgaaaatgaaacaagggactgggcgcaatgtgagacaaccatcgtctcag

SEQ ID NO: 186388 - DNA, 1884 bp, Cannabis indica
tttgtttatttaggccaaaaccattgggttattgaccctttttcttcccaaaaccattggggttttggtgtcccctaacgtgcatggtaattctctctgaagcaggagagagaagagagcataattagaggaaagagaaaagtgatcattaatttattatgtcgttgattgtaattttaaatttgcatctttctgcttctcttttgatttcagtctgtagttccgaatgaaaagttaattgttgaatgaagtaggattttagaacataatgctcaacatatactctattgtgttgatacaggattttgggcaatgtgattcaaaaaaatgcacaggacgcaagctttcaagatttggcttaataaaagtaagtatccagtttaccatgggctgatattgtttctttaaaacttcaagtccaaattagaattatcctttttttttttttggaaaatatccttgtgttgttttatgagctgattattttttcttaaaaaaaaactaaatgggtcttactaaaagatatctctgatttaaggtacgtttaggaatgaaaacaatagaatataattgagaatgagaataagaatatgaatacaatttaatatgcataaaaaaaattaatacttttttttttttcttcttacattggtataggatgcgtttggtaacacttttaattagttttaattagaaaaataaaaataatttttcaaaaacatgttctataaaactgcttttacttttcaatgaagagataatatgaaggtttgatggaagaaaggtactgcgagtgaattgagagcattaagatggagctttcttttattcttactgaacaaatgtaactgctgctgatagaacaaccatggaacctggaagccattgatgcggggagaaaaaggagttgttcttgcagaaatggatgacaaactcattaatttttagaaataacattgagttatgtggcagcaccacgtggatgagctacatgagttgaagtgaattaggtagaagatatctattggggttgtatagagctctaaagctatagtattctgctaaaaaaatattaatttggaatataattatttaagcatcattggtctgtctgagttcattctgtcataagactcaaaactagagttatacttaataaatggagtcaaatattgagaatgagacagttgtggtgctcttacgttctaggtttgtgaggaccaagtggatttttattttaccgattttggtctgatttgatcacctacctattgctttattgagatctattaaaaaatttcattagtgggattgggatatgcattttctcagacatttgtactgattgtgcaggagttacgtgtgaatagtggatttggaggcattgttttaaggtatatatgaaactaattgtccagtttctccatacaaactgttacacatgcttttttctttggttattgtctcattttttttttctattaattgaacactatactctttaaatattgtatgaaattctttgcatattagattaaagaactttgatgaattccttgcattagttgatgcctaataataaaatcataaatatcatgttacaacacctcttatgactcattttgttgtttatggttatatgaatctgcacatgctggtatccttaatattatttttttcttcaattattttggttttttccttttgcagtccagttggaacacagtgtgtctcaagagaagattatagtttaatccatagaaaaggactagctgttgtggattgctcatgggcacgcttggatgatgtaccatttgtgaagctgcgttgcagtgcacctcgcctatgtaggagctttgattttgttagtacttgcagattttt

SEQ ID NO: 186389 - DNA, 2317 bp, Cannabis indica
gggagggggggcttcgacccttacttcttggagttagaccaccattggtatcccgtaattcgttacatcaataggataaatgagatagtcagaagcacatatcactttgttccgcctacatagactattagagtagatatgtttcttaaaatgaagtaccatggattcttataatatggtagcttttttggcagggaagatatttcctagtttccttgaggaagtcccaagtataatattgttagtggtctgaaccaaaacttgagcttcttattttattgttgtatgtattttttatttaatacttccacaaaactaagctttcatgtttttttttgtagaaaatcctcaaactctacagatggtctcctccataacttcttaggtagcatctccaataggtctgtagaggcacgggaaatgaccaagacttccaaatgaaaggaaagatcgagacagtcttcccagaccgaaaccaaggaatcagcaccttggccaaaggcttggagggtgtttctcgagttcccatcccagaatctatttcgagatctcagacttcgacatttgtagtggaaacttctatccatgaatccattcccagatctcagccatcgaaggttgttatggaagccaagctttagggagcagttgcgacaagaacactcctagtgatgcctttgcagcaacataccatgatgaggaaggagaagaggatgatgctgaaggggatgtctttaggaaccgcaaaaggtcaggttctgctcttggaagtcaaggtaaatagagcaagatgttggccaaggaggccctccaacagctaatggtacactggaagccaaagatagatgtaggtggttggaagggagtggagcatcaaagaacagagaagggtcacaagacattggaacctaaggacagaactttggacccccagtttaaaaacatccaatcaacttcttattctactcccgagatgcaaagagagaagatgattcttcctctgcttcaagcctttattgtgtcctttcctcttcgcccactaaagttttctaaagtggagtgtgtccaattagaagcatcaaaccaattgttctagaaggcttaggtagctgaggtcaggaaacgtactcactgtcattgcgactaggtgaagcactgagtgatgaatcttagttgttaggcttaaagcatctttttcggtcatggaccatcaagttattgctaagagaataaaaaataaggttggtagtgacctggtgccctttgaagctaaccttctagaccgaatcgcttcaacatactatagatttgcacagagaggtgggctaccatggctagtgaaaattcagcctttattgctgattgtattaaacatcaaaaagctagagtaagtgtatttaactttgcttaattttttttttctattttaatatttgtgtttctattttaatcatttttcattctttcaggtgaacatgttaattgagaggtgctccatggtggtatccatgatgtctcttgcattcgagactcttaagcgggagctagccatgtataacaagaagaagaatgaagcccgagccgtattgaatgaagccaaagctctggccaatgatttggtaaatcatctagtccaagaaaaggtcgaggcgtccctcaacaatgtcgtgataagtaacaaggaagaggccaggatggagcgtagatctaagtctagaaaaggtgccaaggataaaatacaaggagaaatacacaacatctcaatctcgagttgatgcattcgagtctcaatagaaaggtgccaaggataaaattcaagagttggagaagaagtttaacatcgcttcgaaggaagtagatcgactgggggaagtaattgatgagaacatcatcaaaattcacaatctagaaaagattgttgaacatcgatcttaagatagtagtgctgaaattgaagccaacataaattgatggattgttctagatggattgacttaatgaatttattaactttaaatatgttaagataaatgcttactttctgtttcttgaggctttggtttcaggtgatattttatactccaatacttattaataattcatattttgtaattttagtgagatacttaatacatggtacccccaagtgatttggagtctagactcttggtcacttgatacaatacaacaaaaaattacatgacttaatatttacttgaaaactccttctattttttattaaattatttcctgctctgaggcgtgaatggaataaataagaaaaataaaatgcaaaaaaataaaaatgatccataca

SEQ ID NO: 186390 - DNA, 2653 bp, Cannabis indica
ggtaaaatatttccaacactgtagtcatttacaaagtggatataataacgatatccatgtctagatacagttggggaaggaccccaaatgtcggagtgaattaattcaagaggatgctttgattcttttagtgaagctggataaggtttatggtgtgcttttccaagttgagagcttgaactgagttgtaaatgagaaggtaaaaacttcttttcattgattagaacatgtttgagtacattagaggaaggatggcctaacctatgatgccacaaacttgattcactagcagaaatttagaaacaagattcattagacctaagactatgacatttgttaggtgactttaggactggttgataggtagatttgtgacttgaagatcatggtactggtgttgtgagttgataaagaccattgctaagcttcccttaaaaaagaacctttctcgaatctatgtccttcaaaacacaagagttaccatcgaattcggcataagcattattatctctagtgagttgagagacatttaatagatttttggcaatgttgggcacacataatatgttatttagcttaactggtttactactggaattaataacagagttaccaacatgagagatgacaagtgattgtccatttcctactgtaatgcgggtcttaccattatattcggtcgaagcttaaatgttattggtattgtcaatgatgtggtttgtggatccactctccacatactagttaacatcatcggattgagggtgctggctagagttagctacaaacgcctgctgatttgtcccctgtgattgagtattattgttgtaggaaggattctggttagcattgttggtaggtgggatgaaactgacatcgaagcgataataacatttgctagtaggatggcctgatttgctgcagagctggcagatgacacgcccctggttgccacgccctctgccacggccacggccacaaaatccaaaggatctgccagagttagaaggaggcagatttttccttcctcgagcagcaaagttggctcaaggagcaacaatatctggtgttgtggtggagttaagtaagagaaactgcacttcagagagggttagttgatctgccctggaggtgagattaatgacaacagagtcatactcagacccaagtcctcccggtatatagagtaagaggtcatcgtcgttgaaactttggccttcagagttaagaccatctgcaatagacttcattttgagaatataatcatggataatcatggacccttttttgagagatagtagctgaaacctgagatagagtatgcgggcacgggattgagtagtaaacagattttccaacaatgaccataattcatatgaaatgcgacagcgaatgacatgaccaagcatggcctcaaaaatggaatttaaaagccatattaaaatagcttggtctgtgcgaacccagacagtgaattgagggtttactgctgctgcagctctgggtttatttcgttgggaggaacatcgatgtaaggaggaatgggtcttatgccgaataggaacccatccaaatcttgagcacacactgctggaatgacctgagagcgccaatatgggtagttctctttgtccaggcgaatggtgattggagctaggggctgcaacaagggcgcaggcagtggcaaagtagctggtgcgggtgctggagcttgaggaggagcttcaacagcttgagatcttgcattgttgactgaggaatcgcttggagatgccatacccgctctagtaccaaatcagaaagaaggatcgaacaagaaattgaaaataaagcagagtagaggcagagagacaagcatttatctgtgtaataatctttgtgtattttttctcagtgaatatacaatgtaattggaccatgtatttatagtacaaataaaggaatatttctctaacaataaaatatttccttgcacaatgattggctacaatagcaagggaatcccaagaatttagggaattctaggataatcttgaaagctcataattggagaaatatctagaatgccagcacaccaagagcacaccaagagagggctgatcaggtaacgtgaggaccatcttatattttaaagatgaagatgcaaattgatgtctcattgttaaaatataactctcatttgtgaaacatttgctctaaataatagctagctatgccaaatttaatacataataaaagttatgctaaatatagcccacaatatagtatgatacaaatttatatcacaataaatattgtacatttatatttagttttatattattttagtaatttaataattatatttagatatataacattaaataattaacttttatggcactataattattattattttatattatctataattattaaaggatcattaattaaatataaaaatttgcatcaacttctacaattatacattaaaacacaatgcttaaaattattaatacaaataacaaatatatcataaaacttttttttttaccaaatataacacaatttaaaaattttcattaaaaacagttttacatataataattaaatcaatacaaaattatacaattatagacgaaataattaaatgattctaatccttatgtct

SEQ ID NO: 186391 - DNA, 4046 bp, Cannabis indica
aaaaaaaaaaaaagctaacatttacttcatatacaatacaactaagtcatatacatacacagacccttctcttctcttctctctcccctctctcctctcttccatttcaccttccttttcacatccatttaagagattcctttaatggtcttttctcttccattggattgtacagatagccacctacaaaaaaactcatcacaatctttcatttcttcttgattttttttaggctgtttttctcagattttttttgttctttttcatttttatttttctgggactattattaagacatagaactcttctgggtctcttggcttttgcttgattctgcaaactctttatatgggtttgctatagaaaaagctttcttacccagttgtatatgccataaaagggttcatgagaataattatatttgcttaaattttgattttttttccctcactactttttttttggggtcaataaatttattattttttccttctttatataatatatacacaaatatatatatttgactctcccttcgttttttataaaaaatttctttgaatttcttctcttaatttgtggagaaaatagaggatgggtaagcaaggaccttgccatcactgtggagttacaagtgagttcttgttcctccatttttatttgttttttttttttcaacattaaaatggaaaataaactattgggttcttcaattttatttttgaagaaatattctagaaatggttttatatgcttacataaataatttgataactgggagataattactatgtgcaaaaaggaataaattaatcagctgggcaggaagtaaaaatacaaaatcttgaatatatattgttgtttgtaatgttctgttttgtatatatgaatttctgaactacaagtgtcttagtttcgttgaatgttttcactctattgagtttgaatctgttcataaattttaattttccatgctcccatttagtattcaaactttatcttttcttgtcttgatgagtgtttggctcacttttcactctcattcaagccttaacaagtgtctcccaatgcttaattgagctctggagtctagttgggtactgagaaactaaagattaatatacaaatttatgtttactcaaatgtacaatttgagtacaaatactaagccaaaccccatcgtttatgtttgctatgtgagtgtatatagcacaattgcaagcaaaatgtaacaattttagtgccctttttctgtgccttagctcaagtagcttggtgacagtgttgtattgtatcccttattcatttccaaccatttgttccattttgtcatttggggagtgtggttcttcttactattagcttgtgagttttggtccaaatggcaagaaaattgttcaattcatacccttttgatgtggaattgtattcgaaacaacttttcctatgtgatggagcacaattcattttgtagctttaagtagagagcaattctaatgttttgaatctctactcggttggtttttgggttattagtttgaaaatttagtgtggcagtggaaaatgtggctatggcttttgtattcaaggagatttctcatatctgtttatgacaaatcaaagcacattgaatcataattctcataatttgagtcaaaattgaatggaaggacatgatattctcccagttgcacttggatcttaacttctatcatgtattgtcaataatttgagcttaaaatgagacaagaatttatgagtttcgatatgtgacttgagcatacattgttgaaaactttgttaggggaacacacagacattgtcccaattcaagattagtttgagttgaaaataatgacaatgcagctttgtttattctcaaaataagccattacatgatccttatagaggttgagatggaaattaatctgtgtttgttatgctttacctgtactttgtgataattgttaccatgaaagtatttgatatgtaccaattgctaacaaccaacaatcctaacaggcactcccctttggcgtaatggccctcccgagaagccagtgctatgcaatgcatgtggttctcgttggaggactaaaggaacactagcaaattataccccgcttcatgctcgggcagagcctgatgattttgatgatcacagagtatccagggttaagagcatatctataatcaagaacaaagaggccaaactacttaaaagaaagcagaactatgatagtatggtggttggtggttttgctgctgattacagccagggttttcgtaaggttatggaagaagatgcaagtaatagatcaagttctggttctgctatatctaactctgagagctgtgcacaatttggtggaggagatgcaagtgatctgacaggttggatattcattaaaattgaaacttgtttagactcaactacatagttctcttgtttttgtagttgacacaatttagtgtatgtatttgttgagttcatagtgtcaatatttagcagtttattcatttcaatgaagggctgcttagattttaatactcagctgtagttgttagtaacaaaggagacttgaatgaagcttaaatgccaagtgtgttgcttgcatttattcaacttaagatttccctttaagtttgctatggtatgtttaagattaatatgtcagctcaatacattctgctcaatgttgtttagcagctaatagattcaattgccttttataggtccagctcagtcgaatgcgtgggacactacagtaccttgtaggaaaaggacttgcattgttcgtccgaaacaatctcctgttgagaagctgacaagggatctttttaccattttacaagaacaacagtcttcatacttctctggatcttctgaagaagatcttcttttcgagagtgaaacaccaatggtttctgttgagataggacatggaagtgtcctaattaggcaccccaatgcaatagctagggaagaggaatcggaagctagctcgctttcatttgataacaaaaattctcatagtaatgaggcttattcgcattcgacaaacctttgtgatagcaagggcattactttcactgggtctggaagtaagaaggtcaactttgctgaatatgggatggagcaagaacagtttagaaggtaatttactgcactagcttggattattgttgattgcatataacatgtacaaacatagtctagttagttgcacaataactcctcaactcatattcaactataagcctaatgtatatgttgcacatatgaagtgtttatgtggagatggcacgtttattatacaataagacataacgggaagaataggaccatgaaggcacatgtagtaaagtggaaacaccaccttagatacttgaatgtgtatgtgcacggctgcacgcgtatacttgcctgcagatagaattagcactttttctatggtagaaagaaattgttcttacaaggatggaaaagtataaccgtttcccactctatttctaaaacatttctgtgctttggattttcagggaaaagtctcaccatgaaatcttccaaatgttgggaagccataattcacctttgcgtcagatagatttaaatgtaagatgcattttattgtcatacttaccacacagcctagccaatatcaatttatggttattttgattttgattttcttttatcaaataagtagcagctgtaattataaaccgaagtaccgaactactcaaacatgaatcagttggtaatattgtttttcaatagttaagcaaccaccttcattgcatttattgattcttttaggataatgtggattttgaggaattcctaagacacctaacaaatgatgagcaacaacaattactgaagtttcttcctccaattgatgctgccaaacttccagatgggttagaatttttgtcctgactcaattttgttagataagccatctcttcttgcattatactagcgtgtaactatactgcggtatgatgggacgagagagtatcttccattcaagctgaataaa

SEQ ID NO: 186392 - DNA, 2985 bp, Cannabis indica
caatataataatatgcaatattaaaaaaattatataacttaattttattattatatatttttttaaaaaaaatgtgtgacaaatgtatttttacaatttttattagctaatttattatatttggtcattttcacttactttttttttaaaaaaaaaataaaacatttactaacttaggaggcgtttggttgggaggaatgaaaatataggaataggaatgggaatgggaataggaataggaatggaatggaataaaatttaaaatgcataaaaaaaattgataaaaaaataattaaattttttttcttgttacattggaatggtcattcctttctttttaaaatggaatagccattccaccaaaatggtggaaagagcattccattggaatgtcattccaatactttaaaatgcaaccaaacaaaggaatggaataaaaattgtttcctttccattccattacctccaaccaaacgccaccttaagttctaaatttagaactattttgcatctcaatccttttaaaaactaaattagatattaataaaaatactctaaattgtcattaaagaattgttgtcagatgttaaagaaaatactctccaatcaattttctaagctcatgtaaattgatattattaattttctctaaattgtaattttaacaatttgtaacaatttcaacatttagtgtcattcaattgataataattgtaataataataaacttcatagataggtgacaattagaaattaaaccaaacaataacaatatttagaattaaatatagtaattaaggtgatcttggaataatcttttaaaaaaatggtataaaatgttcaccaagtaaggtatttagtaatgaattaaataaaaaaagaaaagtatctaaactttaatctttttgaaaagtaatattcaaagtttcaaacataatgaaatatttttcatctgaattatcatcatctatatatcctatgtagaaaaaactaaatgttacattgtttctgactaacaatttttacaattaataataaaaaaataaaaaaaaataaaactactcataatttaataacaatcaatttattaatatgactgcattgataaaaataagagaattagtagcttacctcatcaatcatgcaatgtatatgtgctgtgtatttgcattccacacaggtataaacacgaaattctggattcctttcttcttcgcatgcatcacaataatatttatcgaaatcctcatccatgattgaatcaataagaatcaaactgtgtatatgatattcatatttaatgatatatggcaatggaccacaaagaaaatgaaggttgtaactacattccatacaacgaaaaaagaatgactgagtttgttgaacttcatgacttttagccaggatacttgaatcatcattatcactcaattcatcataagacttaagacaagcatcacaatgaacactgttagatgatgcattttccactaaagaaagtgagtggtcatggatttgacatttaacaattgtacaaagatttgcacattctgtacccaatttaaagttgcatccattttgggtacaactaaaattgagcatacaatctttcttgcaacagacatcacaagtttggggtttactaatttgaagtttaagaggattgtgtgaatggaaaggatgttcgattttttgtggaagatttgcacaagacttatgaataaaatttgtacacgtaagagttgtgcaagaataagctggtatggaccatggtaattgacatgcaaaacaacgattactattacctcctagagcatctttattagcaccaccaagctcaacaagaatcattggattttgatggcaagagaactgaacaatgtgatgatcttcatggccattgcatgttatggtgggcaatgggattgaaccacatgtgatgtgaacgtagaaagcacaaagattgcaagtataagcatattcatgatctcccaagggcttctcacaataaaagcaacaaataatgctttcatcaaatgatgatctcttcctaatgagggtgagagggtgtatatcatgtaaggagttgttaatatactgaggcaacttagcacatcttttgtggatgtgatagtcacaaccaaagcaatagtaatacttttggcatttaaggattaagcaattgcataacccacaactcatttgtatgtcatgccaccatgtatctagatacaaaatatgatcgtgactgaaatgttgaatacaatacatttcttccattgtattagtttataattatatatctcccacccacaagttaattaattttcttttgtgaagagttttaagagacacatgaatatatatataaatgtccatatatacactataaatattccttggtggtacctccatcaagtttctctacataaagtagaataaaattaaaataaatcttatattttcacaattgcaataataatattaacattttcaattttataagaaattagtttaacaaatttagtatagggtgattatatttgcacaccataaattaagaaattagccgtgcttcgcgtacagttgtttaatttttttcttataatattaataaaagtcttataaaaaaataaaaataaatgtaagttatcaatcgtaatcttaataatcaataagtttgagtttaagttaagctcagaaaatagaaaaactaataagtttcgttataaatgaaatggaattatgttaactaacagagcaattgatttcgattagatcaaagctaatgtaaagaattatatctcgtaatataatttatattgtttagctaattttcaacaacaacaaaaatcaactaagattatttcattaaagtttggacaaacgatttaatcttatttaatgttactttacattcacaaacatatctattagctaatgtttgaatgaacgatgtaatcttagggggcgtttggtaactac

SEQ ID NO: 186393 - DNA, 2404 bp, Cannabis indica
aaaaaataaataaaaatactaaatatagattgccttttagtttagttataattgtgaccataaataatgctctctggcaaattcataaattttgaaaacgacttgaatgtagaacaacttgctaccatcatcatacgagggacttcatttttatcacaatataaccttctggaagaactttggtcgctttgcaagatctaaatctactataccatctaataaaacaataagttgctacaactgataaattttcgtctaaattcaaagtcaaaatagcagaagatctaaacatggggacagtatacgaaataaacacacccacattaattccttggaacaaaaccaactaatcaaaaatcacccggcattcactttgcactaaagctttaaaactgaagaatgaaaaccgaccgaagcattcatttcaccacaaacaagcagtgtcaaacgcaccaacagcaatgcccactttgtacacctatagctaacactgatcagttctaataaagttcagcagctaaaatttcatgtttgcatagcttcagcatggtaactatccagttctttgtcaaggtcatcagcagacttctcaactggtttcttctttccacgagcgccgccaccaccaccaatgctaccaccacgcccacgcccacggccacctccacgtccacgtcctccaatattactaccaccaccacgcccacgaccattcctaagtccactacgacctcgttgactggcgaatccagaaacactaaaaagcaaaagaaaactagtcagaactgttcagatcgaaaaagaaaaggccagacttaacatatcatattatattactcagactttaagtcttaattagtactcttctaaagcacttgcgtctgtcctcaaaagttttccatgaactaacataagcatcaactaagttgattcacatagtcaaattgtcgggtggggaaaattcagcaataagatatggtggctttcaataatagacttgacatccatcagttcaataaaagacatggttgcagttgtagatacccctttgcctccttgacaaatcatgacaactgtcaaatcaaatactacaacattttcaagcttttttaaactatccaagagtgaagacttgaaggaaaaaaaacacttcctcgaatcctcataaagctactaggcctaggcaggtaaattttcaacagtctggcacatgacattaacacaaggattgttgaacatgataataagagatgatgaacaatgatgacaatattaaaagagttgatctgttgtttacattaatcgttaatttaaaattcacagaaggctctaaaaacagctttgtacgaatggcaattactgatcgcaagaaaattagaaacgttcgtactaaccacaacccagttcccattcagaaacatggaatttgtatggttttacttttttatataaagaaacaattagtaaattacccacttttaaattagacaaacacacccaacaccttgagctagactcgagtggcacagctaggaatttccaattattatacgtatctaaaccttgaggaatcagatccaaggtccatgtgatagcaaggcacagggccaagtggctaacaaatcaactaattcctgacaacattatgttactaactttatattttctacaacagcatatcaacaaatctatctataactctcattaaaaaaaattattgtctacaaggagtacacaataatctagaaaataaacacatccaaaaagatccaaagttaatcaagtttttattatttgtattagcactcccatcagctactctactatatgctacaaaatagctcaccataaccccacttcctttattttacctcaaactattacatctacgctataaactgcattctctattttttccctatatcatttaaatattatatgttttttaatattattttctttaaaaattgaggtaatagcaaatataggtcatctgatgtgcggatgttttgtccattttttcacattgatctctattttaaagaaaatagcactatagctcatctaaagtaagtgcctcagtatataaaaacataaacaaaaaatgaaatagttacccaggaccacgattaaccataggagggccaccagctcgaccaggtcctgacctgcatggtaagcaagtgtaaacagtaaaaaaaactattcaagcaaacaacatcttgggatgtatacgcaaaaatagattctgaattgcaatatacatgcacaagatatgagcttgcagataataaaaataataaaaaggagagaagcataaatggcagagaaaacatgggaaaagaacgaaacctaaggacttaattattgcttcagctgcaattttcaaaaaaatataattttc

SEQ ID NO: 186394 - DNA, 2680 bp, Cannabis indica
cacaccaaatactaaaattatcccttaaaatattacaaatatttatactaagaatactatagtatcttaataaataattttctttccatcctcacactttttaataccaaacaatacaaggaagagtcactaaccaattacgtaacagttctgatactctccttcaagataaagtgtagagatattcataacactcattttggacgataaaaacttgaattgtgtatgaaaaagagccttagtcattatgtttgcaatgttgtgccgagatggaacatgtgaaagctttattcgattcttggtgacttgttttcggataatatgacaatctatgtcgatatgctttgtgcgttcatgaaagacaacattctcgaatatgtgtattgcggcttggttgtcatagtaaagaagagtaggttgggagtgttggattccaaaatcatagaggatgttgagaagccaaataagttcgcagttggtgttaactaaggatcgatactcagcttcagtagatgatttatatacagtggtttgctttttagattttcatgatatgagggattggccaatgaatatgtagtaactagtaattgatcgctttgtatcagggcaagttccccaatctacatcagagaaggctttaagatagaaagtttggtttgtggggaactgagttgggttatttgagtgaaaaaatagaccatgtccaagagtgcccttgagatattgaaggatgcgatatccagccttcatatgcggttgtcgatggtcactaaggaattggctaagtcgattgactgcataggagatatcaagtcgtgttattgtccaaaaaaggaacttgcaatgaggcttctgtatgaagttgagtctaaaatagggggtcccacatctttgttgaggtgtagatttgtttccattggtgtgtagacaatcttagagcctaatagaccaatttcagttagcacttgtaaagtgaaaggtctttgagaaactaatatacctgcgttagatcaaccaatctcatctccaagaaaaaactgtaaggcaccaagatcctttagttgaaatttagaattaagaaaggttttaaaagaagtagcatctagattatttgtgcttgcaatgactatatcatcgacattgaccaatagagcaagaaaactagtggaagatgaacttatgaataaggagtgagcataagcaaattgagagaagccatgctcaagtaaggtgctgctcaattttgtaaaccattgcctagatgcttgtttaaggccgtagaggcttttatgaagtttgcaaactgggtttagaggaagctcccccacatgtacatatcctttatgaagagacatataaacttgttcattgagttctccatggaagaaagcattatcaatgtccatttcgtaaagtgactagttgttaatagcagctagaataaggaaaaattttagggcattagtgcaaaattttcaacatagttaataccatgttgttatgtatatccttttactaccaaccatgccttgtgttaataccatgttgttatgtgtacccttttactaccaagcatgccttgtatatgtcaacttcacttttggaattatattttgttttatatacctatttgtttccaattggatgaaagccaactggtaaagaaacaactgttcaagttttgtttttttttttaagggcaaagaattctttattcatggcattaagtcattgagtcaattagatatgcatgtagaatagcatttcaaaaagaggttttaaacttgtcatagctgagatattcaacaagagaatgggcagtagaagtatggcaaacatagtccttaaggtggctaggtttgcaaatttgtctccctgctttggttattggaggagaaattgttggtgattgtactatagctgtagggactatgttattgagatcaactgctaattgtgttatatgtgtggagaacatgttatttagatcagatactggagtagaatttgattgtagattctagttattggtctgaacatctacaatattgtatgcatgtatggtgcagagggaaagaaagtgtctagatgttgtgtttgtatggaacctttaaaaggaaaaatattttcatcaaatatgacatctctagaatgaaatatagtattgctagcaatgtcaagaagagtgtatactttcatgccattgggatagtcaatggaaatgcaagcataaaatcttggtgaaaagttgtgcattttgcttaataaggaagaagcataaacaagagaaccaaaggttcttaaatggttaaatcaaggaggtttgttgttcaacaattcaaaaagggtttaatattgcaatataggtgtgaggtttctattgataaggtatacttcagtgttaatcaaatatggccagtatacgaaggctatagaagattggaaaatcaaggctcgggccacattcaggatgtgttggttttttctcttaactactaagttttgttgaggtttataacacacggattgtagattttgatacctttttgagtatgaaaggaagttatattaagttcttttgcattcttacacctaacaaccttaatattgacgtaaaattgactatgcataaggctatagaattgaggaataaagtgttgcacatcatatttggatt

SEQ ID NO: 186395 - DNA, 1240 bp, Cannabis indica
tatatatatgaaagcatcaacctattgctctattctcaccaatctatacataaaaaagtactacgatccctcctagtagtacaaatcttaattaattatgtataaatgttaatttgtataaaagaaccgccatgaattgatttgatatcgatcgttccttttagctttgttaattgtttattgttttgaactttaacactttgtatatatgtacaatgatgaaaatatatctcgttatatgtattttaaggaaaagaaaattcccacctgtattaggctttgattaactccaacaaatcttaaccaaactatacctataaatataataatatatatttgttgctaattatattaagttataaaatatgtttgtgaggttagtggaagcacatggggaagtttattaaaattaattataatataataacctgaaagtgtttaaattattaattgtacgtgattatttgtagctagctaagaaggtttaagtatcctaccctacaaaatgattttattcttctaagcatgcattcccatcttataatcacaatagtattgtataattattattattattattattataaacgacaaacaatataaccttcttatctctttttgttcctatagtctatatatttgagattagattcaactttggattacacaatattattatataaaattgaattctcctttggtaaaaaaataaaaagaatagtatgattacgatctatggtcacagtgacatcactatttattactactctattattataagttacgaatttatatacgctagggagtctcattctctgcaatagtacgattgaaaagcaaataatagaatagtttcagcacttataagttattgtgtgtgttacaagacaggtaactaatccaactttttctttttttagggtaactattaacccaacttgaaaatatattagggtatataataaagtcaaacttacttatataatttaattaaaaaaacaattcattgtagagtgaggaaagtaggtacaacactcacatgagaatctataattgataatttttgaaaaatttaaagaatcaaactaaaaatttaatacatcacatgctttaattttttttaaaaaaatttactttatatttataaaatattttttattattttaaatatattttattaattatttcaagttttaatttttttatagttaaagtagaaagtcgatgagagtgattaaag

SEQ ID NO: 186396 - DNA, 6159 bp, Cannabis indica
tcattagcaaaattaagttggttttccataaggacatatctcaatttcatttcaccaaccactcaactactcaaatagtaagtaaagccttaaaattcaaggtgtacgaaaacatttaactctaacaagctcacaaacaaatcattgtttggtgggttctgaattttcgaatgaaagaaatatgactaaaactaattaagactaaccagattgaatacagaacattttggattagtcaaaatagtaaccatgcataaaatcaatattcaatcaaattcacctctatacagaaaaacagaaacttgaaaagtcaaaagggattcccatcatcaacattattcaaaaataaataagaaaaagaaagaacacggaagaagaagaagaagaagaacagcaaaacagtatagccaaattcaaacgattgaaaaaagacacacacacaactaaagccaaaagtgtgtaagcaaagcagcaaaagaaaaaagaaagagctatgtatatatacaaatacaacagaacacagacgtacacaccttcagcgccacgatcataaaaaatagtcactatcgagatataagatcaaaaggagtaacttttaagtaaagaacagagaaggaaaagaactccaatggcatgaaacatgaagtttggcagtgagtcggtgtgacacgtagaagagacagaccagacccaattcgacctggacttgggcctgggcccggctcaacagaaagataagcaagacgttattgatgtaaatcccgtagcgtgtcaacgtcttatttatttattttatttcatttttgctaatgtgtcttttgctgcacaattttcagcgatgaagatgacagttaggttatggagtttcagttacgggcgtaagagaataatcaataaaatttgagtttagttgtctgaataaagaaggaaatattgaattttgatggttaacgaaggttgaattgaatttcagaaggaaaataaagctttcattattataattttataaatactccttaattataaaattttaccacttacaaaataatcagaaaagtatatttcaaagtttgatttcgaaaaatttgttgtcattttcacttctctttctcaccttctcatcccatcctagccgctctctccgaccatccaccttcatgaattatcaccacattcaatcaagtttttcagttaaaatctcacgagtatgcattaccacaacaaagctccgcgttgtggtggtatacacctctcatacctaatagcagtactttaaaattttacactcatactgtgatttttcaaataataagtctcacatacaacatttgatacattttttaggtgagcatttgagatcatgagctaataaactacagcgaacttttgacttttgctcaacatataagtagtgaaatagatcacactgtaaagatcgactttgatgtgctaaactaaaatcactaaaagaaaaaaacttgataattttccaccaaaaaaaaactgctatgtttagaaagaagcataaccattgtagtagcaaccaagacaagattacgtagcctcaactctgctctaaatcctccgtctatcatttctgtactgtcccaaacatctaaccatctacaactctctcttagcactctccttttgttgaattacactctccaaagctgcactcttgtacattctgtgaattgatcaagttcgtgaatcttgttaatctttgtcaacaaacgaagactcagcaagatcaattgcacgagcaagaccagctgctttgttttcacattctctctgctcgtcgcctggatcgctgtcagccacaattccagctccagcttgaaggtgagctacccattctcggcgtttgtttacatccttgtaggaaaacattgtatcataacgagtgcttgttgggaagacaatggttctcagagcaagggcaatgtccatgtccccgttgaatgaaatgcccccaaatccgccactgtatgcaccacgtcttgtcacttctagttcatcaattagctccatggctttcacctaaatttcagcagagacaatgcaattcaagatgacagtaatatgggtaagtcacttaccataactgtgtgctccagaagtttcaaaacaaaagatagagacaaggctttgcaaacaccacgataattttcttctgaaaatcaacgttaattgctggattgtacaagatttaaaaatacatcaactcattgtggctttgaaatcattctgagaaaacatatcggtgtctttgcaggccctgtcattatcttttatttttaaagctaacatgtatgactagtagtatgagtaagagggaagagtaatttcaatcaaaacctttggtgctccactgactgtgccaacaggcaaagccgcacgcaaagcatcccagcttgttaaatcatctagtagctcaccactaacctgcataatgaaatgaaataaaataaaccaatcaaacacatcttgttctcaagagtatgatgtagtgatatgaagtagctacacacaacacattccatgtgccactttcgcaatgtaacaaatcatgtgtagaaattcctgttcatcacaatctatgtcattcagtaagagagataggggacttacagtggaactaatatgcatgacatgggagtaccgctcaatattcatgagcttttcaaccttgacagaaccagactttgagacctgcagcaaagtagagtacatgattccagctaccaccaacaaatacaaattcaaaggaaatcatgcagatagtaaaaaggaacgttctactagatacaggatcaaaaagatactaggtgtacaagtaaatgatgtacctaaaagttttccactttaattgataaaaaaaataagcaaagtaccttcccaacgtcattcctgcccaaatctactaacatgatatgctctgctcgttgcttttcatcgttcaaaagctgcttttccaacattaggtcttcttttggtgtcttgcctcttctaatcgtcccagcaagaggccgattagtaattgttccctattggacaaaacaagcaacgctggtcaagatgcagttagtaaaaaagacaaaacaatataatgaaaaccacaataaaccaaataataagacgaattttaatattgttgtaatgttgttacacaataggagttatattgatgtaactaaaaaggaaaatcaggggagttaggagagacgaaaatcagagatactggacaattcactagatctataaactaaccttcttgacacgagtgagaatttcaggacttgaagcaaccagaatacatcctcttgcctgcttgttgtggagtaatgttcatgtatcctttataaggtcaatcttaataataaacaaaaaacaaaaaaaaaaaagtatgcaacagaacaagtagtcaaacctgcaaataagtcatataaggacttgggttaacaatccttagtgctctatacacttcaaacggatctgcaaatgttctccgttcaaaacgctgacttaacacaatctggaatatatcaccagccaagatgtgttctttggcttgcaaaacagcctccttgtattcctcacttgtcatgcttgagttttccagtttaggaccgaattggcgggtgtgcaaatttattgaacctgcaggaagccttgggctgaaatagataataaaaattacatatttgaaaaaaaaccatcaagaagaatgagaagctttgcactagtaacctagcccaccagtgcctaatccaaccttacacttacacaggcaaaagtaaatatgtaaatattgggaaagaaataagggtaaacaggtagacttacgtgacaacatcatgtactctagatactaaagcttccaatctgttcattccatcattaaaggcctcatcaactgaagcatatcgatctaatctcacccaatgaataatatatgctttctgaggtcaatgtcaaacatataaagaatcactttcatacaaagcttctaatctcttctaatgaaaactggtcaacaagcaagtgaattctcgtatttcttctagtggagtacatattgcttcacatcaataccacagagtaaagcatagaagatattgctcgaaaaaagcatggaacaaaacttcccaaaaatcattcaaatctgcatgaatttcttttgtattttctgctccttgacaataagtaattgtttagagagtacaagaaatctaaaatgaaatttcaacaattaaaaatgaaggaatcgaaatgcatgaaacggaagatattataatgaaagaacactgaaagagataataagtataaaataccttctccacatgatcaaaaacaatcacatcatcataaaggcctagatgaacatctggaaggtttctgtcatccagtggagcagaagaaaatggtagttttttcttctccgcataacgcactgtgtcatatgagaagtaaccaacccacccacctaatcaaagagtaacccctcattaagtcctccattgcctttaatattggagaccaacgtatctatatgacaaatacactaaataaaactgaactcaacccaaagtgtgccgattgagaatagctagagccaacacaaatgtgaaaaaatatgatctgtgcattttaattatacaattaagagtaacaaaaaccagaaaagaaaaatatatacccgaaatacctagcaatgtactttagtttcatgcctacaattagatgacagtggcagaatttaatgcctcagaaagattgaaggttcagcaagaggaaataaatatcaaagtaattaatttttgtttccgttatatataataataagcaacataaaaggttttccatctggtgatcttaccacaaaatgcttctgggagttcatcaaggagctgaggtgtccacccttccataattctacgaggaacagtcattggatcttccacgatctcctccttcctacacccttcctcatggtccataatagttaccatattctctttcgctacaatttcgatggttggctgagctccaactacactgtaccgcccctaaaaacgttaaagcataagaattgaatgtctacattgggggaaaacaacacacacatacttgaacaagactaaaatactcttacaatgctagaggcccgcaagcccggctcaacagactcaaaaagaaagcttggagcatctctgtcatcctccttaaccaaacatcggtatgcaagaaccggagttagatgatccgagaatatggtttgatacagaggaattaaattcccctttttagaagcttctaaaaatcgttctgactgatcaactgaatgaaatgaatcacagcaatcaaaacccatcatcgaagaataaagaaaacagtcaacattgttaacttcagtaaaagtatcaaatactaatatttgtaaccaaaaccattatatattttgcctgatgatacaattaaaaaaagtacaatcttcaaagtaatatatatatagtcattaatacaagttctcaatccaacttctaaggaaaaaaaaatatcagaaacgcaagttcatcttcatcaaccagccggaaccagagaatggtaacatagatcactttgaagacaaagaaagttaaagaccaaaaaaataaaattttacctgctgaaagtgatgataacgccatgcatctgactgtacgggcacgcgagcaaaagccggttccagtaagagcaagtgagctggagactgatctgccattaaggctaacggataccagcgacggtaaacaaatggctgaagtaagctgagaagatagggtttccatggtgcgaaggaaggagaagatggcgttagttaatggagtttgctgagtgaaagaatggctcctctccggtcaggtggtggtggtagtggctcttcgagctcgagtggttcaaacgatgagatttgacagccgtgattttggggccactaaggtccaatcaatgagcctaggccagtttcaaccagctaagtcaattgggctccttctgggctctttctccaatctatttcctgggtcggtttgtgctttttacaaaaataactattttttttttaagattgttttttacattttcaaaattaaagtggcgtttggtaacact

SEQ ID NO: 186397 - DNA, 3080 bp, Cannabis indica
  modified_base (35)..(35): a, c, t, g, unknown or other
acttgggaatacacagctggatcaaattatgaccnggaaaaattctttccccaagtgaccacctttgagagattatacgtaaaacaagaagagcagaagcagagctacaaaacaatttacaaaaactttgtggcagttttcatgggagaatccagaggaaagcaagtctcatcaccaccagtgctccataggaaattggcgtatttagaggcatggtaagagttatttgactccattgccatagcctgttgataccgctcttcagctccccaaaggtcttctttacaatccacagaagtctgcataccggctcaaagcctctgcatcgggtggctccgcctccacagcacgccggaagcactcctcagctcttcagaaacatcacaaccaaccgtagttagtgaagttggaaaatgaaaaatatggcaatgattgaatcaatcattcattgcaaaatacttattgaacagtgacttcaatttactaaaagagtaacactaaggtaatgttttagatatactgtttatcccagaagatttaaacacttgatataaagatttaaattgaagcaacataaagcaaaagaagataaggaagctcacctgttattgtcatggtaaacgagatagagaaattgtgcataattagacagtagaagaggattgttgtgttcacgagctagacctatctggtatgacagatcagttctgaagtggtgttcataatcatcttgttcaagctgcacattaaatggagacaccaattgttgtaatgtttcttgatcaagggcttcaccccatgattctgcttgcatttttaaagcttcatccaaaaatgagtcccacaatttaatctcctctatccccaaaaatggaaccccatttctattgtcatttacaaaatgagggaactggactgaacccttcgttccaatcccaaaggaatttgctttgtccccattataagaaggcagagacatagccttgagaacgaaaacatcaccaaacctggagacctcatgattctcattctctgatgtggaattagtttcactgattcttgatgacagaattgatccacaataaacgttatcatacatagattgtacaataaaatttggtagaaggatcatcaaatagatcatgagagtaggcgttcgagaaaagacattctgaaagagccaaacaaatgagacattcatgtctctctgcatcttggttataatctcttgcaaatcttcatcataaaggttttcccttaagctcaaagcacaagtctgaagctctcttaccatgaaaaccatacaagagaaaaccttgctgacagagcagtaggtggaatcttcagtttttctatatttctcttcccattttctctgtttccttattatccgaagagacaaaggaagttcaatgctgttggcctttctttcaatgctagctctcacaatttctgttctttctggccatttaggtggttctggctcaataccaagcagtggaggccgtgaagaatcgaacttgaaactcgaaaatggaattggaaaactgctgtttttgtaattttctccatttgggtacttcaaattcagataaactttagtgctttcatccttcttttccacatcatcatgttcttgttcatctggaagactgagtttttgaggcaattcttcaatctgattcgaaaactcttcatctgagaaatcaccaaaactagctctacaaactttggaatgcctcaaaccaaaagagtcccaagaacgaagtactaatccatgagccaaagctggactttttccaataagtttatttggaaaagaaattgcaggtacttcggaagaagaacaagaaaaagaagaacgagaaaggggaactctacactgtaagctttggcctatcattggtgaaaaaactccaaatcccattatcttattttcacaactaacaaatagcttaaacaattactcctgatcaataccaaaaatccaccaaagaaaaggaacacccctccaaaaagaaagaaagttcctttttttttcttcctctgctgaatatttatttcaaagaataaaaaagaggaaccaaaagtggtaaaaggatgagaagagaagaattaaatagaagtcaaaatcaaaatcccatgatacccgtgtgaaaggttgtcattttaactgtctcaaacaagagtgtgatgctttctttctttctttcttataatctaaacccggaaccatactccatagtccataccgtacgaggtccaaaaccagcctctacaagtagcaattcaatcccacctgaaaaaaaaaagagaaaaagaaagaaaaaagatagcagggataaagacccatttagtcagagatcacgatctcatggcactatttgacaaaaacattatcagtctattctcaaataataatatcaatatcaaatctcctcacaaatcctattatatataattataatgtatatacgaaaaagggtaaaggagaagaagagatatttatcaaatttaaatgataaaatttgaaggtagaggactaaaacactcattcttgattttaaatagataccgaaaaatgctaagttggtgatgaatgtggcttccttacataggacaaacgtacccattacttcacctttatctgaaatatatattttattttcacacaaagatatgagatttaagtttcaagaaagaagaaaacctctcaatatttttttttgaagaaaaggagatgaatattaacaaaaaagagttacaaaacctaatgaacttttcagtgatttgttggccgcacgaaatagacaattacggtgcatgcaaaagggctgtcaacacgtgtgaagttagatggcaacggtggtggtacacgtggcttcttgtccggtagttcacgttttcgagtgtgaggttcaattcaactttttcactacatgggtggactgactcagtaaacttcacaaatattgatgaaaaactacagacattcattagccttggggatggacacctagcattaacattttaatttttcttgttttctttcttacaaataaaatggaaaggaaataaat

SEQ ID NO: 186398 - DNA, 944 bp, Cannabis indica
ttattttttatttttttgaataagtactttaatgaggagatatgctgtctattgggaatatagagttttattactaattaatctgatatatttggatgtgaataacattgtgttttttaccatgcccagttatgttacatatttttcatatatgtatttttacctctatcacgctctggtatttattgatctggactaatttgctaaataacaatttggactcatacaagggggaccttttgggggttttttttctcctatggcagtagcctgttttgaaaatttaaatatccgcatgtgcttctcgcttcttttttaaagaggaaaacattgctatttttttttggccataacagattgagaactttgatttgtttgatattcatggttccatatttgggttttcctctatctgcagcattgtgcaggcataaatagtttggcattgttgaagactacagtatttgatgggtgtgattaccttttcactgggagccgtgatggaacactgaaaagatgggcactgggtgaagatgctgccacttgctctgctacatttgagtctcatgtggattgggtaccttctcttgcttctacctagctagctaacagtgatttccttagctgtccatgttaataatcagaaaatatttattagctaatgttaagatcttttccttaaaaatgaaataggattaggtttgcacatctgcctaagcctcccctcttctttgcttagatgtatgttccaatacttacagaaagctttttcttgtgcaggtcaatgattgtgtacttgcaggagacaatacacttgtttcttgttcttcagataccacccttaaggttcataattttgattttgctaatttttgtaatactgcaatttcactatatattgttgatgaatgtagtattttttggtgtttattattattattatt

SEQ ID NO: 186399 - DNA, 671 bp, Cannabis indica
tatatatttcattattgccatgcatttttctatacttgcacctaaatcagttacaactatgtattattcgggtttctgaaatgatgacgtctacaattccaaagcctaatactagttagattggcccaaacttgggccaaagattaagtcaagttgtgatttcgatccggacataagcccaactcgctaacctactaaggtctgattccctggtccgaaaaaagaccatttggcccaaaagaaaagagtctcccaagacaagtccaggtaccttcatgaggcgatttggacatgggtaatcaaagagtcgcctagatatcacccatacatctcctttcttggaaccctctagacacggggcctcacagtgtcagagtttgtcccctacatcatactggcaaaatgcgtgcactaccaaagaaggccacatttttgtccaagaccataatctctgatattctcggtactgatgcgactttgcacgacacctaacatcctcaaatggtccccatttatatggacctggacctaggaccaaacccgaacttgggattggaccgaggacccagactcaaacttgggacctatacgtggattgggactcgagaccaaggcccggaccccgaactcaaactcgaacacggactcaaaccttgacacgtactcggacc

SEQ ID NO: 186400 - DNA, 1809 bp, Cannabis indica
atataaataagaatatacacatcagccgtcgtcatatttcatgtaacttcatatgtttatctactcttcttctgatggtgatctcgatccatcattttctgatccacaatttacacctacccgatgaaatgacaggtatactgtatactagctaactggccagctgcttcctttttgtttctccaatttataatcatctaattcaacaagtgttagatgatgaaagatagtgaccgaaaagatattgatcttgcaataattttatcaagatgtatacgttttgttctttttatatatatgtatatataatattaataacaacaacaaatcaagaagtgttgccgagcaaatctttattattattccctaatttctctatattaaggaagcattaatagctaccccgagaaaatataattccatcatttgatttagtagtatatatttatctaatatttatgaagtactttgttaataattatctaaaaaggatgagagtcggaaaagtagtgtaaatattattactactaacttccatctccattgagtttaagggctctttattttgtggttcagtctctttaaggggatggtgatcatgatgatgatcattgtgatcagaataaggaaaggcaatggtaagatcaagattaattagctgtttgcgattgtgattattgttatcagaagaggcagctgcagatgtttcatctgagtttgaggcatgggcgttgattgagccagaaataatattatggctgttgtgaggatgagtggttgtagcactatgatcataattttggttttggttgaccttatgattatttggatcaattcccaaatttatgagcttctttcgtaagtgagaattccaatagttcttcacctcgttatccgttctccctggtaaccttccagcaattagagaccacctaccaatccaccacatacaaacttttattttatttttttaccaaataatatatgtaaactcaattgaaacaaattaagtaatatgtacgtaataataatttacataacaacctagctaataattcgtgtaatgtttttttatatataaaatgtataatgtatgatttacaagtaatttatacatatatattatgtgtaaataatattaattattattaccgattgccaaggagggcatgaagcttgataatgagatcctcttcgtcctctccaaagttccccttttgatgtctggtctaagatagttaatccatctaagcctgcaacttttgccacatcggtgcagacctatatatattgtatatatccaacatatatattattatacacgcatttaattaattaataagtatacactacataaagtttcttctctttatttttactttttgtaaaattaggtgacatgacaaaatcaacttgaacgtacatcccaaatgatcttcatatattattataacccttgaacaatttcaaatatttatgtagatatatatatattaggagttataatatggtgtgtatgtgtgattattatacgtacgtacgtacctgcagccttggggagtgagcgccaacatccttcgccgtgagttgtgatataatcaatcagcttttggtcttcgtgcttcgaccatgctcccttgttcgttccatctttatcacagcaaggttttctcattctttatgtgtgtgtatatacaatatgtatctacctcagttttaattttctgtaattgttcagcagaaagtctggcagaggcgaaatatgctcttctacatatatgataggtatttctataaatatatatatat

SEQ ID NO: 186401 - DNA, 7386 bp, Cannabis indica
agagagagagagtataaggggtgtgaagagagcacgtgcaacatcacgaggtgtgaatttagagaattatgacaaaacaaataaagaagaaaaaaagaaagcgttacatatttatatgaatatgtgtaatgaagatgaacatggaaaatgaaaatgatgatgaagaatattatagagagagttataagaaggaagaagaagagaaaggaaagttgtcattatttgaagaaaacaaagaataaaaacatgaaaatataacgtacacaaacttaacattaaatccccctcaaaccaaagagcatcttcttcttctatatattctcttacctcttaccatacttgaacaacaacaacaaatatatgtatatatatatatatgttacattattacattctctattcttatcacttcttcacattgtttttcttttactctctagactaatccgcctttcttctttctgatctctctctctttcatcgtcacagtgttattcaggtcatttctctctctctctttcctttttcatatcatggttttacaatatatgcctatgtttttctctctttgttaatgttattcttgttgttcttttttatatttttaacttgattcttagatcctttttccttgttgagtttttgagtggtgaaaaacccaccaagattgtttactatgaaaaacaaagaaagagaaggaaaatgttatgtttttttgtccatgtttgtttttgtacatagtacttcttcttttgtttgaatggtgaaaacaccacctaagatttactatgaaaaacaacgagaaggaaattgttttggtcttatttggtttgagaaagaaaagattagagaaagagagagttacatatagtacttcttctctatgtttgtatactttcaatctttcatgtagagtttgtttttattctaagtgttttgttgttccaactttgatgatttttttcctcaaaaattttagtctagggttacttgttatcactccttattactaacataaatgaagcattaggtttaaccatgttcgatttaaacttgtaacggtctagagatctagcttttcgcaagacattattcaaagcaacacccgcgaaatctttttttttttaatgattttacccaattagtttttacctttttaaacatgttgtacgaaaagagaaaggaatctgttattaactggcgattattttgtcgtctttcggttgatttttcttttagaatatgaatctaatgaatttatgaagaaaatggcggcgccggttacaaatttcacgaccattataatattactaaacataatttgttttgttaaagcgttattgcttatctacatctagaaaactaaccaatattgtagtttatatcgaatgaaggatcttgaaatatgaaatcaagatccgatctagtaagaccgaagaaaaaggaatctatagggtttatagaagatacttttatgaaatttggttcctcgcctaactctataatatatgatgaataaagatcatttataattgttctgtatctttactcaggagggactcgaacctcagaccttgtgaaagtaaatcacaggcctaaccgttcaagacgtccctctaagatgaaaccttctaaaggtattgtgtaatgctaaataatattaataattgttatgtgtcttcactcaagagggactcgaacctcaaaccttgtgagagaatatcacaggcctaaccgttcgagatgtctctctaagatgaaaccttctaaaggtattgtgtaatgctaaagaatattaataattatcatgtatctttactcatgagggactcgaatctcagaccttgtgagagaaaatcacaggcctaaccgttcgagatgcccttctaagatgaaacctcccaaaagtattttgtaatgttaaaagaatattaattttaataattgtttttacaaatgtaagtgacaactaactttcttatgttgtagcagtttagtttgataacaatcttttatggatattagttgtttatcatgtcatttttttgctttattttgtatacaatttcctctactcaaagtagtagtaatttgtattatatgtttttttggttttttattttcctatatatttttttcctgatttaacatgtatagttttgctaatatatgctatatatatgcatttgcttctatttggatttttcattaataatgttcttaaaagaacctatttgaagtgaaagtagcaagcaaactctttctgtgttgaatgatagtgtcatctaataatcaagattgaatctttttatgctaaagaaggtgtaataacaacaaacatttcacattttgtaatggcaggaagagaaaaacatgtcaaacaagaggatttgtgccccagagaatgtagcgttgaatggggtgagaagtgaggatgaaaaggcatcatcagacgacgatagctacttaccgggtcttcctaatgagttggccttacaaatcttgacatgtctcagcagattagactacccaatattggcttgcttgaataacaagtataagtccttgattggaaatgagtacttgtataagttgaggaggcaatctggtctcactgagcaatggatttacatatcttgttctcttgggctttgggaggcattcgatccaaaaacaaggagatggaggaatttgccaaagatgccatgcgactattgtttcaattgcgctgacaaggagtctcttggtgtagggacagaattacttgtatttgggcgtgagattcctggacttgttgtgtggaagtatagctcactgagtcatgcatggtctaaaaacccgcctttaaatcaccctcgttgtttgtttggttcgagtagttataaagagattggtgttctagctggagggtgtgatccagtaggtaagattgtggattatgctgagctttacaattctgaacacggtacttggcaggttttaccgaatttgaacagagcacgaaaattgagctcaggattctacatggatgggaagtttcatgtgattggaggcatgtcagcggagggaaagaacttgaattgtggcgaagtgtatgacatgaaaaaggagaaatggagtgtaattgagaacatgcaccctcgtccaatggtaggaaaggaggagtctactatgcgttctccaccattggttgcggtagtaaaaaacgagttgtattatgcggatctagttacaaacactatgatgaagtacaaaaagagtgacaacacatggaaaatggtgaagattttgcccctgagggcaaatgctgtcgaaggttggggcgtggcattcagaggttgcgggaacaagctggtagtgattggaggagcgaaccacgcaaatcacgacaacaaaatgattttaatgtactcttgggaaccagatagggatgaggattggagcatggattgtataaggtatggtgtaggatcttttgtgtacaattgtgctattatgggatgttaaaacaagtatgttagtacttgttggtactttgttttctatttctattgtttaagtaagttaataaacacatagacatagtatgtcgtttcctttagttttccttgttagaggcttttagaaagccataaacccaagagttgttgccctctaatttcaagaggctctttatttctttctttttaataattatgaagtgttagtttttgtttaattactatgattatcattgttgttgttattgaaattaaacttttattaacaacaatcagaatttaatacatcaataaaaaagacgaaaaattcttaatctaaactaatttaccatcaatcttaagtgaatgtagtgctaattcatggacaatcttaataaacagtaaaatatttttacttattagtactccattcatgtgttgtgtgttttgaaaaatagtaaaaaccctaaaccttatttggtcaaaccattttttcataaggtaaaatattcaaaaatcttttaagaaaagtttatatatataaatgtatatttttttacaacactaaagttcaaaaattaagataatatttgatttgttgtaatagaatcttaatagttttggtcatgtttgttttgaaaattgattacaatgtttattttgttatcgaaaagaatattagaatcaaaattattttgttttattttgtgtgtgtaataaaatatgcagtaaatcgataaaaatatacctatgttaatttagtaaaagtaaatatataagatattaaagttatttgatttgatttaactattattgtttaaattacatttttttttttttaaatttgtggtttaatgaccattacattaatttatcattgtaataagaattacaatgtgtaatgtaattctcaatacactgaaaaaacattacatactcaaaatgacaaaccaaacattgtaatggtgactttgattttattacaaagtccgttacaagaaaccaaacactacttaaattacattgtattttacttttatattttttattttaatttttatatttcttttattactttttaatttatattcaattttataaatcatattcctattatatgtgttagaaactctaattttaataaattacctaaagttatatttagtacttaagttataaaagagattatttatcaattaaaattattttatgttttatatatgattaatatgtaataaaaaataataattctaacttatctcaattacataaatagtgccaaatttatataaaccacatatattatacacataaataattagtacagtacatggtttccatacatacacaaattaaggttattttttctcaaaactcaagacaaagtctcttttgtttgtttattttactttggtagcaaatttacatgaaggaaatccatatggaatagttgccactaatcctctaaacatttacaattattacacatatgaacttaataaaaaaaataacaacaaaagtactttatcttatgattttattacaatcgtacctttttttgaactatgtattataaataagcaaaacaaatatatctccacgtgtttttgaactaacacttaacaaccaaaaaagagtacaactgcaataaaatcgtaaaataaattatttttactataatttttttattaaagtcatatgtgtaacaattacaaatattatataagtttcgctgcaaatatctcaatccatatctttaatataactctttttttgtatagatttaatcctatcaaaatagcatttatccaattactaaaaaccgagttatgaagaaaatccatatcattacacatatttatacataataacagtcttttacaaacagcaagaacacgaaacgcaataggccgccctaccctaaagacgggcataacacaaaacaatccttcttaatattcaacaacacaactcctagttcattcccatatactcactcaaacacaacattctgaaaaattggaacttgaaatcttactaaaactctctactgtaatctgtaatatttacaattggctgacttaataatacacaaaattaacaacagggatggtaataattggctcaccagtttgttttgtttcactttccacgtacaaaaaaagggaaatttatagatcaaatccttaaaacactggactaatagacaatgacataaacataagtttcattcggttttgatctatttaaagattggatcggatgcactcaccggaaattacatcaatgtgagtaccagcataatttccatatgcctgcaaacacaatttaacatggggttaaattcgagcaagatattattaaattggaaaagagttccgttgttacatacttggacactgaattgaatcgtgttagctaatcaatagggtgtttatcagcttgtcgagatgtgtagtgtgcggaaagtagaagtattgaaaggaaagcactagctacgaagattgcatcaaaccaccggtgatagaagtcaaattgaatatcgccacccagtacatccgttattatgatcctgccaagagatgaaggtttaggattaaatcaatacaatacaactaaatattctagaaaaaaactacttgcatttatgagaacattatgaacaatactactggtcaaacagctaaacaggatgaaagagaaagaactttcttcagtctctttcattttcaaataaatattgtattcatgaatcacatactcataacgaatttcatgcctataagtttgccaaataagaatttgttatctggttttgtgttctttttctctctttaattgctatgtaggtactcaagagagactcgaacttcagactttgtaggaacgaaccacatgtttggtaaacttgatatcgcaagtgttcagcagtttgcagcttaaaaaaatgtattttgcttaaaatcgcaagtagaaaaggcaagaactgtttttattataaggattttttttaggtacccaactcaccaaaagaaaatacttaacacagcaagaaactactaggtaatcaatcatacgggaggaaagatgacaaaaatcaacaactgtttcaatgtttacacataccgataatcagttgccaagcttttccttatcaaaagaatggaggacacaaagtacatccccataatttcagataaaaatagtacaacattacttgaagatccactcccgactcgggaaactgcaaaaaagaactacaccagaaagacaataaaattttgttgttgtaagaaggccatctgattaaatgtaataggcaaaatgtaatgcaatggacatattacatatacaacaaagataaggaataagactctattgctcaattgagagaaaatacaaagaaaatacccaaatacttctctttaggcattcgcaaatcctctaatggtaaatttacgtatgcagcaaaaggaaatgtagatgctgaattaccttcattagatttgtcaaaaatccacgtacggagataacaatcaacattccgatgaataaaagcgaaatgtactgtacgaagatgaagaagaaaaaagtgttagccaagtaagcaaccaaacaaaatcataagaatcaactgataaagttaaaatctaataaaacagtaattgaaggtcaggtaaacttatgcacattttcttggaaaatgtaagaaacaaatgtaaatgacaaaatttctagactcaagtacaatctaaagccttaattcatatgtcacacaattttattcatttatcttttatactggcaaatgcctacagaagttagataaaaaagagtcacgataactccccaagtagaattttaaagatgacctagaagagtcgatataataaataaattaaaaaaa

SEQ ID NO: 186402 - DNA, 4391 bp, Cannabis indica
atttatttgagtggagagagagagagagaaagaaagtaaagtgaatattggtgtaagaaaaatacaaaacagagattgaaaaatctatttaaataaattttaaaagtatttttttttttatttttgaaattatattatttaaagaaaaaataaaacagctttaccaaatatatttttcgaaaatattattatgattgttttattgattatctgtgaccttttcgttgctataatatgttgaacttcattcatacataaacacaatataaaataaatatggaaatgtggcatatgattcttagacatatttctttatagatttatagatgttatgtttcttcagagtaatattcttttgttttgtcctaacagaaaaccttcacatccctccctatctctcaactcactctctctttgtatatacacacacaaacacaaacaactttcagctgtgatcacaaaccattttcactgatagctatttaaaagctcacgttatggacaaacctacaaaaaatggtttataccctgaatttgaattttaaaattggagaagttgacaattgtgcaagagaggcatcataattgattggcctggattggacatggtgatccaagatgagttgggtattgctcgggcctctacaagctggaggttggagggttgctttgaacttgcgatgacggaagctttgactattcgcaatgtgttgactcaatgcctttttttgggtatgacaatgaatttgattgttttgagtgttgctcttaaaattataaataatgtgtattattatttctttggggcttgtgttggatgacattgtcgattattgtaataggttcaaagttgttaattttgtccattgtatcttgtaatggtgttgtttattctttggccaaacttgctttatgagcaagtagtagtgtgatttggtggccaagtaattctagttgtatccgatagcaaatgctatcaaatcctcgctcccacttttttagaagtgattttcttacttcgtattggttcaatgtagtgttgaggctgttcaaacaaatgtgaataatgattgaaggaaaaaaaataattatcctatccttattaagaaactaatacaaagcagtgtttcacacaacctataataaaattttgctgctttatatttaagagtaaaaatagggtgaacattctcacaaaacaatcgcaactgaataattctccatggacactcgtgaacccaactcagtcaatcggcagtaacttaaattaaaaaaattacttctgaaacagaactaaattcaaaccaagatgacacaaagttattcattttcattaaaatgcaaattaattacaacctcatataagggcagagaatgttgcttgcaacaaaagaattgctttacacagcaacatatgaggaaaaagagtgtaattgtagacaacaagtttacagattcaaaagattggatattagattccaacccatccatgtcttcttatcagaagggcatacaaatgtgagctcaaacatctctttactagcatgttcaccagactcacagaagccaaccagtttggcaacaatctcagcactttcttttatatgttgcatgttataagggtctgtccacaacttgtttaccagttgtaacctcctttgttttcctcctggtggtatttcccacttcgagtaaagcatttctcgctcttctatcgtcagtttagagcttaccctcttggctaagtattctctttcttgtttgagtgctctgatactgcgaaagccatatcgtaactactttgttaacagaacataacaaaaggaaaagtttgtttaaaaggggctctaatggaaacagttaaaaaaataccttgctgaaacggaacctgcaggctcatcacctaagagtgcagggctagcattgccaagatcagacaagtgtcgttccaaccatgttagtcgtctgagttcgacttccatatagatcttatcattggggtctcccttgaacagcatataaaattgtgtccggtgtatcaacgacacatggcataagtgccatagcatgatgatttccttcctctgctcctcaaacatgaggtgccatggctcaggagatggatcactatactctgatgcttcagctccagagtcatttgcttcctctagttgcaataccttaaaaaatcataaatggaatgaaaatagttagatcatagcaaaataaagggattcttctacattttttttttcgcttcatttcttcttcaaacatcaatcgcgagtttttacctggcaaaccagaagctgcttctggtattgtaactttgcgacacgttcttttaactcagttacataagatctaatgctgcgaatgttctcctcagcagcattcttgaacatcttctgcattttcttcacattaactgaatttgatttccttgtaaccggagtaccatcttttgatgaaaggaaattaccactttcatcattctttaacggggtgactttacatgacaaattaccactgcgtacactatcataattctcaggtgccttgttttctctatcatgctccctaacttgacaggacgaggacagaggtgagcatggcggccggattatactttgcatgttcgcactattgcttaagttgaaaggaaggattttcttcttctttgagggggtcttgcactctgaactctcctcatgagtagtaaaagatgtgactagctggtctatggttttctggacattttcaagcttcctttctaaagattcaatggtgcttccttgggatttgaatctactgatctcttctattaaattggcctgatctccttccataatttcttcggagattgagttcggaacttgcatgttctggatctcagagagtaactttgctatgttttcagcagtttcttgatttccaagtctgtgggaagcaacttccttgtgcagtacttcaagtgcacggtttgcttcctcaccaagctgctgctgtcgctgctcgatttttctgatttcatggacaagcatagatggatctgtggaggtaactgattgcctaaccattgcctgcctacgaacagcatttcttggccgagtttctggagtggaggttgaactatcatcaccatgaaaagaaagacaccgggccacttcagaaggcccacgttggttcattccctatagatcatagaagatgtatttatttttcataaatataagacatgtaatcattaagacactactataaaatcgctgcagcacctttgggactttgtgcgcctttctttctgattcaagctgtgattgtacaaggtccctctctcgctttagctcttccatttctttcttcatctgcaaaattgacattctaattattattatttcaatgatagaaattacatttccttttacagcatttcttttcacacaataattataagaataagctgatgacgaaaccactccatacaaacattttcggtatcacgcagttgccacatgactaccaaagctttcattctcaactaataattagcaatttcagacacttatgattagatcaattcatgacctttcacaaattattcagaagcattcatacctgctcaattttcatgtccttctctgctatgacagaccttaagcatgaaaatgaagaaggctctggacttcgtaactctgcttccagtctggccacttccttctgcaaatgcttgaccaacctcttgtccgcaacaacctgaatgaaattttacttaagttagtaaggtagccttgtctttatcacacaagcttctaaatctattgacaattataccatatttatttgggcgttattagtaacttcttttgcactagttgcaaatgatagtgtgtttcttgtttgctccacatgacttaaagctgggctcatggtacatataattgcagtacgagcatttcccccaagtgaagattgcaatattcgagtaagttttgaatctctatatggtatgtgtccagatttttttccaccgctgcaaaatgtaagctgctcataaggaaagtaatcaagagtactatatcatcaagtgtcagaatacaccaggacgtgatatcagctaattcttacaatcatttttgtataagctaataattcaagttaacaaactgaagttctacttgtagtgtcagcatttgaatgctcaccttagcttcctgatcactgttgtaagtgttaacaaactacggttaatatggctgccttcttttaatcttgtaccatctgcatttgtttgcgaagcacgttcacttccagccaggtctacaagattctgcaaagtttcagccctctagttaaaagaaaagaaaaatgctgttatttttgtaaaaaat

SEQ ID NO: 186403 - DNA, 4078 bp, Cannabis indica
tttttttttattattatttttgagaacctagaattatcacagcttttttttcatcctctaattaatctatagtccaaacaagtcaaaagcagggagaaaaagtccaatttggcaatgtcaacacattcacaacagcaacaacacatcactattagccaaagaaatccataatcttgatttaataatattagaagagaacaaaattataacaagcaaagtaaccgttgtctataataacatcacactccaataacaatctaataattataaatatatcaaaatattcttttcatttcatttacataattctctccatcaattgtgacaatcactgatcacaacagtatcaatcactctttttggaccagcctgggaaatacaacaaacagagctcatagtaaaatcaaatcggagtgtactattattatctttttcattattattattattattatatatgatcatgtgtgtctgtgttttcatcagttgatttggtgagaaatgatccactgggtaaaggcattgagggttttcatgtctgccctgtaatgcttctgagtgaattctagaagagaagaccaggtgaaatcaggatacaacctcggattattgggacccgccaaacattttggtggaattaccaatttgtccatctttggggagaggaagaaagccagagatcttctcactgttttgttgtttaccactgctctatgcaaacaactcttgtaaatcccatttgatagagcctgcaaaacacaccatcacaactaactattttaaacatatgtaaaaaccagaacttgttagctacctagtgttaccaataaattataccatgaaagtgtcaccaatgttaacaacaaaagcatctggattaggagtaatggcatgccatgtatcatcaacaaacacctgaagaccacccacttgatcctgatgaagtattgttagagaagttggatcacagtgaggcccagtccccagtgttagatcgggtttttgacaaactgggtagtaattcaatctcattatggaatcatttccttcaaaatattctctgaaatactctttcccaactcctaggctcatccccagaagctccataaccccaagtgagatcttgctcatggcttcacagtattcttggtacactttcctaaactcacagtaaacatacacatgaaaaatagagtcagtacttacaatatacatatacacacaagtattgtttttgcatggtataaattgtcctgtaatcttacccaaagtctctgaaatgttcacccattacatcaacgaagtagtcctcaacaatggtgggaaactgttggtcgtgacagaatcgaaaagagagtgtctccttccatggaagtttagaggagaatcttccagtgaagctgctagcataaccacaaagctcaccaacctttctctgagctctctgtttttgcaagagctgcatttcaaagaagtggtccatgtagtgatgtgccttcttgatgagctcagaatcgatcccatggttgacaacaaggaaaaaaccatgttttttgcaagcctcattgaccagctttgatgcatcagacattgccacttcatttccatcaaaaacgcccttcaaatcaatgggagggatcactagctcaggtggtcctgtggagcctggcttctcatggtctggccaaataaattcttggggtatggttgcttggtattgaacaactttcgagtcaaaaaccaaagggtttatcttctcactaatattattattattattattatcttcacttgtactactactactacttttgttgaatgggggaggtttaggaagagatacagttggcatatttagcatatatatataattaatgtttatatataaatatgaaagagaagctatttatatattcaagcaaaggaagatagtgtgtgaattttggggatatgatcacgaaatgaaaggttggttttgttaggggaatttatgatgagagaggagtaattactaattagtagggaagagggtattaatgaggagagagttataagaagagaagaaaaaatccaaggggtttttcattggagagatcggcatacaaatatgggaatctaattgtttaatttgcactgttgcgtcattcctctagcttttttaagtgtagcagtgtctctggtgttggtctttttattttgtcccctttgatatgcctaccctctcttttttacttaccaatcataataaaaataataataacccatttgaatagaacacatacataggatacaacacaaaaacacttctatatatccaaatctttattttcttttttatataattacatcaaacaaaaagggatagaacaacttccaaatttaacggaataataattaataatatcatttttctgaaaataaaaataaaaaaaagagttcaaaagggggtctaagaggaagaaggttctcctcctcggatgccagttgccaccaactagaatcttcatagatatgttgcctctataactcaatccatattcaaatcttttaatatgtaatcaaacatacattttatgtgtttttttataaatatttatttattttattttatagatatgatgaataagaaggcatgaataaaattataggagctggtatggtatatcacaaagaaattatgacaacaaaataattatttgaaagtaaagaaagaaagagagattttatctggaattatatactgttattaactgtaatactctttgtattgagccataacagaatatcacaatttcttcctgacctaatatcaatatcaaaccatacacgtctaacccaatatttctaaggacatagtctgttgaccaattatttagcaaatctgtaaccgaagcaactaagccacgtttgcaacatagctagacttttttaatccagtactcaaattcaaatatgtttatttttccttattttcatatcagcaaggtactgatgttaatgaatttcatgatgaaataataattatgagggcttctaaatctaatgcactctataatagggatgcacagatccactttttatttctttctgtattctatataattttttttttcatatatagttgtatatattatggttacttaaaacatcttgcaaatatttaaaaattttaaaataatttatatatagaagctaaaaattatgcatgcaacacactgtttcaatcttgttttcgacttgttaaatttttttccgaattttttaaaattttactaaatgttttaaaaaattataacgtgcttgtacgatcataaaaaaatattagatcaaaaatttatctcaaatgccaaaaaaaaaaaaagtacaccgtgcattatataattttctaaaattattaattaacttaatacctcctcatcatttttcatactttatacaagtacacatgttaatgaatctctaatttttctttttttttgtccaatttacgtatactacgattttaattttatagacatactactagttggtcctttataagcacaaaagtccataatcatataaatatatattgcataatgcttaaccaacaacattaatcaaatctagctatatatatatagatctaggcaccactaataaaaacaaaatacatgggaaataattttcattttatattgaggtacatttccttgggaggcatataccactgggttaggggggcatcaaattaaaccagctctccttcacttcaaaacattacattatatgattatttgagcatgtcctatgatcactactgttctccgagtcccactggtccttttgtgggtttgtaaagatgggaaaaaaattatggttattgtctgaatatgtataatgaaggtagccaaataagacaaataataggacaattgtacaagagaagaaacacattttgagaaattcttgcatgttcattaaattttccttgcgtatcttctttcaatttattgtatgtatatatgcgtgtatcatgtgtgtatattatttttataattattaaaaacactgattatatataatagaataaatctga

SEQ ID NO: 186404 - DNA, 7792 bp, Cannabis indica
ttttattttcatgtataggtaagagtaaaggtaaggctgaacagctgtgaggtcgagccggtgaagattgtacatgtcgaggcggttagacctggagttttcgatgttcgagacattaggctggattttgattagtttctaggcaacaagttttgtaattaatatgttgtattttgtttgtaacttttgaaatgtggaatcctgacttttgtaaagtttattttatttcaagtaaaggttaattaagaaaagttttaattaaacacgattttcaataaacctgttgattagcaatgaactgcacagttaacttcaaatcacgataacacgcctaagctggcagggtgttacaccctcctttgaaccatgatacaagtaagtgttcaaaacttgttgaacttttcgatttcacactagggtagaaattttcgttcaagctatgttctgaactgattttgcatgtgaccgttaggaagagtatctaagagattaataatatagaacttattagtaatgagattgtctttccatgagtgtgcatgtgttttctgggtaaattggtttgaaatcttgaaacttgtacgagtgattttcatgcatttatgttattctttatttacccattcgaagtcattagggcttcgaatggggttattttctagcttcttgttgtttcgtaatttttgtgggttcctaacctaatatttaaaggtgacatttcacgaggaggacgcttccgggtgatgagtctggagggaacctctcctagcaatttcaagggaagctttccctgatacccttattgtccttatgcaatagtaaataggctataacaatgacgaaaaatcatgtatttcacaacagaatgaaacatatataagcatcaagtatcactttatcagagaaacaaaagctaacaaagaaatagaactcaagcactgcaagactaaagaacagctggcagatattttcacaaaggtgctaccaagaggaaaggtcgaattgctacaagacatgattagagttacaaaattgtgtaccaaggaggagtattagaaactgttacagatttctataatactcaattaagtctagaatattctacacatttgtagaaaaacttactctaaatattttagataattgtagaatattttgaaattttctagacacgtgaaaaatacaatagagcacattgcatttctaaaaaactttagtgtagaagttttttagttatgcatgcttaagaaatatgtaaaagtgtatggataaaattcttaaatctagacaaacaattgtagccactaaagcttgaagtctagcaactataaatacctatcaagggttctaaattgtaaccaataccaaaaagccaaaagctacaaactatcaataaaagcttactactttgcttacaattctttcttctaaaccaaaactattctcatatactaaactaaccacgactcatcaacatcactactgtatcacaaaaatcattaaaccctttattccttcatatccacctatttaaatgtaaactagtacaaattaattctcaaacaatcaaataagaattgaagttatacaaaaaaatcattaaacacttattctttaatatccgcctatttaaatttaaactaatacaaattgattctcaaactatcattataaaaaatttgaagactaaaataaattgctaacaaaattaaaaaaaaaatccattttctcatgttggattgaatcactaaattatgaatgcctatacgaattatcaaagtaaaattgtttgcttatgataagtcttattttgcaacattttaactaccaatgaatttatcagttcatagttttgataattgtcgatttaaagaaaaaatggaacatgcattttgaaattataaatcttctgcaaatatatttaacacatagatagaatatagcatacactataactaaacaaatatacaccagctcctttacacatttgatttgatcaaaaaataagccaatgctggtttactattcaaaaggattaacataatccatctctcacaaggatttctttttccctaaaacctaaacaaatgtttcatatcttgtcagtttctgacatgatccttttaatctcttctataaggcattctttttcgtctagtaaatcctcattctgtttttgaagctcctcaatctgcttggtctgctcagaatccttcctgaaataaatgcaacagtaagttaaactacaattaccataaaatgagttaacacgaaaccaaagtttattttagacagataaggctaaaggagaaaggaaattggctcgaaaaactcatacggacatacacatacaagtgttccagaaccctttcattagaatatcagctagttatgtctctaatcgagtacaagtcaaacctctatccaacttctacctattttgtatgatcatgcctaacaagattatgagtgatgtttgttggtacctttttatctgattgttagatcatcaagaacaatcttcaaccataataattcacaagttccttttcccatgacttataatttttgcttcagcacatgatcaatcaagcaactacttgtttcttgatactctatgaaaccaagttctctctcaagactctctacaaagtcctgaattttaactcctatcaataactaatcttgcccaatttcgcatcagtgtatgcttccaactctagattcccatgtctctataataagatgcattttctatttctaggtttatatttgaagtatccaaggattttgtaaataaattcctaatgactcttttggtgagtgcacaagtttttcatactatcatggcatgctgtatagtttcttaaccaatgattgatataacaattaaagtgaaagctagatacgatgatgtaagttttgttctttatttattgtttatccgactatgaaaaaccataattaagagaaattagactggtttacctgttcatgaaggacaagttaagctttagtgatcgcacttccttctccagattctcacaccgcttcaaaatagattgcatatctgatggaacaataggactcaagtttcttcttttgcttctgccattctaataaacatcaacaaaaaagttactcgtgaagaataaaatttaatcgactacatgttctctcaaaatctgaaacaaaaaacaatattaggagtagttggggatgaaagagggttcctacttttaaaagtggttcttatgtgataatatcaagcaaatctaggcttgatacaaaatgggattctcaggagataataaaaagattctataattcagaataaggtttctatgatgcaaacataatcctccaaatttatgagaaatgttaacttactttcgcgatcgctccaccctacgcttcttggttacgtcctcctcgtcaactacaagattgctttgagtaagaatgaatgcagtaatgttaaaaatatacaacagaaattgccaaaataataataaataatccaacactaaattcaacaaatttatgtgttccccaaacagatgttatttaaacttaaactgttttgtaattcatttatgacagcactcaacacagttaggacatggaagccatgatcgtgcttagttacctgaaatagcagatgtcacagatccatgtcgacgaaggcttcccctctgagaaatgtaccgggaaaagagtgaatactaaaaataggtaaaatgtttgaacattcacagaatgttttttaagtattttaaatactgcattcactaatcctagaaaaaagtgtacctttcgatcatctttcaaattaccaatgatccgttccctgagatctacatttccacaagaagatttgttacattagaaaaatcctaatattaaaaagtcagggaaatggaagaaaagtaactaatttgagacttctgaaataacatttgaaccatggcataagaaatatgtcccccttgattgactgagatagttctgtgaagtacttctttttgagccttaaacataacacttcaggaatgagctatgcatgaagactatgatgaatctattattttacttggaggaggttcaaaatattgcataattgatacagtgttattgtttcagttatatacctttggctctagaaccattttctgaacttcgatttgtagattgtttccttgaggtctcagaaacacttatagcttgaccagagttactgggaccatcacacgcatcgaaaccagatgaaattactggtgcagcttgagaagattcactttgagaaggttcttgggaacctcggcttgattgaatcggatttgtagaatttacaaaaccttccaaatcaagattcattgatccatcaattatttgtacaactccgaaatccttgacttgatcaggggatacatcatgaaaattaaagggtttctcattaatctggttcctttgttcttgactgaagttcacattgaaggtgaattctcgagcaggaaaaatctcgttgcaactatcatcttcaacaatttctttttcgatatggttgttgagcttcttacgttctaatgttcccttaagcatgtttacgacagaagtcactttatcaatctcaccaactggtgggttgttaaaagtagaggaggaagaattagatggagacataaaagtatccatttggttgggtatctcacaagctgaggagccaatgaatccatttggataatattgatccattgtgttgatgccttgtgcagaagcatggtgtagcacttcaagaccaactgttgattggaaactttgcgttgcagcatacttcctcctgcacgaaacagaaaagtaacacaatgttattcaatgcaactagaaaactcaagtgaaaacagaatatgtgcaagttatatagtattcctattactattgatttatacaattaattggaaaaaaaaatactataccgcaattcagaggatcgacttctgtcatgggttgagaactatgaaaccaagcctacacagacgtgaatagttagaaaaagagacgatgtggttttagtaaaaacttagacaacctctcaacacaagacaaaccttagccagatacaactcactaccatgtaatcccttttcaactgcattcctgaaaagaaaaataataatattaatgattggaaaaacaagctagcagataaacgatgagtaccctattggaataagaaccgtataaactgttttaggcaatgaacaagtgggtgtatgtctcgcattgcacgagattcaatgggagcagtaaaaacctgattgagtgatgattgacactgccagaagtatcatcagctgaggcataattttgaggatatataatgtcattgcttcttttcttttggagcataccaacatgttgctgaccggtcaaattggatatttcagtggatatcctgcaaatgtattatgctaaaatattatgtaaaagtatctagtgaacaagcaatctgcaaaatttctgtcttaaactgctcaatgagaacattatgggatgccaatcagctaaaggtaactagttgtttccaaaatcatctaaatagcttcagaacattatggatgcctgatgttaacttctcctccagtaataatattgaagaagttattataattattactgttgtatattgcaagcaagttcacagtggatcatcttcactcaccacttctttattacatttttataataattgaaaaaaagatacaagagatttaaaatcttatcagcataagaaataagatgatcaaactatagaagtagatatatatataaaaggctaaaacaacttgaattactcaccttcgcgatgcttgtcgagtacgatgtgctataccggacgtgttgaaggaattattctggaagtggagaaatattaggaagcagaaagaaatgaactagaaatattaaaaagactaacatgaaaaaggcatgagtagataagtaatagaattgagtgttcacaaaactaatgcccttttcatgttactatttttaaactaaatgaagaaacacagtatcgacatccccttgatagagccacataacaaataattctgcctagtgtttatggggtttcaaactgtgtgatgaatttcgtaaaccagacatgttgaatcaaaataaaatcgactgctttgctttccataaattgcttctgatcggtttaacttggttacatagattaataaatgtgaagcctagaccatctccatgctggagaaaatatgcaaatcacttaagagtctacatctaactttgtcttaagttttaaattagagtaaattttcttgtcttctaaaaattcaaaatggaaaggagagggaaaaaagagttaaatataataaacaagtaagagaaactgaactgtgttttttcttttttaaacattatgtaaaagaaaatcattgagcagcaaccatgcaatggattaacaatttatgcaaacaacaatatccctataagaaagaaactaatatgagtatcagaagaattatatcataattaagctcatactttacaatgaagacagtaagatgcatttaataatagcttgtagttctctcatagtctgccaaataaagagactcatagaagggataagattgatgagaatagtttattccatgtttcatttaaggacagcacaagattttgataatgagcactgaatataataatcttccttttaaaaacatccaaaagtaaattgaaaattaaagttaatcaacaaaaatgaaacagatgcttgcctctccatttgttagccaacttttgaaaagctcctcactatcggtccgaaagttttgagatagattcctaaaccccaggacatcaatggatggaacagaaggtcccactgaactctccatataagatcttagaaatatctcctcactggtgttcctatataactctggaagctctcttccttccatttccaagaaactcttttttccttgattttgaagaaagggagaaaactggaagaagctttctgctaactactttctcccttttacaagataattactcactgtgctccctttgttccaccatttgaccataaaaactttccaagacacaacaaattaaaagaacactaagcttttgaaagaccatggaagaactatcaacataaacccaaatctctaatgaacaagacaaatagaaaatcaactcaagaacaaacaaatatcaatcccaaactctcagtcaaactttcaccaaaacttcaaacccaagtatcaacaaaacatttttttttcctagtcagaaaaacatagttattttctcaatcaaaaaccaaaaccaacgaaaggataaactctcaattcacttcactttaacccaaaccttgtgtgtctgagctaaccaaaaaaaaaagtatggcataaagaatcatatgtacaaaaattagacgtcacaagtattttcttattgtaacaggtggctgtggtcaatataaatttaaatatatatttatgggaatctatggctttcggtcttttaagattcgtcatgccataaaatgtcgtttctttaaggtaaagaaagtaacttattgggtcaaaatgtagttataatgctaaatttaaggtctcgctgttaagaaaagttttcaattagttttggaacttttattattgtctttctctgtaatgttgtaatgaaaatttagagaggttgaggtagtaccgaaaaccacagcgtagtgatgatggaatgaaagagt

SEQ ID NO: 186405 - DNA, 890 bp, Cannabis indica
ttaaaaattgttataaggcgcccaacaacagagtagttagtggtaatttatattatttattaaataaaaataaataaaatctaatattaaattacacagaattgtactgaaatgatgtagagtttactataaaaattagtcatttatttttattttttaatttttttcaaaatttattttgaaagataaaataaaattggttggtacgaagttagatcggttccctctgggattgtcttgatgtccgatgacacagtagactcgtgtctttattttctgacatacactaactatttatccaattatacatcgacacgtgtactgtatgaataagcaatcatgtacctaatcctttctcactgccttaaccaaaattaataaactcagaaaatatttttaaattaaaaaaaaagaaaaaagaaaattgacacacacaaaaaaaaagtacacaacttctctcaaacactttcatcctaaatttgtgaatttagattgaaagtttttggcttttgcaatccgttttctggtttttggattctttcaatacctcatcctctgtctgaaccgaatctttctctaaatctcaacccccaaatttttgaaatctcattcgttatccaaaaaatttccatttttactcataattcccctggatttttatggttattatttgatattttgaggctgaagatccaatgctacttccaatttggtaacttaatttcttcaaattattctttgttaagtttatgtcattagtaatctgtaacactagtttactttagtttagctcttgtgtttggatcttttgatagttgagtagttagttgtaaaatctgatggttttgatgaattatagaaatacctatttgatcaatttttgatctttt

SEQ ID NO: 186406 - DNA, 3873 bp, Cannabis indica
tgctattgtgttaccatttcttggtactgcattctcgtttcgaaattgcttagaattaattggcaatctggatattatcttctaaaagaaattggtattggagttgaaaggttttgctagtagagatatgattaaattcaaatttctttcaacacgtggaagtttgacgtagctgtatttccgtgaagactgaagaggacaacattattccttgtgcagatattccttgattagtctgagggaacatataaagaaacgccctccgctggcaacaaccgaaaaagttcagcaatttgtgagggtgagccccatactatatgatttcagagattgttcttcatcagttactttgctgtgtcataactttttataaattgcttggttaagcattttctttttaactaaatgaaatataaaagaagatagacatgggtttgaactaacagaacaacgataaatgatgttttcttttctaaggcccggggaaaggaagcaattgtttctgggttttatcacgaaggctatgaggagccacttctaatgcttatgaaaagaagaggtgtacatgcgggcttggtggtgaaggtcagtttcttgtttaatgttgacagaaattccttaaagagcatctcccactaactgacaatctaacttaatcttaaaactgtctaccaagccatcaaatcaaatcaaacaattataaagattttactttgcgattactatagggcgaggaaggggccctgtcaatgacgacaagatcacggtccctaaattcatctaaaggacttcctgtaaactactgttctggttttcgcgcagcaggcttaggagtttctgaagttgatggtttgtttgtgattgagtcctatttccttaaatagatttctgtagctatgttagctgaaagttttactcttagtacgattcttttatcctttaaaatgagatttcgattttacgcaatgcaggagtctcccttgaaagttttagccttgaggtaaatgccaaagactacggtattgagcccaccgacacaccaagaactgatagatcggtaaaattttcgagacattaaactcctgtctttacttggctttcaaatttgttattttttaaaccttgcgaatgtgataagtcgagttatgtttattcattgcaatttaggttacgaagaatatagagctgggtttagcagctcttcatggtaaaaaaggaccagcttatgatcgaatcatcttaaatgccggaatggtcgatcacttgctaggatgtgatggtgcagaagacatatctgttgcactggatagagcaagagaagccatcgacagtggcagggctctaaagaggttactaaattacataaagaactcaaagaaagtacagaagtaagttcagaaatgcttgttttgatactacagaaaagaaaaacagtttgtttttttttttacttcacacaaaggaatcaatataggagcaggagagatcgttatattgagatttatacctcttttgtttttgcctttcataattttggtctcttgtgggtttttttttttttggagggaacaagaacatcaaatcaatctaattcttttattccttggtgctgacacatatttctggttttgggaatgtaataaaaattaaaaacaatgtgacaaaataatttggtatcttaatacaataaaagcagatgtgaacatcttttgattttattaacctgatggcagtatttaaaataaaagcaaagtacaaaaagaaaagaacagagaaaaattctatgtggccgcatgattgtcacaaactctctatgactgcaggtttaacatattctataatagtctatagtctatgcttgctgggagggtagaattgaattgaagccatgcttgtttttttgtttttgtttctctttttggttattattatatttgaagggtagcagctatagaaccagccaggctaagaacctcaaagggtgctttgaacatcacctgttgaacagtcaatgggcacgagtccgttatccagaagtaggtcagaccattctcagggtgccctgcaaaaataccattgatttcaaaggcatcagaagtttattatgacttcaacactgtcaaaatgttttactgtttataaaacaaacgacaaaagtacataaagtgaaaaagacaatcgcacatttgaaaaacgacaatatttccgaaacacgacgtagatatgatcagaatcacaataaatgacagaatacgacagcgacaaaattcaaaatgacaaaaatataaaacggcataaaattatagaaaacgacaagaatacatattatatattctctatctaaatgactgcaaagatcaaactggaaaacaacacagagctacttaaaacctattttgcgtaatgaaatgtttattcatcataaaaatgaggtgaaagatgaaccaaatgaaaaaatgtgctcattcatgcaaaaaaacaaacaagattaaaaaaaatgagctaagatgataatgaattaccttgattatcatgttcaaagcgttcccatgatctgttaggaaagatcccatgagtaacataagcgctgatttttgctgctccatgggccgctaatactttctaaataatattgagagtaagaaaagcaagcaatttattccctttgttgaacatggaatagaattacacatacacacaaaaccgcaaaaaattaaaggcagaatacttgaatgatttcatttaaatgctttagtaccctcctagaaattagaattccttttgagtcttctccctagaatgctaaactataatttgtgctgtcttctaaaatagagagagagatgcaagaaagtaaatccactttgttttacatcaaaaggcaaaacaccacagataggcaagtcaaaaacttgttccaaccttctcatgagatttaagaaaagaaaaaggaaaaaaataacagagtttttccaagataaaaggtataagcctcactatagatttcactctccaaccccagaaaccatcttgactttaaaaaattataaacttgaatttcaatacaacaaatgtaataagtagtgagcaggcatgcatacctggcattcaatcagggtaccacctgattggaccaaatcatcaactatcacaacatgccgcccgcttgggtctccctctttgatacgcacaattcgttggtcaccttcccgaactttagcacaaacaatctgaatatcaattgtaagatgttagaagcaggttggaaggcacatattattaacaagcatacttatgagagcatacacaattggtgttgctagaaaatactcagatgaccccatctattattagccaaataaacatttcatataaatgacatttaaataccgttgggaaatgctgcagctgcttatgaaatcttttccaagctccatcatcgggaaaagcaatggatatctggtaagaaagaaccagcacagtgcgtcaacagattatatgcactacggtttaaatagttctcagcttatctgcttatgtctccagatcacttaatgaaaaaatgtttggaagatctaaagctggttttacttcaagaaaaagtaacaaaaattgtttcaaggcataaatattcccagtttacagttgcctaaggcccaaaacaaatgcattccatagccaaaattcataaatttgtctcaagtatcacatccttaactaggcatatcaaggaagagttgcaaacaaccaaaataattaccccataaatcaaaaaatcataacactaacaagaataagcgttgaagttgaagctcagaaaaatttgaagacttgtactatccattccatcaaacaatacttacattatgcgaa

SEQ ID NO: 186407 - DNA, 2750 bp, Cannabis indica
tatctttaaaacttatgtgatattcccaacctttcagcataagtataggtttcaacttagaagggtctgaaatttcattagtataaatttttatttattttttagtactattgtataacattagtataaaatttatattatttaaataatattttaacaaaattataacacaagatttttttagtaattttcataaaaatgtttggttaaaaataggttttacattatttttttgaaaaaaagatttaattaaaaattaataatatattaaaagaaagacatattttgaaagtttaaaataaatagttgaataaagtgatttgaaatacaaaaactgtcgcaaaaagttttttgttgttcacaaaattttatgtattttgtaactttatttttattattttctgaatcaaacacccacacacttgtgtttaaacaattattaaaatttatgtagaaacaaaaagcaatttccgttaccttatcttgttagatttcgggaaactaattaggtttgatatgagatcgagatattaaaattaaggtagatcgtaatgtataataaataagtccaaagtaggttattatatcatttttagtgattaattcatttgaatcataatttgttgtttgatcaccagactttaacggttcatcaatttccacttttaaacgaaatcttattagatttttaaaaacaagttagagagtcatgacataacaaagtgatcgagatattaaaattaatgtagatcgtgttaaaggaaacaaattcatatcattcgtagtgattaattttttttgcgccgtaatttgatcacaagacttccatttaaaaagattaaattaacggtttttaatttttaaattctaaacaaagacacgtgcattttttgcgcgtgtttagttttaatgttccttgcagttaataaatacaacaaattaatgtatatgtactaattaactatataattataaacataattatgtataatataagtaaagattatctagttcatcttcaaatgagttttaatatttaatttttattatcatatatttacatttatgttagacaaatatgcttgaactaaaaagtgctaagcaatagcacctcacacaagaaaaaaacatttatagaagtaaagtataattgaatttggaaaaagttttaaccaaatacgaatctatatatttcttaattaattaattaactaaataattttaaatgtatcaatatttataaagacaaacttgtctagttgtatatctaagagtaaatttgcccaatattttgtttgtgatgactaattgaaaacttttgtctaattaatgaaaactagaatgattatattggaaaacgaaatgcaccaattgcattaacatttcaaagtacaaacaaagtttataattaaaaaacccaaattaaaaaacaacagaagtaaacaaaacataataagctcttgaacattaatctaattcaaccaacaaacatctttatatgtttgaggattattgattaatgtatctaaatcaatattatgtttcatatgtgtctagacaaataattaaaaccaaacaacaacaataaaactaatataataattaaagtttaagagtcaaatcaatccctcctgaagaattatcactggaaccattggtattatcatcattagtctccatagtctccttggagggtttcttggaccccgagccgccgtcaccagtttcaccgcagcctctaccagaacatacacaaaatgaccggtttttgtaaacacgaggaggtggccattgatagggatcattaaggatattattggccatagatctatgcttgcaatgaccacaagagccaggaatagagttggttggataataatatggtgcgtagcggccatatcgcccacgaggcccaccacgacgaggtcctttatgagtatcgatcatgtattgatgttgtttctccatgatacgctctcttttgtgacagttttggtgaccacctaggccttgagaggtatcgaattgtctattgcaatacttgcatggaaacatcctcccaacaattattatttcttcattcttttcttctgctcgttggtcagaaagaaaagaattgaagagactgagttctctagtagtagtactagtactatttgaactagtactactactagcaccaacaccagtaccagcactgccaccaattcccgatgaaaaccatttttcgacggagagcttcagatcttgagtagaaggaggaggaggaggaggcatgatggccttcataattatatcctcagaagaaccatcaattaatttctccatgaatatgagctagtaagagagagtgagagagaaaattcttaattttgtgtgtgtgtgtgtgaagattaatgtgacattggttctctttttatgtagggttatttggagttaatgcattgttttcaaaaggaaatatagtccattttaccgttttcatttcatttcatatatattatatttatatatatttgctaggttatatctatagctactatatatattgtaacgtttatgaacaacaagagtaatattttggttattataatttttaaattatataattattatatagattgaagccaaatattctaataatctagaaaagaaaagaaaaaaattcaaagccacaaaatgctgtaatgaaggagtatatagttgttgttgtgtgaaacttaattagtgtgtttattaagagtttatat

SEQ ID NO: 186408 - DNA, 514 bp, Cannabis indica
gcataattttatcctgtaacatgtttaacgttaaacaaactaggtaattaaatacaatgatcataatatacatatattcctttgttaggggtcttttggaatttattctttttccatatgtgtacgtgtataattcatgaaaatagactctgatatatatatatgtaactgtttttacgcgttattaactacccgcgcttactcaaaataaagagatcaaacattaatattaactttgagatcgaatataaatcaccacatgcatgcatatatatatatatagtaggtaactaggtcaggtatatatgtacgtaattacatagaaagttcttattaattatataatattagaagcttctcttgtttctatataagaccatatattgggctcttgacatttcatcacagataatcagaacaaacaaaacaaagaaaaatcctcgatctcatacgattatcattttatttttacttactttattatggagcaaattggaaaacggtacccagatca

SEQ ID NO: 186409 - DNA, 4590 bp, Cannabis indica
attccattctattttattatctcaaactaaatgccacaaaagaatagttactttcctctccatccttcatactatctatcctttctattatttctttccatttttcttaccaaacatagccttagaaaagaggagagaggagctttttcatcccaagacccaagttttccccaatttaaatccagcttgagacgacgacgttttacactctttagctggaatatcaaaatgccacgtgtacatataatagtagaggatattttttattttgttttttgtttttttcttatctttttatattttggtgatttattgtagaaagaaaaaaaaaagaaaagaaaaagagaagagagaagggatgtcaaactcaaatgcagtggctaatggagtagctggagctggaggtggtattattgctcaaatcattacttatcctcttcaaacggtaccccaatactctttgttcttccctattcaaattctactttactttactttactttacttcgattctattctaatatatatagttgtatttaggtcaatacacgccaacaaaccgagagaagagccaaaaggattttgacctctgcttctacatctcccactcctactcccactgctcttgttcaaatactccaagtattctattctattctattctattcatttatttttaatccagataaccataaatattatatatatatatatgttattaataatttgttagcacaggttataaagaatgaagggtggggtggactttacagtggtctcaaaccttccttgtttggaacagctgcttcacaggtttatatatatttaacactttggagaattttaattacaactttctattataacttttagttaattatcgcgccccgaaatcatatcttggattatgtttttcaaatctattttcgacacggtacattactcgaaatttttcaaaaatttatactttgaaaatattttaacacgtgatttttcagacataaaagttgacggtaactatgtcttgataattattgtttacataaataatgttagtgtattgacatgtgaccaaattatgtatcacactgctacatgcaccagggaatatattattacttttaccaggttttcaagaacaaggcagagtctattgcaaattctcgtaaaaacaaaggccgtggggatggaagtgtgggcatgttttcatggcttattgttgcagctcttgctgggtataactataactataactataacaaccctttatgttatgactatattgtatatatgattttgaaaactagtacttgaataatatagaagacatgactcatgagtgattgtttattgaaataattgagaaataaaagaaatttgtagtacaactaatttactaaggtagcatttggttggaaacaatgaaaatatagaaaaagagaatgagaatgagaatgggaatgggaataggaatagattggaatcaaatttaaaacgtataaaaagaaattgataaaaaaagttattaaattttttcttatcttgcattggaatggtctttccttttacttcaaaatgaaaaagtcattccactagaattacattctaacactttaaaatgcaaccaatcaaaagaacagaataaaacttatttcttttttattctattccatttcatacctccaaccaaacaccacttaagtcttccaatctatatctcttaaatagaagcacatcatctaatcaacaaaagcaattgtgatgagacaatatagttagggatgataactactaccaacaaaattctagttggactaaaatttcagtaaatattcacacttttactgtaactagacattacaattaactatagagcagtaactatatagatgaaaatggtaaaaaactattcatccatattttaataaaagcaattaaaatgttaatgtaagcctaaaatagaagtcatacaatatgatcatatctctacttatatatgtgttttgctttaattgcagttccttgaacgtattgttcactaatcctatatgggttctcgtcactcgtatgcaggtgtactgtctcttgtctaacttctttcttatgataaatccatctttttgtttgttaactaactaccaaataaggtactttgaagtagcaaattgataaaattatatatgatccatacttggggttttgtttattttatttagacacatactcaagcagaacgaaaaattagggaggaaagaaagaatcgatggcgagggaagtagcgaattctgatcaaagcagcattactctgttgcatgacaacatggcaaagcttgattctttaaaaccgactccttatggaaccatccatgcggttagctagcattttcaatcatattttttgtttatatttagaatatatatgtatatatcattattgtattaattgtgttcttgttcaggctcaagaagtgtatagagaagcaggaattcgtggtttctggagaggcattatcccaacactaatcatggtcatttcacttcttcttcttcttgttatttattagtgcaaaagagagaaatagaagtaaaacagaaaataaccatgattaaatcttattgtatgacttcaggtgtgcaatccatcaatccaattcatgatttatgagacctctttaaaccgtctaaaggcgagacgtaataaagctagtaagccgggatcaaacacttctgcaactgctttcgaggtaatacaactttttaattgttactttcctgattcattcagtatttgaaagagaaatattaggctcatttgtgtttcttcatagactttcttactaggagccttggccaaacttggagcaactgtgtctacataccccttgttagttgtcaaggtaatacaaaccttaacaatttctttagatgaaaaaaaaatatcatcacttttaacaatttctttgcatatgcagtcaaggctgcaggcgaagcaggagattggagggaatagctccttaagatactcaggttaatttggcttctaaacctaatgatcaatcgtttatttatcaaagaaaaacttatactttgaataattcggtcataattacttataggcaccattgatgcaataatgaagatgattagatatgaagggttgagtagcttttacaaaggcatgagtacaaagattgtgcaaagtgtttttgcagcttcactactttttatgatcaaggaggaacttgtcaaggcttacgtcttaatggcccataagtcccatttatttttatccaatttgagaaaaataagataattatgtgtacagagctagctaaattgaaaaataccttaccaatttgattcatatgaaaagtttcaaatgatatattttcgtgttgaagtggttagttcttcccaactagctgtgaagaagttagttaaagttgtttaacggtttctacagttcactaatcctagccatttggattctgttagcgagctgttaaaacccctcttcaataaactcttcagggaccatgaatgtaactcaatttcatgctaataaggtcatctcttatagaactttaaaatatgaaatttgtaatgatttagcactaaattcattccaacccaattctaaaacctatcttatatatagcattgtttatagtttcccattaaatttggtggagcactatagatcatactaaaacttactttttatttattaatcactataacttttaaatttatatattctttaccattaataataataatataataacactatttaattaaaaaattatttttgtgtaacttttagagttgttggttgaagtggaaaaataatatgatacttaaactacattattttcgtgttaaactaacataattatagtgtttatgattgaagagagtagtaatcaattatatatatttatatatatggagctgtacatgttaaatttttatatatataagctcggtacaatacattatttttgtatcgtgtttaaatttgtatcatatttgtagtcgtgtcgtgctttattttggcatttttttttcttacaggccaactcgttttttgtacagatttaaattcgaactctactttcttataatttcttttacaattaatgagttagtaattaaattgagttttttttttattctaattttcaattgttttatataccttttcaacaatagttttttttaagagtaacaaaggtaactagggtatgcaaaaagtagaagattttcttccagttaaatatcttaagagtatgcagatataccacgaaaaaaataaatgaaacttttaatataaaaaaaaaaagaaaacatctaacttgttataaaagtaattataactattccaataagattatttaataataataaagagtaatgatatgtacacacataatcaggattttaaaaaattacaaaaatattgtacggaatttttatgggtttttagattttatttacataaaatatggtcttttatgtacttttatgttgtactcttattatttttttgttcattttttgtaaattatatattatttttttatgttg

SEQ ID NO: 186410 - DNA, 1111 bp, Cannabis indica
tttttttcctttttcttttctgagatcctctgtttcatcagaatttcgacttgtcttggtgtaatgagatcagggactcgaagcattgtagtctgactctgatctctttatctctctctttgttctttatctgtttggtaaattgtctttgaaaaccgaaaaaaaaactgtaatcaattcaatggaagatggtcgagaattgaaacatgcctgtaaattctgccacaagagttttccttgtggaagatccttaggtggtcacatgaggtctcacttgaccaacaatcaagcagaaactgatgagaagctcaacagtaacagaagcaagctctcgtctgtcaacaatggaggaggtggaaacaataccaaaaccaataaacctggctgctctgaaaccggtggtggtggtcctcatcaccttaattatggccttagagagaatcctaagaagacatggagaatttcggattcgagtactgaagagacactggtttttgaaaacaagtcctgcaaagaatgtggcaaaggatttcagtcctggaaagctctttttggccacatgaaacaacactcggagaaagaaagaggttcttccattaataataacaataacaattttagtttggaggaacaagattcatggactagtggtgaccagaagcagctgctggccatggatagccaatctgataatgaaaccacagctactcatcccaataggaaaagaagatctcagagaagaacaaggtacatgggaacaaccaactcttcttctttctctgttgttaacaatggttcttcttctgtttctgagattgaacaagagcaagaggaagtggctatgtgtttaatgatgctgtcaagggatgtaaacaataaccattgggtgggggcttcaaatcagtagctgagtcctctgacaacttttctgaatcctcaaaatctccatcttctagaactgtttgcaagactcctgctactaatggctctgaggttcggaaatcgaggaaacgcaatgccaggaccagtgagccagccaagatggattctggggttatgaaatcttgttctaggatgaatgcgagtgaagttaaagacaagatcaagatga

SEQ ID NO: 186411 - DNA, 1808 bp, Cannabis indica
tacttaacaccactcttccacttcattcatcacaacaagaatcatcacactccacaactacaactactactccctctttcgacgaccaacgccgaacccaaatcttcctcaaagaccaaatccccacatggttcgccgcatcaggctacgtcgcaatcgccgcaatctcaatctcaacactcccccacatattcccccaactcaaatggtactacatcctagtaatctacacgctcgcacccgttctggcattctgcaatgcctacgggtgcggcctcaccgattggtcactcgcctcaacctacgggaagctagcaatcttcaccgtaggtgcgtgggcgggtgcctcccacggtggtgtcatcgcaggcttagcagcctgcggtgtcatgatgaacatagtctctaccgcctctgatctcacccaagatttcaaaacagggtacctaacattagcttcgccacgttcaatgttcgtgagccaattgattggaacagcaatgggttgtgtcatctctccttgtgtgttttggctttttttaaaggcttttagtaacttgggacagcctactagccaataccctgcgccttacgccgcgatttatcgaagcatggctttacttggagtagagggattctcatctttaccagagaattgtctaactctttgttatgtgttttttggggctgcagtggttataaatttggttaaggatcatttggtgaaagtgaagccttcagtggcaaaatttgtgcctattcctatggctatggctatacctttttatattggaccctattttgctattgatatgtgtgttgggagtttgatcttgtttgtgtgggaaaaggtgaataagaataaggctaatgcttttgggtgtgctgtggcttcgggtttgatatgtggtgatgggttgtggactttgcctgcgtctttacttggtgtttttggggttaagccacccatttgtatgaagtttttgtccagggctactaatgatcgagttgatactttcttagctactttatcttagctatagtaagacttgagagtttttagaggattataatttgtatatatatatatttatatattatatgtgtatgcttatcaaatgtacgtatctttttatgtacacgtatttaagaaactccccatatatattaaataatatatatgtttgtgatttggttttttaattgtgttactaatttgatgtttgatttgcttgtaaataaaacgtgtcattcatgaaatctagagatcttgttatgactagacaagaataagggtaattacaaactaattaataaattaaattgtatatattaaagtccaagagacatgattggattatgttgaaaaatcattcatgcaatttcatactcaaaactaattagtgatggctccctaaaaatagtggctatttttttgtgctcgtcaatcttcaatcgtatcagagtggacatggtcattgtctgtataggtgatcacgtttaatattcaaccacaccaacaaattcaggtaagattccgaccaaatagcattatcaagccaaaacttaattaatatattaaactttattgtataattaaaattaataatgtagtttctacataaaattatctgtaactgatttttttttttccgtaaaattagatccacattattatatgtaaaaaaaaaacataatgtatctagcattttatttagagttttaaaagaataccttttttaattgaaaaaacgtcatacttgatacactagtaagaaggcaaatgactagtaattttcattgaaaat

SEQ ID NO: 186412 - DNA, 1508 bp, Cannabis indica
aaaaaaatactttgctagcaatagccagatgggaaatcagcattttaccttcgcaaagcacccttaaggaactcccgtttcacttcgaaatggtagcaggtgtgctctgtttctgtgtatgcatttgatgcccctccatgcttggacaggtaactatcatactagcaaaagaaagagtcaatctagtagccattattcaaaagatattggacaaggaattttaaaaaaaaaaagaaattaaagagggataataattgtgtaccacatgaatctacaaagccatttatgcctaaataataatatcacctcgctaagatgaaaaataaaagagaccttcatcttcatgaatagtgagaatcacatttctcatcactactatgacttaagcatcgaaatatggagaaagaaaaaaaaatcaactctaatcattccctttttcctttaaaaaaatatagttaaaagtaagctgaaatgataaacagacctcgttctcatcaggaaattccgtactccccatgaacagcatatgttctgcagtatatacaatttgtcagaatatctatgcacgtcattatttaaaagtactgcatatatttgttattctcctctctttgcaattgctcctctgttaggccttgatattagtctcaaaagtataattaattaggattatgatagctgagttttcaggtctttagtggctgtgatgaaatgcttttaagtgagctgtcctaatagtcctaccaggtgttagttaaaaaaatctgttggggtgagttagtataaatagagaggctgattaattgttaagaattaagaatttatttgcacaaaaagagtaaaacttactcatggaggtatccaaatgtctttgaaaagcttggaaagtttgcaattctttgtgatatcaatgaacagcctatactctaattctttcaagaactgaatcggtactatagtgtatcatcctcttccccaaaaacaaaaacaaaaacaaaaacaaaacaatgaaaaataaaaaaagagctaaccaagaaagtgtgcaagcccttgcgcatcaacagggtcggagaagctgcccattcctacacacatagcagcagcggcctgtacaaaacattactcagccccattaccaaatcaaatgaatactggtaggtaataataagcatggtaaagtaggtaggtgtaaagcaaatgcgcaatgctttgataaaagcaccataaactcttcaaatgtttagatacaaatcaatgtacatgatagctgtttatttctggtaataagaaatgaacctttgggttgttgctgcaaaattcttatctaataaaactaacattcgaagctggttaggagcaaagagtacattggaaacccaacttctcaattaaaagccagtgcaactaagcaaatgtattgaaggtttatcaagatttgaatacttcttcaacgtcaaattggtatagctgcaagatttctaatcccaaaagagatatatatatatata

SEQ ID NO: 186413 - DNA, 4088 bp, Cannabis indica
ttttttttaaaaaaaagttcttatacttaattaataattaaaaatagcctctttaggattaaagacaatgattcaataaaattcaagatgaccagcgtttccttttattctaaagcacataaacaataacaaaattaacattttatacaagttgcagtgatacttgaatataaaattgcttataaaatttgacaaacaaccaactttacgtaaatagcatattagaaatagtttaagtcatctttggcatcccactttcaaaatttagatgttctgacaactctgaaaaatgaaactttgcagactcattcctaatgtcatccttcatccaaaaaaaattgacatagaacaaaagatgtcatgtgattaaaagttaaaagcttacaggctaaactaataacccctacgtaaacgttcaaagttacagtcatcgtcatatcccttgtaagcttaaaaaattgaaaacccagaaatcatgcaatttgtcaattttttagtaataggatttgatttgactaaaatatcacccaaccattgatagctgatcatgtgataattacacttaaatgtgtttcccatccatttttttcacagacaatgaacgaggccttaattttcttgcaccattacagtagtaaaatagtaaaatataaatttataaatcaacgacaaaagttgcaaaggataatgtcaaaagtgaaattaactccagctgaaaattgtgttgtcagaaactaacaaacataatgatttccacattattatcacatcattgacatgtaaattctgataagaagttcttaattttagttgttgcactatattgttttccaataaaatagattaaaaagtttcatgcatcactaacctgtctggtcgatacgttctggaagaagcaacctcataaagtctgtggcccataaccaagctagaaaaatctggccatccactagcatcattgttaaaaccaggaaaaaaggcatctgcttccactgaaacaatataatcaagagcatcccaaagaagtcgatgggcttgcattcttagatccacaggtgaagggtcaggttctgtttcagtctcagtaatccaaccataccaaccttccttttcatgtctatagataggtctatctggagggggaggaagaggacgaggccttggaccagctttattccattcttcttttagtttctcccttttgactggaggtgatttaaagagatcaagtggaagaggtgtttcaggtccaaccaaatcagacagctctgcttttgtacacaaagaagtgcgatctactaagttagcaaacatggcacgcaaagggatcagaacccgttgacctccaaaaatttcagaaccagcaagatatactatggttttaggaggataacccattgcacgcagcagaattccaacctgtaaaagtttaaacagctacttagctcaaatcaaataattaaagcgaatctagattggtttcagcaacagaaagggtaatgaaaaaaacaatcatagctcagaaagtaaaggcaagcaagcatgactatatattttagcatgaggcccacttcaagaaaacaacggggaaagtgaaggaacacgagcatagctactacatattccatatctgatatttgatcacttagatgaattacactagtgaaactgaattaaattgtgctaatacataatctcctaaagtaacatattcatacatctgcagcaacctatctagcatggcttgtctcttgaaaacattatttggtacagaagcttgtctgtcggcaaggagtttggagggttgggtacatgcaatattctatacggtaacaaaaatttaattatgaaatggctgtggagatttccctgggaaaaaaatcacacttaggcatacatatatttattgaaagcaagtactttctctctgtaaatgggtgggacagttcagtatgtttgtttattcttcaaatatatcacttttaaatcagaaaagggagatgcaattagattttgggaggattacccatggtagatagatgtccttttactgtacagcgttgttgcttctcataacatttctatagcagtttgcaatgacatgggaaaatgaggagaatagaataattctgtagggttctaaagtttgtttgaaatctgaatgaggaagattttacagattgcagagttaattatggtattatatgataacaatttctatttagagcatcatgtaagaaacacacacacacacccaaaaaaaaaaacctactaaaacaaatatccagagatgaattccacttttcaaaaccttggcaaataatatcttaatgcaaatttcatgaggtaacaaaaatctcaatgcaacccagagtgttgtaacctttggaacaaacagcagaataagagaatttctataaatagtgcatcaatgaagtgaaagattttaacaaagcatacctcttcaggcatgagtgggcatgaaccattttctcttcgcatgtgagaatcgatgcttaattcttcattaacaatacctcgtttaatcatttgtgcccttcgatattgtatgagttcggtatgaacatcctaaaagatatactgtgttagctagaaaattttagaaacagtagtacaaaaagtaataccactaatgaggcccaaaagttagcttcaacacccaaatgtgatgaaacttaaaggaaacaaagataagtaaaaaacaaggaaacaatgccaataagaatataaataagctcactccgcaggttaaactaccaatggactcaagcctaattaacatgtagtgaaagtccagagtgtgcctaagataagttgatcataacctgatagggaccactgaacgtgtaggaattatgacatgaattatatcatcccaaaccaaactgattgtgttatactgtatgcaacttaaagttgcatcgctgaagatgcaaacttaatattgttgcttacttatttcttctccctagagatccagaaagtactttgatcctggaaaaaaaacaaaataggtttaaacagctacctgaaaaagttctgcacaaccattatatgccaaggtgtctctaattaagccaggatgaaaaacaaggaaaggctggccccatgctcgtaacctgtatgaaaaacaatataaggatattgagaaaaataggagaaattattacatagacattcggacatacaactgtcagatgtacttatgaatcgtgaaattattccaggtcaagtaactattttatattacatttgatctctggtagcttgcaactcgatgagccaacctacttaaaagtacttcgtcaatttcttcagatattatttcagaaaacttacagcagggtttagggtgtcattggttggcaatcgatgctcttttattattcttttattagtctaatctccctgcaaatcaaatgattcaaacctaggaataaatcaaactaacttgtagaaatagcactcatttttcaaactaaatataataactcctatgtcctttgtgcaccaactgctttttgtagaaaattactattctgagtaagaaatcctacaagacctcaagactatgtctgcataagttctctacataccaatatcttgccaagtgcattcaaatcttagcaagagaggttgaaaatcatacctatctaccatgaggtgcccgagctccctaatttcaggtcggaattggagagcgtggaaagaaactctgcatctaagcctttgaaactcagacatgctagatggaaggatagactgaaaagaggaagcgatattaatttttataagaagcagaaaaaaaatactaataatacgactagtaagagaacaaggttcatccaaaattatgaacttaaacagcaattaccaatcatatcagtaaactaacaaaaaataaaatcttagtttaaaagatccaaagataagattgttcctttccaaccaaaacaaatagccatagtggcaaacattccaaaggttttgttctttcttctacagttctatcacctttcccacttaaaccctgagtcaaattaaaacaaagaaaagaaagaaaaaaa

SEQ ID NO: 186414 - DNA, 4971 bp, Cannabis indica
aataatattttgagcattgaaactcaactatgaaatttagcaatcttccttggaaagagtataattgttgaatacattgagcatttcttcatatcatccattctagaaaataatgagaagtctcttaacttctttcaaaaaaataaaaaccaacctctccagcattgtgacaaacactaaatgcccggcctctttctcctttaaagcaagaatttgaattcaaatgttgcttgagcttgttggcaaaggtcagatcactggctttcggtaagttcgattcctcatccaacagagatattagccctgaaggtttctgcacatccaaaacacaacaaatatttgactactttagttatgtaagaaaaacaattacaacctaaaggcacagaaggctttgatcatagaaataccttctcaaagagttctaagcactcttcattgtcttcaaaatctactttcttccaatcaataccatccaactcataatcctaaagtaaaaaacaaaaaaattagtcagaacataatacgatgattatgatcactgatcactaaacttttgcaaaaccaaatgtaaatccagtgatgcaacttgaaatcaaatgagatggatttaattatatggcaagtaccactataatgaagaagttcctaagtatcatcaaattcaaagcttttttgaagccaaacattcagatatgctcacctcctgttcaagtttaagtaaatgccggttcaaatgttgttgcagcctctcatttgcataattaatacacatttgttcaaagctatttttctgaaaaaaaagaccaaagattttatatgatcacaaaacaaagaactaattttatcgaaaaatgtcaaagaaaaaagagtaaaaatattatacctgagaagattcaaacccatatatgtcaagaatactaatcgatttcccaatttgttgtttgcccacttgaagtgacttgttaatctgttctacaagccactcaaacaagcatgtatagatgaattttgccaaagcgtctcttctgtcaattgcctggataaatgaaaaaaaaaaaaaaaaaacgtgtaaaggtcatatttcactgatggattgcattctcttcaaagagatataatagcaagtggacctgctgcaaggtcaatctgttggcaatgctattattgccagcttcagttttgtgggtggataatgataatttcaactcctgggtactgcatcccatcagattggaggcattgatgagagctgaaaaagagagaaaataataaaggttactcacgtgcagaaaaacttttcatttcctcattccctagcgcagaaaggaaatatatgtaactggccagcacatagacacaggcaccacatggttattcagaacagtgatgcactgaaataacaattcaacaacattgatgtgaacaaaatatcttcggtaattatgaaagaaacaaatttaagagtatctgcatcttgaatcacttggattaatccaacaaccaaaatgttgcacatgacgtttcatttcttaacatgtttgttaagagatagccatctgccatcatattattttacacttcaaacatggaatttgaaaactaaatatgcaaacataggtatggtcttcattatacatttaaaagagaagaaatacaagtgaacatgggttaccttcatcagataagacctccagttggttcacattttcattcatttggaatgatatgtttcccagccataatacagcagcaagcattgaaaataagcattcttgatcttcttcgcaaatttgaagaatgtttagtgctttctggtaagagaaaagataccacccaaaaaaaaaaagaaacaaaaaaagatcaatttttatgatattggcagcaaaagtgggaagtaaaaaaggtggaatgaccacatgaatggtgctataaacaacaatttccttctcaccatgagatcatgaaatttctcagcttcattgacaccatcaatggtcaagcaatcactttgattaaggtatttgtactcactagccattctaaggttcagtctctctgcaaagaaataaaacaaatgccagatgattccactatattagaaataatataaaacattatctaccagttgaatggaaaaattaatgcaagtactgctaatcatttaaacaatttatattgttacaaaacttaaaggggtccatccgattcagatactttgtttcactgaatttccaaagcttatagtgtaaataaattactacctttaagatctgttggcgcggcagcacaaagttggtaaaatacatggaatgacctttcaccattgaccagctcaacaactcttgactgttccagcaccaaaaaaaaaaagattacaaatggagtctacaagtataactttaaattaacagcgaagttcaggtgaattacaaaattaccttctctaaaaagactatccacaataaaatgtatggagttgacatgcccatgaaattgtgaagatcaagtcagtataatagatggggaaaaattgctatgttataaaaaacaaggagacttgcaaaaaatgcttacatgcttggatgttggcaccacaaattttcccaagtgtactaaactgaatttcaatcaactttccctgcagcaattttagcaataatgtttacaaaaattgtgtaatgctgtggtttacaagaaaaaaaaacaggagaatactatacaaaatctttagaaaaatatcaatagtttatttaagagagagagagagagagagagagagaatgaaactcacaaatcgactagaattgtgatttctagatgttttggcattcccaaatgcttctagtatataattggccttaagaattctatgctcaataccagaactatcaccactaacagctgctaagtattgcattgcaattctagctgtctcagttttcccagctccactttccccactgcaaacaacaaaaaatgttaagatggtcttatggcatgaattgagaactgaagaaagctgaaaggtataaaagaaaaactttaacgcagatactaatataaagaaaacatatcatactctaagggtctaaccttatgattatggattggcttacttcatctgcataattattaaaaaaaaaaagaacttcagaaacatgttacttattgctacgagataatataactctcccaacaaacaaaagaagatataaaagccgcacctctcatcatctcattataggcagtgtccacggtagcataaacatgaggactgtctaactttttctgcctataagctgtgatcaaatcatctccataaatttgaacatctttgaagggattgacagcaatcagaactggtcctgctttactctttagaagaaaaacaaaagaacttcaattgacagaaacaacaacagatgaataattctaaatgaacattgaagagcatcatacttacgtaaatcatatccttagaatatctatgctggatattataaacagtagatggttcattcaaataactaagctgtacaagatcatccactccttcaagtatatctgggtttgcaggtaatatctctgatgcggtgactttcataacctacggtaaaaatataagatttatttatacaacaaattaaagtacacaaatctgcagcaaaaggtttcaatcattcaaatatttacaaaaaggtgcatgaacatacatttccatttgacaaagaaacagttgcatcttcaccagagtttgattgtattgttcctgactcccactgcccattcgccaatcgacaccaaacacgaagtttctgaaaaaaaaaaaaaaacagagttgatgtcatgagtttatacaccctcaaattctcaaaacatgaagatgtactggttcaagttacaaattttcaaacatccaaaagatcaaccttttagaattgctggatggatacgtatgcaaaagggtaaatactctgtaaaacaaatctcattgaagctagccctatgccttaaacagcaaaaaaaggatttatgaaatcttaagattacagggctaaaattcaaacaccctcacactgaaaggcccacaggacaacactccacgtgttcattgaggacactctcaatggctcaaaggtcaaaactaaagtattaatgtctttaaccagagattaccatgaaaccaatttaagcaaactgaaaacttccacccaaaacccaattaaggacacatctgagatcacagccaactacaacaccttaaaaaaaaatatatacctttttcatgaagtagccgatgttgtcatcccaatctgttcctcgtatcttcgtaggcgaggccgatggctgatcggagatccccgccagctcagttttactctcatccagtacggctgcgtacggcgactcaacatttcggtatttcttcatcttcttgctcacaaaaccacttctcttggcaccccaatcattctcttttctcttagtttcttcaatttcacacggaaaacactccggcgactctgtatcgccgtcgctaccaccaacaacaacctggaccttaaagttattaggcaaggaccgcctcgccggaggaagacggcccctcgaagttggacgcgccggcaatgcgggtggcaagtccttgggcttctcgtcttcatccttacgccggagcgaatccaacatttcctccaacgagctccgaactatcaacgatggcgacgccgataacatcatgtttcctaaacctagaaacttcaaattctacgagagaattcaaaacccaacccaaaaaaccaaaagctcaaattagaaacctcactacgaaaaccaaagattccaaaaaccctaactccaaaacagagcacctgaaaaccaccgttcttctttctaactcctcaaactctttcatcagaaaaagagaaaataactaagacaaaaaaaaaactaacaaaacaacgactt

SEQ ID NO: 186415 - DNA, 4128 bp, Cannabis indica
gctgctgttgctgttgctgctgctgttgctgttgctgttgctgttgctgttgttgttgttgttgttgctgctgctgctgctgctgctgttgttgttgaacatgcctctggagcaaaagttgctgcatttgcatctgctgaagctgctgaggtttgtgctgcaactgctgctgctcttgagccttgatcaattgggtctgacatttttcaaagagacattgggaagacaaaaaggtgggtcaaaaaaggtcctctacatatacatttcttgtgttatttctagctgtggagtccaattctcatgtcccatcaaaataaaatgtatgacatcaagttagtcaaggcaataacaagcaaagaaatctagagagcaaaatctctccaccaccttcctttcccttgtcaggaaaaaaaaaaaactcaaataaacaaaaaggtacaaaccaacctcaatgtaagatgcggctggttctgagtgtttttcatttgtcctagcaataaaaatgtcccaaaaaacagaccaccattcaaatagaaagccaccaggtgcatcaatagctgtaggttacatcaaaatccaaatatacaaatcactactcaaataagctatgacaaactacagaaactgaaaacccaatattaattcaacaacatctctacttattcttaccaacaggatctgtagaaactttcccttcatcttgaaaagcctttgcagatgcatgtaatttccttttcataaggtaatcatagatatacacatccagcctatcaacaaaaataaacagaaatgcttgatcaacctcatatttattcattgggaaaaatcttgataactaattaacagttacaggtaatccaaaatccaaatgaaaaccaatctaggaaccaaattccgcaaatatataatatatgtacatatataaatcagagcatataggtgttttttaaactaaaccttacagcctccctcactacttacgcaccagtcgtatgacactcaaacacacataacaaaagactcaacgtccttgcctgtcctttcatccaaaacagcttaaaaatgaatacgtaggaataagagcattgcaacttataaaaaggaaaatgagaaaactagactcaataatctatggtttttttaaaacaaaagcgttcatagactcaataatctgtaagatatgaagaacatccacttagccacacctacgaggcttataacttggtagagtataaaggaaaaataaaatgcaaaagggcattgcgaaagtacaaaagaacaaaactatgacttcattttctatttgtctgttctcaaaaggcatgtggaaagtgaatgggagacaattaccaattctccactccactctcaattataacatccagtcaaccaagaaaacccagaaaaccgcatatacaaaaataaacacaaaagttcacagataaaaacccagaacatagacttgataactcttatcaaaaaaaaaaagcatatgtgaaaatccacgtgaaagaagcatagatataccctcctgatgaaatattaacataccaatacgaaaacatataaaacagtaaacccatttgagaaaaacgttaacccagatgccaaaaatagcaaacgaaaataagagaaacccaaaacaacaacacaaaaaacttcatcatcgaagggcagaatcttgcgaaagaagtaaaccctctccactctctcccttctctcctccccgaccccaccgaaaaaaggaattaacacaagcaaaaacggaaaataaaagacgaagctcaaataaaccttgcatacccattcaaagagaaaaggagtgggagataacattgaactgaaaaccctaaaaaacccaaaaacatactcaacccaaagccccaagtgtaggtagaagagaccatggacaaagaaacccagaaagaaaacaacgagaacaattttagaaagtgcaaaaaaaaaaatagaaaatagtgtgtatgggcatgggtatgggtatgtgtatatgacttacattttatcggcttcccagttagtctgagacatagttatatcaatgttagaatatccgaaaatcccaaaatgagaagaaaattgaagtagaaattttgaaggtgggtaggggcagagaagatttgtctggttttctctctttctcggtccctaatttacaaaagcttccattttgaggaggaggagtgatatagcgtcgtcgcctccttttttttatatatatattattaaatattttttcacgttttctgattggtttgattttatctatttaaaaaaaataaaaataatgtataaatatctttatttctttagtgactgggttcggattcgggttcggttatggatttgggtttgggttttgggttaggattccaataatgaatactttttgtcttttagctttgagaaagaagttaaaaattggaaggtctctctctctctctctgccctgctactgtagtctactgcaaaatttcacgctaccttttttgcaccaaaagtcttcgtcctcttttttcttttcttttttcattccaagcattttatcatttttaatattttaattttttataacgagaaagaggaagttttttgtgagggaatattttaggatagtgagagtctcgtgatctacagaaaggaaattaggttaagttatgcatattgcaatttcacatcaaaacctaagaaaagctatgagtgtgacgattataagattgtgtaattaaattgaaaaaaatttaaatggattgatggtttttagtaactctttacttaaaaattttaaaattaaatgtagttaatttagtgtaattttaaaataagtgattttttgaaaagtttcttcaaaaatgtatgtatgcgagtaagaataaaacacactgaaacgacttacacatataacacgacggttacatactttctcaagctactcaaatagtgaaaaacaaataaattagattaaactgtagtttaaaatacaaaaaacatttacaaaaacaaataaacaaacattctaacattaaaagataaaaataaaaaattattattatttatgtgcatagttttcatatttgtgattaggtaatatcctttacacaagttgtgttggcctatcaaaatcatcaatattatttgctcatcgatcatgtacgtgttatgttatgagcattctacaaataacggcaagtcaatttattaagcaatcaccactagtgattgataagaaagcaaatccaagtcacctacctaataatcattaggattagtttgtggttgtccttaacttttctctttatatttttcttcatgggaattttatataataatcaacttatcatatatgtacttcgatgactatgtgcattcttatttcttttcataattatttagtataaattatggaaattactcattcatgcttatttttaagctataaatataaataaatataaaacactattttttaagattaagaaaaattaacgagtaaaatttaagaaatatgaaataaaaattaaaaatttaaagtggttcaactattaatcatcaattgcctcctaatttgatggttacttagttagaagactacattgatacttatcgtcgtgataataggtttgagagtcgttatcatgttgtattgcatcttgatactccatcagatgaatttaggtggttaaggctagtgtcacaaatacaggctaagagttttgacacgacacaaaattgacatgagcttgtaaagcacgagcacgactctgcacaaaaaaaaaaatataagcttagacacgatatgataagatattgcaaggaaacttggcgcgacacgagacaaaaatataaacttaagcatgacacgacacaacaagtccgaaggcacgtcacataagcataaataaagtagctcaaaagcgcagtacattaaaaagctccataatttgattagaatgaaaataaatatttatttatcaattttaaataaattatgttatcccattttttgcactatgacgtgacaacacatattggtgacacgtgactcctatttcctacatctggctgaaagagatattccaaacagagttcagcatacatctgcacggatag

SEQ ID NO: 186416 - DNA, 1803 bp, Cannabis indica
atttatttgaagttcgaaagtggtgtataatctgttgaaagtgaagtagcagtttgttttcttcgtgtaattcccaatcttattgttactactgcgaataagactagatctacagagctcttcccaatcttattgtgaaaatatattttttgtttggttatttgttttgttactgacctagtttttctttctcctataatttatttgtgtaggttgccaaagacccatctggtaaagagatcaatgcacttgaacagcatataaagaatctgctgagcccatcaactccgacatttttcaataccctttatgatccatacagagagggtgcagatttcgtccgtggatatcctttcagcctacgggagggtgttataactgcagtgtctcacggtctctggcttaacattcctgactatgatgctcctactcaactggtcaagcctagggagagaaacactaggtacgcatgagtatagacttgttattcttgcttcaaactgattataagtttcgccaaattggttgacccgtttaagtttttccctttttcaggtatgtagatgcagttctcacaataccaaaatcaacccttttccccatgtgcggcatgaacctggcattcgacagggagctcattggaccagctatgtactttggactcatgggtgatggtcagccaatcggacgatacgatgacatgtgggctggctggtgcatgaaggtaactttttattatgagctgttaagataaaaccattttgaactcctaccattaagaattttgtgccgttaaaatctcggatacagttatggtaattttcttagctgctcagcctaatttagtggttctttaccagtctttatctagaattcttcgtggtaatgtagccgccgtgtcccatcttacagaatatttctgtagctttgtttgttagcctcaggaatatgcttgcttgccctcatatttgaccccattttttgctttaaggaggctgctgagttgtcaaatcttttgtgacataatctctactcccgtgactatgcatgagaaagaaagacattactatcatttcgatttattcccaagagtcttacacaaatcaaattggtgaattttgtaggtcatttgtgaccatttaggatatggagtcaagactggtctaccctacatatggcacagcaaagccagcaatccttttgttaaccttaagaaggagtaccttggtatcttctggcaagaagaaacaatcccatttttccaaaacgttgcacttccaaaggactgtaccactgtacagaagtgctacattgaactctccaagcaagtcaaggaaaagcttgccaaggttgatccttacttcgacaagcttgcagatgctatggtgacttggattgaagcttgggatgagcttaaccctcctcaggctgagggaagctctgccaaggtcaccaagtaaactctatgcttattcttgaagaaactctattgaagatgatgataattactctttcttagcttgctatattgttatttgttgtttttttaaaacgctatcggttttgtcattatttattatatttataaaattttatttgagaagcttcacatttcagagccttgttataacggttttcactcttcagttttacagtacgagttaaaatggcatttaggaaaaacctgttcttcgacaaagaaaagaattgtttttttgataaatcaaagaaaagaattgttggttttgagatttagagacattttcatttgttgggccgagtcgaaactgaaccgtactattt

SEQ ID NO: 186417 - DNA, 3837 bp, Cannabis indica
gatctcctgaggcttatttcaccgaaattaaagtttctcaaccactcgatgatgatgatgatcataatcctaatcatagtcagtgggcctccatcaaggtaaatgtactcaacatgcaactggccttgtcgttttctggctagcatttaatatatattttgcattcaattcagttctctctatattcaacatattagaaacatcagcattgctatttttgtactcgaccacatgaggtgacagtggttagcaaattctaatggtacacggtaattttaaattattttagggttatggtattttggtattttatcaacacccctataatttagaattttctgaaaatgcgcatcatatttttttggtaatctaatcgaaatttatatataaatagaaaactaagcataaatattatcacataaaagtgtgcaataatgtggtctacccccaaattctagccttaaaaatctaatttccacactcaatttcccagttatttagtgcatgtttggcatcataactaaaaaactgttttttgtttttaaaaacagaaaatttttttttgaaaacaatttggcttgtttggccttattttttgaaaacaattttcaaaaaacaaagttacaaaaaataagaattttgaaaacaacaaactgttttaaaaaccaattcacttttagtcaatattgtttttagaaaatactaaccaaatatgatttgtttttaaaaacttcaaaaactactttttgctctcatttttaaaaataattttttgaaaacaaaaaacaatacctaacatgctcttagttttacagttctcttacttcttttttcggagaaatttctattcttacttttttttctggagaaatttctattcttacttttttttccggaaaaatttctattaattgcatacatttaaataaataataaaaaaaacctatacaaaatataaatatttcaaatatataaattacatcaattcaaagcttaaaaaacaaacccttaatttgtatttaatttatttctcaatcaaatatattaaaatttatatgaaagtgacaaatcatgtaaaagtatttcctaacaaagtttatctgaattttcttcaataatatcattattcattatcacctttttaaatcaaaagttaaattattggctggttgggtcaatatgtgggagcgttgtgtttaagtctaattaacttacatttaaacaaaactggatgtacgtttttttcttctctcaatggaaaatggtaatattatttcctggaatcatatattggccaatattccaaagcacacaatacttccaactaactactgatagaatcactaagaaaaataaataaaaagatacttgaagcagatagtagtcatgtatgtttctatttgaaaattaatatctgctattttgattatatacaatagagaatgatatatttccctcattttaatctatattctatagagactatacgaggacatgaagacaagaattgaaagtgccacaaaagttggccaaatttcagaaattatgcgaagagaacacaaggggttttgtgagtgggactctattttaagcaaacgtgatcatcagaccattattcaagtattgccattcttactagtaacaaaaacataggatcttaatcgattgattggtcctttaaaagtttccagttagattaaattactatttatatatatataatatgtatgaattgtagattcttatagatggaagagaccccaaggcagtagacattgatcaacatcctctgcccactttagtatacttggcacgtgaaaagagaccccagtaccaccataacttcaaagctggagccatgaactcactggttatatatagtgataatttagtactagctattactaattaagaaagtttaacttacactaaaagcttaattttctgtttggtagataagagtatcgggacagattagcaatgctccgataattctcaacgtggattgcgacatgtattcgaacaattcagagtcagtgagagatgcaatgtgcttcgttttagatgaaaagaaaggtcaggagattgcttatattcaatttccccaggcatttgagaacatcactgagaatgatatttacaacaattctttaagagatttaatggaggttggcatgtgcttaattaattaccatattatataatagtacatgtccttacttctcttgatttgataagactatgcatgtaatatgatgatcccaaggttgatcttcgaggatttgactctaatggagggccttgctatattggaactgggtgctttcatagaagggaatctctgtctggtaagaaatacaatgaagcggataaaatattactagattgtaaaacaaagagtgaagatgagggaattagtgcagaagctctagaagaaacaagcaaagttcttgctaactgtagctatgaagaaaacactctgtggggaaaagaggttaattgcactcaaaaatatgttcagctttggtaaattgcggtgtttttgtactaatatcaatatttgtatgcagatgggtttgatgtatgggtgtttagtggaagacatgttaacaggacttgtgatacaatgtagaggatggagatcagtgtattatagtccagagagaaaagcttttctaggagctgctcctacaactctgctcgaggtccttgtgcagcagaagagatgggctgaaggagatcttcaaatacttttatcaaggtattgtccattgacctatggctacggaaaaattccccttggacttcgactttcatacttagtctactttctatggtcccttaattgcttcgcttcactctactatgtcatcgtcccatcactttgtcttctcaaaggaatctccttatttcctcaggtaacaaattaaccatttgggattgtaaataagagtagtgctgatgagtagaataatacaaatatcataagattaaatcgaaacttgtcatggcagatgtccaacatatggtttgtaccatttgtctatgtcttctttggcaaccgagtgtacagccttggagaacatctgatgtgtggagggtcataccgagaatggttcaactgtcaaagaatgtggttgttcaaaaggacaacttcttttttctttggtttcttggataacatgataaggctattgggattcagtggtgcaaccttcatcataactgcaaaggtggttgatgatgatgtttctgaaagatacaagaaagagttaatagaatttggtactacttcgccaatgttcaccattttgacgacccttgcattgctcaatgccttgggcttgatttggggtttgaagaggttgctcttcacagagcagggtttggttctgaacccatttctattgcaagtggctctttgttgtttgttggttttcatcaatcttccaatttaccaagctatttttataagaaaggataagggtagactgcccaactcagtgatttaccaatcgattatgctcaatctagtagtatgttcgattgtactttattagaatatttggcaaaaaaaaagtaatagttgtacttggtcaagccagcttgaattactctggtcattccatttgtaatttatataagttgaactatgatctttatgctatggttttctttttgtagactaatttcatttgtctaaaaacttttcatcatgctgtttcttttcatggataattttctctataactcccatactaggactaggagaaatggaaggggctagaaagaaatgtcacccaaatatattatgtttgtgatcatataatataaaaa

SEQ ID NO: 186418 - DNA, 1613 bp, Cannabis indica
ttccctccaaactagcttctcccttagagataatttctccttgatcaaaaacctcatcaacattaggagcttctttcaaattttcctttgttatcaatgactcatttaccaactctggacttgctacattgtttcctggagcatcaaatatgatccctttctctatctcatcagctttggaagactgatgcatagtttgagcttccaccttctttaggcctgaacttttttgtgtacttcctacaatcgaccataatgtggccatagccacgacatgctttacattgaacaagaagccactcctagtgtacctcatgctcaataagtttaccatgttcattcaagaattgaatacttatcggtggctcatttgttatgtccatccccactagcaccctagaaaatttaaccatgtaactctcccttgtaaccctatcagccatgattaatttaccaatcatgctaactatagctcatagacacttactttcccagtagtaaagtcctagatcatgtaatcaaatctagaaaggaactgattttacaagacacaatgctgtaaaaatggttgtccacagtcgcacaataattggctttcaatcgaatcggagcactccatccttaaaaataagatctatgcaatccctattttacccatttgcatttaataaaatcttcgaaaacagcaaaaagaagattagctcctaacaccatacacactactgctacacttctcattgcggttcgcaatttaacctcatctaaaactacttgagctattttcttattgtctttcaaaatgggttctgtataggtcagattaggttctttgaaagaaattttaccttcagtgaatttcttccaatgttgttgagagttcaaatggaattcctcctgttcgacctcttcagcccaactagatttctcatctcaaatctccttctcaatgctattctcttctgtcatatcatgatcaatctcgataatacatctccagattgtaaagcttgagtaaccaactcaaggccttccaaaccaacattctcctctgaattatgcaaatcatcttggattgaagggggtccacgagattcaatcgagttacaggctttcgaatcactcttttcttctttgccatggaagcgagaaaatgaccacaggtttgtgattgttgtggtgagtagtctttcatttttttttcctgttaatatatattggttgttgcattacatcaagtataacggtgaacaataaaataagataataataaataataaacaaataagaagttgtggctctataaaattaaataataaatagatgaaatatttttcactcaatttttttttgatcaatctcgattactgtagatctcattcacttgtgatagttatgacaactttaggtaattacagagtgtttcaaacatgttcaacaatcgaattgtcactttgggtattttaagatcaataattgcaatataactaagattgtatattaactctagttatcaaaagtttttaactggtctagaaattattgtcaagtgagctcatttgtggtagttcttactttagttaaatgattagcgtggtacaattttttttattttt

SEQ ID NO: 186419 - DNA, 9647 bp, Cannabis indica
atcccaaattaatgaattacataatctaattaaaaaagaattgcaagcttttattgacgaaattggatcgaaggagaccttgaggagccattgctctcggtgatggtactctcaactcgtacagtataaggaaaatcatcttcagaaggcaatactggttcaagagctctctctgcaagcattccatgaccaatttctcgtctactaggaccaccaatccgcccaacttccccaacacaagaaggaggaaacgtgtactaaaagaagaagaaataaagatagtgagttctaaatatattaaaaaggttacatggtaataattgtagcaaacaattataaaaaggaaaaataaaataaaataaaatccacaatgacctggagatagaacctcttccagtcatctacaccaacaaggttgtctattctctgtgccatttgacgatcgccaagtgtagccacggctaaggactgaaacatccacaaagaactgatgaaaatatgacaaaatagaagcaacagaggaaaaggttatagtaataatgacaaacctcacttaacaacataatatgcacaagtataagtactggaatgaggaaaaaaacaggcgtggatgggaaaaaatttggattctaggaagaccaatccatgtacataaatgaaaacaaacactcaatcaggtagtatataacccgtgtttaacaaaattaaactcccttagacctgagtttcaccacgtgtaaaaagagcactcccatgtgctcttggaagtaggccacatcttgaatttattgggcgtatttcttctagagttcggccatcacttcttcttccattctgtgaagaaacacacaagtaacaaataaataaagacataacccatttctatgcttctgttggtgttcttctagtttcagtttatgttacatggacaaggaattaaaattatatgtctatgtaactacataattatataatgtaataatcaagtaagaataagaagtgcacaagcatatagaacaaaatgtcctaaaaattacagaaaagaataaatggtgacatttagtcagaggcacttctctttgcaaacaaatatccatacctcaacaatgcatctacgcagatacttggatgtaacttctttaaatactagcttcacatctacttctgagaacagctagaaaatagacagtaacgtttccgcagcagaatgatagttagagaatattatacagcaattcaagatgctatcaatagaaattgtatgtacaggtaaaagtagagttcttccataccaatggagtagtttttcgtgaagtaggctttatatgaacatccccttcgtccacttcaccatctacaaccacttcctcatcctcatcttcatcctcaagcaaatcagatattgtttcattaactacaggtgttgtatcagagctaatgtaccctttttcgctcagtatatctataactttatcttcaagcaaagttagggctttttttctaggtattttgctcctaatctgcaagacctgcactaactcattgccgataatatcctgcacaaaatacacactcttctgatcaacattttctgcatgataattattgttataaaatatagcttaaatatttgcatcatccagtatgtttgggttgaggttctttcaaatgagtacaatacaaatagtccttgtatatagctattaaaaagaagttattccaacattgattgaaagtacatacttcaacatgcttatagagctcaggaggaggcaatttgattgcatcaaacatttttggtttcccacacttcttaaccaaagactccacctcgttgcagattcctcgtacagcatcctgatatccaaagattaaaaataaaagaaacatttttatcatcgcgaaatcttttaataactaactacatggaccatgatgaaattcacttcaaatatgttccacacaactagcaggagtgacatgggtgacaaattgacgaccatacaaaatgaggaaatgatgtacttaaaattttcaagaattttcaagattgaattgcatgtgacaatacattgctacaactattgctaaataaaagatatgccaaatgctttaatactgatttgcatatcaaccataaccaatttacttcttgcactaattacaacgaaaaaaaaaagacaaacaaattgttctgcaaacatttccaaacacatgcatagtgtgggatcacataattaattgtttaaaaataaataaataaaaaacaatgccagcatacagctacatactcaaatgaagttaacaacctgcccattgtacagcttccagtaacttttcctcgggaagaaaatcacagtaaccctgcaaccatagtagataatgataagggaaaaggataaatcatcaccagaaaattatgaacagccagcagaaatagcaatgattcaaatgtgagtgcatcttactaatcaaaaatatcaatcttttcttttcctattcttggttagacaggagcgaaggaaataagattgaagttcacatgtggaaattcagttcacctcaaaaaatatattctactttctgtagtggtttacacgattacaaacatagtatattcagtctctttataataagtatcaatcaaatttaggcacatacaccaaattccatatctaagaccatcaaatgtctcaagtgacctatgtgtctataaaatatatgcacatacaatataagaggaaaagaaagataacgataatctagtcacaaattaacctcaaattttgtttttaaactcaacagtagtaagtaaatattcatgacctttaagtagtatactaatcatggtgtcgcaagcttgagtgcaaaagagaatgaacaagtcaaataaaaactaaatcccaaacaagctactatgtaggagaaagttcctactactagatgacattccagctcagcatatataatcaatacaatcaatttatgaaaatattaagttagttgataagtgtcctgctaaaaagaaatgcaatcggttaatacaagctgatttgcagtacaagtctctacctctatcattaatattgcatcatctgtgcctgctaacaacaagtccaacttggagtcctccatctcctttgttgttggattgatgataaacttatctccaacaaggccaattcgaactccagcaatagtctttgcatttggtacttccgataaagcgctgtaaaatttataatcaggctaaaggatgtgctactctaacaagttctaaatgtgatatcaaagtggaagcacgtgataaaataataaataaaaaaaaattacactgctattcctgcagctgtgattgccaaagcatctggagagtgcaaaccatcataactcagaacctgcatgcataggaagataataaaatttccaggaaatgcaaaacattaatgtagaaaaacagctctaacatactgacctgttcagaaaataagtgttaaatagttcttaacaaataaaaagcatagagtagcaggaagtagcaagccgtcgggcttttcatagagacttaatacctagtttgtttgtgtaatttgttcccttttctctttctctgtaataaacaaatacttgtaataatacatgctatgtgcatatatttgttgcaataactaaaagtaaatgttaacgcacccaagaaagtatctgagtttcatggtagaagcctttcagcattgtcggacgcaaaggcctatcaatcaatctacagatcagaacctgcatgcaacagaaaaaaaagaaaataaaaactattgtaataattatataggaagagtgaataaaacaataagtaatttaggttaaaaaaaccaagactcctttaaaaaaatggaacaagaattttttagactaaaaaaatattacctcgtgatcttttgtccttccttctcttttgaaaaaccctccactgtcacagtaataccatgaccatgaaagtgtcaactcaagaaacaagtgcacaaaagttataagaagcagagaagaagaaagtcaaaactgatacctagttcgacctgctgctgaaaaacgctcttgataaaatacagaaagaggaaaaaagtctgaaggttcacttggagtatcagccaaacaaacagaggtgtagacaatctggaaggaaaataaaaatgttttatgtcttcacattaggaagctttcaattccatgcaaccatattctgtctttcaattttatgaattaggctatctaacaaactgttaaaattcacaagcaagatactggtacatcagggcacattgtatgatgggattgggatgcaatgcaagcaacataaaaccaggatagttgaccagacccgatcaattgaaaaacattttaaatatgtggtgagttgcttgataaaagatcaatttttcatattcaaatttaaaaattgagttaaaagtagacccttgtgaatgcagaatcaccgtacatatttttgaaaaacagaaagcggacgattgagtaatggtctactatttggtgtcatcatcacaataattgaaaaccacaactatgacatttccattccatttctttgtttggttgctttataaagcattgcaatggaatggcatttccactacttttgtcattccaatacacaaataaaaatatcaacttcaattcttattccttttcatttattttcattactcccaaccaaaccaccctatgttcctaagttgaactcctgaacatgatcatactcatcgttattataagtgttattagaccctaatataatctatccctttcatacataaaaaccaagcctggaaaatggcatttacccaaaagccaaaaactttacaacaaaaaacagcaacttttttacttacagtttcaccatcagtggctgtaacagaagcgctagcttgtctaccaatatgtccagtctcaaccaaaatctggaacaagtaattctgagttatacaaacaaacaaacaaacacataatgaagagaacaagtgagagtgagagcatacacatacatgtctatcgccgacggggattttgatggaaaatggttcgggtagagctctgcaggcgaagcgagagggagtgctattgttttgagagagaaggagagagaagaaagagtgagacttgagacggagagtggaattggggagacggcgacatggaattgaaattggggagagagggaagtggaaagggagaggttgaagatgaaggtgaggtttgtgagtgtaagtaagggtagtagggtttggtgcttgcattttgcttcttcttcttcttcaagcttggtctgagtggctaatggaaactctgagtaagtttatccgttttggttttctgttattattactcttctcttacctaattattaatttatttatttatttcaaagcttattgctaattaattaattctttaattttttacctaattattttttattttttacttaaaatctccattttcattttacctagttaattatttatttttatttttttgaaaaatagttaattatttattaaattatgaaagaagaagaagaaaaattgttctttgttatttagagataagtgtgggtaaaaagatcacttagcccagttagtcgaaatattataaagtgtcgtcctataattggttatcgattttttataatatttattaaagtagaataagtgagatccgatatagagtttgcaccaataacaatattacacctcataagagtgttaggcaccatgaatgtcatttagcttttttcaatattcgaagacaaaccaaccatttgggtcccgggatatgagctcacgcttagcaagcaagctatccaagaatcaaaagtggatgccctcaggggtcatctgggagtagaagatgaagagacgtccaggaacgaatggtattcaggaggccagcctatgtgacactcctatgacatctcctctaccaagtttcgaaaaggtgcatattttttgggtcaatacctactactctgatattctctctcaataaacgacaactcaaactcaaacgtcgttatcaacaataccttcatatacgaacaacgactattctcaacattgggtctcacctacctggcccaatataactaatattatattatatttacactatcagtgagtttttttagcaaaaactaaatcctaacaagtttgggttagcctagatatctaacattttgcttataatcctaatccttcatgcaaaagggttaggattattattgttggaaaaatcttgtacgagaaaggagtaaatactccatagtcaaagaacttgtggactaagatctattaacgctgcaatcactttaaaaaaaaatctcttcttatttatattaaatacatttttgttagcttaattttcttttaatttgattttcaaaaaactcggtaaacaatttattgaaacaaacaactctaattttaaaattttgccaattataatatctcacttcttatttaactttagtttaatgaatatgttgtaaatttacaacaatatggtgtaaagaaatgcaattaaaaacacttaaaattacctaaaaccataataaatattctatgtaataaaggtggcaagcaaaatggtcactgttttttttttcaaagtgaatggtaattttattaatcaattgcttcaactaaagcattttctaaattaaaactatgatgtgaatacaaacaagaatcacaagcaatacaaggagcgactttatttaccgaatgtttaacaaatgataatttaacgaaatgcaaagaaactagcaaaagcttacattcatgcaccacttgaccaaaagggaaggtcggcctattcgtcacactagcaatcgcttgaaccgagaccaaagaatttgattgaagcctgagctttgtcccaccctcaacaaaatgctcattacaagtattccaaataatggcttttacttcttttttctgttgttagtgatatatgttgaatgttaattgtgaattgagcatttttcactcgacgaattggctaagagatcatcataatccactttctcattttttttgcaatattttttggccggattcggtgattagcacagagagattaagtactcttattttaaaccatcgatcatgagctttactaattactcaactgaaataactgtattatattaatcatagggaaacttcgttggtttgtacttattataggtacataattaacataacacatccacacatactataaagactaagcctttcaaatctctactattatggtttgagtgaacttcaagcaacaatgaaaaacatcattgtattgatcgatcaaattaataaagctcttcttcttcttcttctttcatttcatcctattccatacgtacccctttttttttcactttctcccacttttacgttacaatatataatcatcatttgaaaatgaataatgtatcaaaactaactccacgtgtaaaaatcatcaaatatatattttgatgaaagaatgaatgaatgcattatgtaataagttcaaattaaaacatgccttctcttctaatatcaacactcaaaacaatagccttcttctccctattcctcttactcatcaaaactactcatcaataccatgatcgtgataatcatcaacaatcatcaactaatcctctttccaaaaccaaaaccaataaaaccatttccattcatctcacaacaacatcaacaatcctcaaaagagacacgtgtgcggcccttcatgacttcacaaactacaccaccaaatgtgcttacctcgaaaccctagacacactcataaaaaacgacacgtgcagaccaaagggctacataaactacctcaaactcttctactgtcacttcggtcgtttcccacttctaggccaagccttgctccttctatggcttgtcattttgctctacttgttaggcaacactgcggccgtttacttttgtccctccttagagagcttgtccaacatccttaaactctctccgaccattgcgggaatcactctcctgtctcttggcaacggtgcccccgatgtcttcgccatcatcatctcctttacgaaatctggagatgctgacgtgggactcaacagtgttttaggaggcgctttctttgtttcgagtgtggtggttggtgtcatcagtgttttgattgagaaaagacgtcattttagtcgtgtcattattgataaaactagttttataagagatgttacgttttttcttttttctctctcttcacttctggccatattcatctttggtagagtcaatctcttcactgccgtttgcttttttgccatttactttttatacgtctgttcagtctctgccactcacttctttttctcaacaaacgacaatgtttttgacaaaacgacatcaacaataccgttacttggttacgtggatgaaaatgaaaatgaaaatgaaaatgacattgttcatcctcaaaacgacgaaataaaacggggtcgtatcttaggtgtggttaagttgactttcaaggctttgatgttaccccttgacttgccgagaagagcgactattccggtggtgacggaggatcaatggtcgaagccgtacgcggtggtggccgttgcactagccccgattctgatggcggttttgttaaacacacaaagagaaaacgttgactcgaggaccgagttgttgacttacatgacatctggtctcacgggattggttcttggaaacttggcttatgttacgaccaatcgtgacggtccacctaagcaatgcttgttcccttggcttgtgagtgggtttgtgatgagtgtgacgtggacttatctagtggctgaggagttggtgtccttgttgctcgctttgggtactgtttttgggataagcccatctattttaggcctcacggttctagcctggggtaactccttgggtgatctaatagccaacgtggccatggctttacatggtgggcccgatggagcccaaattgcgatttcgggctgctatgctgggcccttgtttaacacagttgtgggagtgggcttttcgttagtgatggcggcctggactgagtatccattgtcgtatgtgattcctgatgatcattctttgtacgaaactgtgggctttctcatggctgggcttctttgggccttggtggtcttgcccaagaacaacatgaaactccatcaggtattgggctttgggcttcttgcactttatagctgttttctctttgtgagactggccagacttttgggctttcttgggctttccacactataaaccaattcttcaacactgacgctacagttttcaagtactctaaggcccatgaagatttatgaaaattaatgttatctaactatttatagagatacccagaagaaaaactatttatagagataggtatattatattaatatatgcaataattcaaaagatatatagcaaatcatgttatcttttggtatcattatgaagcaaaagatacattagagactcctctcaaagcattatcaattaataatgatggcataatataataaaatttgtgtacaagaatttgtatatatatatata

SEQ ID NO: 186420 - DNA, 2945 bp, Cannabis indica
tttttttttttttgaataataacaaagaaattattcaaatggatataaattataaaataaatggtttgcttaaccataacgaagaagtcttgggtttaccaccccgaaatcgaattgaattttccgcgaaagtccaactgtccaaactcccaactattttgttttcccccaaatccttctttcacgttctgaatcccatatatcatattcagggttcaattacacacatattatttatttttttttcattttttttaatcaggggtgaaaatcagagtttctgtgaatttttctttctggaagggatctgaacaagtttttgatatgagtatgcttcacaggagcttcaagccggcgaaatggtaagtatatatcttttctaatgtattagggatgaatttggggttgtatttatgatcataatgggaattggattccagagttttgatattgaatttttactatgtagcaaaacggcgttgaagctctccgtttctcgcataaagctcttgaataataagagagaaaatcaggtgaagcagatgaagagggaattggcccaattgctcgagtcgggccaggttcctaccgctcggattcgggtatatctctcatctttggccatagtattatttaatggatccctgatcgatttaagtttatttatttattttgtttttcttggttctggtggatttgtattggaattaatattatcatgatttataaatggtttaaaattgtaagttcaatttggcacagcagagagtgaccttagtagtacattcaagatgtctataatagaaagatggtcacagtagtatggttattataagaaatgagttccttttaaggcgtatgaggatgttcgagttaggctagaatgaaagattacttctttatatgagaaagagagagttataaagtgggttggtgattggaaataaaaaagaacagtaattttctttttcttcattgtgaaagggtttttactttctcattggtacgaggattttacattttgtagagtagcatagtttatttgtgctcttatgtaatgaggctaattggccgtggataaactttagcaatatttttccgttttttctttttgatacctgctttaacttgaaaaaagttgagattaatggggataacttaattttgtatggtcttttaagctttaggaaattttttatgtttcaggttgaacatgtgatcagagaagagaaaacattgacagcttataattttattgaagtatactgtgagcttattgcagcacgcttgccaatcatcgagtcacaaaagtatgtacatattttaaatcttatataatcttcattgcttatggattttataacatgtggatagttagtttagtttgtcgctggacttgttttttttgctaattttatatgccaataacattgtgcttattttttcttggtctgtctttagaaactgtcccattgacttgaaagaagcaattacaagtgtaatatttgcagctccaagatgtgcagacatacaagaactcgcagatattcggaaacattttacagcaaaatatggcaaagagtttgtctctgcagctattgacttgcgaccagattgtggtgtgaatcgtgtggtcagtacatttacgtgcaaatttccatgatatttataatttgcaaaatgaaagtgacccatttacagaaaacaggtgactcagcaaaaattagcatagtgtgattgattattttcatgtcttctgtgaaacagttagtggagaaactatctgccaagacacctgatggtccaaccaagctcaaagttttgaatgccatcgcagaggaacataatgtcaaatggaatcctgactcatttggagggcatgattctaatcccccacaggacttattggtaagattaattaacatggtactttttgtccctgactagttcttcaattgctgatggatgacatagcatcaggatgtacaatactcctcatttaacctcattactacttcttgataaaaacaattttaattgagcagaatgtaccaaataattacgagatgatgagtaaagttcacactgaagcttctcctggcccagttcgcatccaagatgacaaagaaccaccaaatgtccaagtgccacatacatacaatcagaggcatgatgcatatgtaaacttcaatgagcagagtgtgagaccgacatctggttatcaaagaagttcttctacagatgttgcacccagcaaggcaacgacatctaatactttccatgcagaagtgagatcatcaggtatgaaaactatttatttgtggattatgacttttgcttactcatgttagggcttacctggtgatgcttctcaaatttaaaaaatttcttagcttgtttcttacataattgattggatatttgggctgctttatcttgcaggccatgcgacggaacagatggaatataaacaatctgtgtctggaaatgagaatgctcattccatgggtagacagaactggaatatgcaatttaaggatgccacttctgcagcacaggctgctgctgagtcggcagaactagcaagcatggctgccagagcagctgcagaactttctaggcagtattcctcagaattacataagtcatctcagggttccattcaacaagatgaagaaccccaagtctatgcggacccaaagttgcaaagtcaccatattgccaaacaagcagaaaacaatgcttttcacagaaggaattctggacaccacgagaagcatatcattgacaaagaacgagagcagctttatgggacagctgaaaggtttcatagagacagttataagaacagtgatagatgtaacaatgcagcttcctttaagtccagtactgcttcaagtgatgattctacagtagtgaatagtctccgaactggggacagatat

SEQ ID NO: 186421 - DNA, 1218 bp, Cannabis indica
gttcttgttaggatctccttcattagaatccactcctcttgttacagttgctgtttgttctctaattgagacaaggtctaagaaaagaaccatcccttgttcagcttagtcgttctcaagttgaaacaaggtctaagaaatgaccctcaaattaaacacagattgttaaaagccaaaaagactcatgtatctattaatgatcagtcagttgcccctcgcgaggtacacttttatttttcttttgctatgcctcttttattattttattgtttcattttttaaatgtttttaacattatcatttattagtttattatgtgtaatttttttttgtagggtacatcgttcctcattcctcgtagtctacatcgcaacgtcaggattacttacgaaggcattgatggtaaattcattgggtctattcgggaaactctttcaacaaaacaatttccagatttctttacttcttgctttggccagtttgcatcgttggaacaattcacaattcaaaatcagttaattcacaattcactccttagagagttgcgacaacccaatccagttgagatttagattgggatcaatggaatgcagctaagttttggccgaggagagtttgcccttgtagcgggtctacaatgtttggggtctagggataaattaaaatatgttcgacatgaaaatggtattcaatcaacatattttaataatttgaagttctccaaggaacaattgagtaaatgttttgttgaaaagagatggaagaatgatgaggatgctcttaaaattacacttctgcattcctaaaaaattgctcgttcagaccttgttataagtgtcacaagaacacttaaatatattggatagtggtgcattttcagagtttccttggggacaagaagtttcattttccttatgaaaaaattgaaggcaaggattaacttgaagaaggtggaagaagccaaagcacattctaggaagccattttataggcattttgggtttgtatatgcatttcaagtttggttctacgagtgttgcccatacatgaacggtggtcttgccactttgcatcaaggttcaatttctcgtattgttaggtggaaatgtgatttgaatcctagattcgaggatgtttctataatgctatctttgccaatggatgaggtattttacattgtataatatgttcttactattatatttttatttattattt

SEQ ID NO: 186422 - DNA, 1837 bp, Cannabis indica
gccgatcctaatatagtaacctatacacgcccgcacttgattttatctcttgttagagctaaaagtcgctgaattacccgaattgtccttattcaatacgtggcactttatcactcgcttgctcctttggtaaaattgactattgaatttagaaaatatggtgttcttcttcttgtaataatttaattttttgtaattaaaatatttaaatgtatagtttcagcattgtccccgtttttattttcaatttaatttaatttaattttttttttcctaaatattgatttctattttcgccttttctttcttttctttgttgatctattacgagtcgttttgaccagagacgaagaagctaaaccagttgctttcgtcttcgtcttcttcttcttcactcttcaatgtcgttgaacttgttcaattaatctcggtcttgggttctcagatttgagggggtgaagtgtttgttcaacggttttacaaattgggggaagagcaaggagaaacgacgattcgatttgaggggtcaagtgttcttttttctttctttcccaatctctggttttgggtcattgtgttagggttttagggaaatgaagtcgccgcttgataagttgcgcaaattcgcactgtataagaatgattcgtctaaggataagagaaatttgcaatcttcggctcagttagatgagcttgctcaggctgctaaggttagctttttttttttgcccctaatttaatttaatttttttagtactattctaatggttaatacagtctccttaactcggtgctggaaacaaggtctgtgaatttatgtagatatatttcatatgatttgtataaaatctgtggaacattattgcctatcgcaatttgagggcaacgactcggtgtatctattgttgatttttttgggtctgaattgagtgttcttctgtatgggtgtgatattctccattaagttttcccttgataataataataataacatttatacccttgttacacttttctaagaatttcggcaaactgtgtctaatttattagttaaaatctttgtggggggtttaagttagttttgtgtgctctaatgaacagaaaagggtgtgaagttgagatcttgctgaagataatagctatccaaatgctacaatttgtcactgtagagatgaagattgtagatttttggttcaaaccatagtttcaggggactggtttttaatatcaataactaaaattatttaggctttctttgtctttagtgacacatgtgtcaagttatcaactaaaaaatgcttgtttttctatttagcttagtttctaaatttgtgttctcattcagcaaatgcttaactttgtaggacatgcaagagatgagagagtgctatgacagcttactttctgctgctgcagctacggcaaacagtgcatatggtagacattgttattacatttatactacttgatgtcttgtgatgtatttcttttcccgttatagaaagatttgggaatgtggttatattcttcttatgattcgttattgttcacctattcaaactcgttgctaaatcatcatatgacgaagctaattccatatataacttgtttggcttcgttaaacatcatgtcatagtctttccccatttgatcctagttgcacttgcagaattctcggaatcactaagggaaatgggaacttgtctactagagaaaactgcattacatgatgacgaagatagtggtaagtggagaaatgtgttcttctattcttgttgtggggtctggagaaaactgcataatggtgcagaagataagatagtgctagtgcataggg

SEQ ID NO: 186423 - DNA, 3378 bp, Cannabis indica
aaaaacaaatttacacacaaaaaaaaagtcagtgagtgttaatgactatatatagttttaattaactcttcaccaagatatatgctgtcattattagggagtaaaattaatagaagagatgacataataatatataatgatcgatacaactttggtaaaattaaatacatgacaaaggcaaagcaatgatgaatttaatgatcctataaatataaatataagtacttttgctttcaaatttgaattaatatttcatcggtttttgtagggtgtagctagctgcattttatttttaagtttagcaattaattacgtaccttaaaatataaaaataaagaggggttagttgatcaataataaacatggattgaccagtccaatccaacattatcatgatcattttacttcattgcacctcacatggatggctttccacctaatgttattttcatacaagttttctactttctactctttaacattcaatttcttttttttttttcatttaatctcttcacaaaaacaaagaatgcatttttaaatttttaaccctcgtatatattttagtttagtttaattcaactactattttttttttgtacctatatgttaaattaaaaactcaagtgatgatgatttttttgtggaaaatatttaattgcgtcgaaataattaccttgaagaatctatccaaagaaaacctggaagaagagaaattaatatatattatatttatttattatttatatatatgtgtgtgtgcatgttggaagtaggtccactattaatggaaccggaaaataattttaagaaccggaaaacgctctaaacacgattcggaaatttaggacaaacaataattacctactgctctttatatatatatatatatacattatcaattcagtgagtaattaatatgactttgagatcagaaaaagaaaagctttgtttaattattccactcatctgcttcagttgctatactatatatattattggccttgacttttttgatatatattttgacaagaagatagatttttattggccagactgtcctaaaaaataaagagggtaaaatagcaaattattttatttggagaaaatcaacattaatcataaattcaacctaattgtctcacatttctttgaaaaatcatatatatgtatagccaaaaagtactttcgtttagaacaatctaggagacgttggaggaatggtgatatatccatgtagcttaagcaaaccatagtataaatttgtaataattattggagtgtggtagagtagagactatatgagtccaaaagttctgagcaatagggttaataaaaagtgaaaaaaacttgggcatatatggcatcttttaacgtacaatattattcttttcttttactttctcctcattatcattacctcaaaccctttttcattggccaatgttctctctctctaccactaaagctgttttcattttccccgtcttttaagatatataaaagtggaatgaacccataatttaaaaaagaaaacaaatatactaaattaattaacaacaaacaaaacaaaggaggttcaacaatcaagaccttggaaacttccacaactacctcataacattaacccctactccaatcctatcaatttatctataaccaatgcatgtgacccttctctataatatcaacaatactatatacaattattctaaatgaagtgattaattttataaattggtaaaaaaaacaacttacccatctccatctacactacttacttacttacttacttacttaccctaccactccttactcgagaccccaccaaatatagtagatgatcacattcacagccctattacaaaagagaaccctcctctatataaccctcatatcatccttgtattgtatacacaacaacataaattaaagaaatgatcatggctaatagaggagcattggttgcagctctactcgtagtgagttgcttcacaatagaagcattaccagtgtctcaaccaccactccacctcccaatccccacagaagccccagcccaccctccttcctaccaccaccaccaccaccctccggccgccgcacccgctcacccaccacaccaccaccaccaccaccaccaccctcctcctccttcttcctcccctgtcccagctcaccctcctccccacaagccatacacccctgctcccccacccaagccagccacaccaccaccaaagccatacaccccaccacccaagccagccacaccaccacccaagccggctacaccaccaccaaagccatacaccccagcacccaagccagccactcccccacctaagccagccactccaccacccaagccatacacccctgcacccaagccagctactccaccaccaaaaccgtacaaccctgcaccaaagccaaagccatcgactccaccagcgaagccgccggttcacccaccttacgttcttccaccaaggaagatggtggctgttcaaggagtggtttactgtaagccttgcaaatactcaggagtcaacacactattaaacgctacaaaagttgaaggtgagtttcttcttctgttttattatataaactacataatgacactttatttaaccaatgtgggactttcttatatctgaattttgttttgattttatataggtgctagtgtgagattagtgtgtaaaaacacaaagtaccatttgtacgaggacggaacaacagacaaaaacggttacttcgtaataaaaccaaagttcttgacaacttatggagttcacaagtgctcagtggcattgctcaagtctccactccccaactgctacattccgcggccctccacggtggtgacaagggtggcattttaaggcctgagatgcccaaatcccccgtcgacaaactcgcccctctttactactctgtgggtccatttgccttcgagcccaaaaagtgctattaattaatcatcaattgaaaaagaaaaaaagaagagatggaaagaaatgcaaagaggtgttgttgttgttgttgttgttgttgttgtaatgtgagttcaattgtttgatctttcatctctttctagcttaggattttgttttgtgttgattttagtcctttttcactaaattaattaagtcgtgctataattaatgttgtaatgtcatgaaagcaaattagtagtaagtactctactcattcacttgggtggattattttacttacgagcatgataataataaagtaaaaattattattgtgatgttatgtgtatattaaattcaacggtcataattgtactgtagtgacttaattacttactagtctacgactacatcacatgtcaatgtcatatgg

SEQ ID NO: 186424 - DNA, 723 bp, Cannabis indica
aacgaaacgacttgataccaatcttagtcactgctttggaggagacgacacaggtacagtgatccgagacaatttcccagctgaaatgagaagtcgagttagggaaaatatcatttcactcttcattaacaaaagcatggttattttagaataaatgctactcaaaccatcttggttaatagaccaaataaactttgagatagtgtacttgagaagctcaacatgagcttgtgtaagccaatgagttgagtctgctaagtcgttcagggtgatcgtattcccacctgctctttcatcaaagttaaaaaacgtattaaagtccccaagtaaaagccaaggctttactagatgcttcaattattttaaaaacttgataattgaaaatatttataaaaagattacataaatgcaaaattcaaacaaaactaaaagtatgtttgtttcttacttcttcttatcagtcttatggagcacaagaaaagaaacttcaaatccccctcttctctcaataacattgtagttctccatttgacctctcacatgagtatatttttcattcttctaaagaatctaaatcctttaaaaccaatgattatatagtgtaataagtccaccatgaccaactttattagtagcaggatacaagtaatcataccaaccagttggagttttgagtgttggggtatcaacccaagtcccccattagaagaatagacaagagtt

SEQ ID NO: 186425 - DNA, 2343 bp, Cannabis indica
gagaaaaagagaaaatttaattttacttttaaaaaacatcaaagcatatacctcacgaactctactctctgactcgtagctccagcggcattgatggtaccctaatgcccacttaggtggcataaacacggttcctggtcaggacatcctcaaatagtgtaaaaatataaacttacacaaaaatataaaataaaataaaagagataatgccaacattatagatgatgatgaaccagtaacagcacgttacattatatcagtaaaaagatgggtttggaaaagatattacaatatgaataggtgacttagtatatctatgtataacatatttaaaaacaaaatgcaagataagaaaattaaatttagtatttaccaattgcatgtgataatgatatcaacacggcatttggtgaggcaaatggaccaaatgtaataactggatatggggatgaagcaataaactgtattattgactcgtttctcaaatcaatctgcatttgacaaaataaacaaaactaagttcgcgtggttttttttagagttagctaattaaattccatgtacagcttaatgtgaaatttcagcacctcacagcgccgtgttgtgtcagcaagaattcctagggcctctcctgtaggaagaacagccagcacccaaggatgtgattgatacaaggatgtcgttccagccccataaccccatgcatctgtattccatgtaaagacctgaaaatagaaacatatttaccaaatagaagctaggagattatcctgcaaatgcatcattcatacaactactaaccttttttcctgtacgctcaagttgcccaccaacctctccagtcccataaaaggaggtaccagtaggaagctaattcaaatcaaagttcaattatgaaaccgaggcaggggaaataattaaatgcttaaacacattgggaaatattttggttaaaattacacagacaaaaacaagaaaataataactgacctctaacttaacatgttgttgtccaagacggcatttaaatgcagggatatatgtaggatcaccaacactgtggttcttaattggtgtgtctcttgccttggtatttacaaatgaaaggcttggataagctgcatctctatcacttgctgtacaatcaaatcgaaacaccccatcctccaagataggctcataaaccatatttcctgaggcatcagcagtgactgctttcgtttcatgatcagccattttacatgtgaattttccagtaaataacttcttgttaggcctcttctttctggacaacaaatattcaacagagaattacttgagcagttactgtaaaatgatgtaaatactctacgacagtactatgaagtctgaacaccgcagagatcagaattctaaaagaaaaagaagttaaaaataagataaaaatggtatggtgatactacaatggacacacttaagaggaatgcactactaatgcatcctttatcggcaagcaatagaattttttagtccaaattttttcatagttttataattatttaagacatcctgcaacatacacgatcataaaaaaaaaattcaactaaaaattttttccagatgccgaatcagataggggtgcatttgtgtaccccttttagaaagtgcattgtaaaattttccaaaatggtaagagaataatcgaaaatacttctttaactgaatatgtacgacctatctatttcggaacttaggagattttttttgtctattttttttatggttgtgtacattgtattctgttgcatgtgtaactattttattttacacgtatttaaaataaattatttgaacattactttttatattgtatattattttgaatttatcaaaatttaattttacaggatgtcttaaataactatatcgtacacgattatgaaaaaaaaaattaaatattttttttctagatgccgaaatagtaaagtatgcatagatgtatttttttttcggagggtgcattatagaagcacccaataataatatttttaaaacaacaaatgcataaaacaccaagggcatgttttataatcggtagcaaaacgaattgtaaagggtaaggattttgggagatgtaaagtgtaaaatgtttcccttaaatatcttcaagcaactcccacattaacttctaatagcaataattcaaatttcctgtttaacactaacctttttttttaacacaacacagataattaactaaatttacttaaaactcaaactaccgatcctttgactttctttatggaaaaccttagtaaacatgttttgagtatacagaagagcaagaaaaattaaaaaaaaaaa

SEQ ID NO: 186426 - DNA, 4180 bp, Cannabis indica
ctgcaggaacaaaagttttgagttttacacaactccaacctttccaaactcaaccaaatcctaccaaacttcatagaacattcctatatcatcaatcacctatcaaaatccaccattagagctcaagcttgagttccatcaactcaaacttgaagctctcaaccaaacctacaacaaagcaccttaactaccctctataactcaaattaaagcttcaaaatataatctaacctatagccatctatacagaagtaaatccccaaaaagcatgtttaacctaactttacacttagaaaattaaagagaaaaagaaagaggagcttacctttagctgaatctttcttaacctatgaaatttcttgctgaaaatctttagtttggtctcaaattgaagaaagaaaatttgtttttctatatgttcttcttgagtcgaagtaagatggagagaaagagatatatttagtctttttttatttttttatttttctttgttttagataataaaaacttactttatttagtaagttttatctaaaagaactaaagatttatataataatctcactaataaaataaagccaaatgacacttaaactcttgtacctaactcttaggaaatctctaacctaagggtgatttggttataattaattacccagaaatacttcgataaaactaaaaccaaccaaacttaacaaaccactagcaccataaacttatacagctgtgatatttctggccactaatcaagtctccacagttgccagacttgaaaatattttatgtcactaatagcatatattatactcacatattccaataaagtctttgtaattaataaattatatttattcattcatttatattaaaaactttaatttccacataactggattagtaagatcataatcttacccattatacctataacaagtttattgttttatattttataacatatgccctaattatcaaaattagattttggggatattatagtaggattgctcatagcaactcttatccttgggtttgtggaggagactggaacaagattttctcttcttttaaaaaagatgggcgttctccctgaccaatgtatcttatgaataatttctataaagctttgtctgatttttttcttcttgatatgggtttttcttgtcccaaatttacttggtcttacaaacattatgatgcctcgttcaatcaagaaagcttagacaaatttgtatgcatttcttcatggtttgatctctttccagactcgtgtatatctcatcttggctttactgctttggatcatcatcctcttgttttgtctactattccaaaaatagatgctaccactgataagttattctagtctcatcttcattttggaaatttgtgggctgacgaggaatactgtgttcaactaattaagcaagaatggcagctaaagcacactgaccctctccaaaatatctatcaaatattagtgtcgtggcttcaaagctaaattcttggaacaaacatccataaacgccataaaaaatccattaatcaaaagaagagggaatcgactcttgtgtattctaatcttaatcattctaattgtaatgagcatagaaagattaataaggaattagatgtgcttaattaaaaggaagaaatgcattgggcttctcagggtaaaagttcctggctcaaacacaaggacaagaacttcgcctatttccataagtgcgcctctagaaagaaagctcagtatgatattttttctatcattaattgtaatggtatgttagtgcaagacaagaaagagacaactaatgtattttgccatgatttttcttccgtctttactttgaatctcgcattggaagatgatttaagtcacgtgttatcatcaattgaagctaacgttttgggttctataaattcaaaacttatgagaccttttttttacgattgatgttaaacatgctttgttctaaatggatccctctaaaatcactggtgaggattggatgaatgctgatttttatgaaaagaattgggaaattttcggtgttgatgttacaagtgcaactcttaattttctcaattgtgatttttctctaaaaggtattaatcatactctcatctatttgatttttaaaattaattcccctacgaagccttctaagtttagacctattagcttatgtaatttgctttacaagattattactaaagtcatgactaattgctgaagagaaaagtgtctttctttcaagtcatttgaaaactgataatgcacttattaggtttgactgtatcaatgctttaaaaaagaagaagaaaggcaaagatagtttttttgctatcaaacttgacatgtctaaggcatatgacagagttgagtggagattccttgtttgtgttatggataaactcagttttcacacgaattggattgctaaagttatcaattatattttcacagtggagtattctattcttcttaatagtgagttgcgtgggtgcattattccacaaagaggtcttagacaaagagatcccatatcctcatatgtttttcttctttatgccaagggtctttcttcttttgtcaaaagagattgctccaatgatattttgtgtgctttatcttgtggaaggccaggtcctaaaatctctcatcttttatttgctgacgatagtcttttcttctttgaagcttctcttgctcattgtctctattttcagatgtttcttaattggtatgggaaagcttctgcttagttagttaattttgacaagccaacggtttttttcacctctaatgtggacttgggtgccaggtgtgatttggtggcttttcttggtgtgaatgaggtcagttatcatgagaattatttggggcttccaagctttgtaggtcataacaaaagtgggtttttaatttagtttgtgatagaatttggaagtggcttaataattgaaaacctaatttgttctctatggctggtagagaattcttaattaaagttgttatccaatccgtttccacatatactatgaatctcttccaacatccaatgaattttattaatgatattcatagtgtgtgtgatagattctggtggggtggttcaaatgttaaaaagaaaatgcaccagtgtacctgggatcaactttgtaaacataagaatgaaggtggtatggggttccgcaatcttcctctctttcaaagctttattagcaaaacaagtaagacgcctttacaattttcttaattctcttgcagctcgtgtcattaaggcttttatcactgcaacaagaatttaggaaagtcatctcaacaaaaagagggactagttgctaatgaaaacactatatttatttttaaggacaaatggtttcctttgaactcaagcctcattcattctactctgagtctgattggtaatgttgcctctatttcagagctttgttatgctaatggaggttgctattcttctcttgttcaataggtctattctgtggaggcatctttcgttatcctctctattccatggcctttgcgaggtattcctgaaacatttgtttagagattccaaaagcatggtttctacactattaaaattggttattagcttgaaatttgtgatgttacggaatctatggcttccacttccaatggtgtttcccattgatggcaaactttatggaacttaaatttacttcccaaggtaaaacgttttgcttggagattgtcgtctaattggattcctacaaagattaatctttaaagacatggaattctcaacgacaatttttgtccaatttgtactagtgatccgaagactactcatcatgctctttgaggatgtaacaaactcgtctcagttcgaaagctatgtgcttttaagatgtgatccaaacatgattgtaagtgatatttatggtttcatttgtctttatattctgcaacttcttcaaagtaagaaagattgatcatggtaacatggggcgtatttggtacagacaaaataaacacattaaccacagaatttagtgagcggtgccaaatctttctatagattgcttcttctgcctcttttgctgtcaaagtgcctatggtatcggttcatatttggttactcgaagctcatgtagaggcaactacggcaggatccgtcatcttggtagg

SEQ ID NO: 186427 - DNA, 5346 bp, Cannabis indica
ttttaggttctttatttgtagaagaaagaaaaaaaaagaacaactatagtatatatgttgtgagctacatacaaatatagagctcataaagtcaaaacctgaaaccctagacaattaaaaacccaccaaacccactaaagttgtcaacttacaaagccaaatttatgtcatgatcatcatcatcaccttattatgatgtcttagctaacattaacggtaaacaaccatatgtgtatatttgcctgaaaaggagaggggttacgcttatgtataaatatctaaactactacttcatcttcatgttaattatataaaattaattgtttaaaagatatcaattacttacaaaatttcaatatggatacttaatttaccaagagtaaaactatggtttattcaacaaattttcttaaacaacaaatatagcaatatactacaacttgttataaatgtatcgaaacattatctagattccattagtacgtatagctaattgatgataattatcttccaagtaaaattaacacggtaatgttattagacatcagtaatgtcaataaattgtggccttaattaacgatattttataatacttattcaatttaaatatttaaaatttaataaattatactaataattaatatatgtatatatatagtttgaaatgtggtattaagtattactaataccctttattatttctcaataaataaaaaactaattagaatttttgccttccaaacttttacatgtactattagtgaacaaagttagttattagttagtgccagctgtgcgtgtaggatagagtttgttactcttcgcagctggacagttagttgattaactgtattctgtttctacactttgtacaaagccttgtctataaatacaaattcattcagagctgagataacaactcaagctcatttttcctaaaataagtttctcaacttggtatcagaacttaggttcttcttttttttttcctttctttgttcttcgaagacttcttgaagcattcatccatggcttcctcctctgctgctcctcgatccgaaggttccaattccgctgctactcatgctactccaattgcagcagagcaagtcattccgcatcatcttgctcctctcaatttacgtctcgatcgcacgaattacatctactggagatcacaagttctttccacggctagagctcatcaacttgaaggttttctcaccggttctcgaactcgacctccagccaccattccagattctcttgatgccacaagaatggtgccgaaccctgcgtttgacgactggatgcgtttggatcaatttctcctaagctggctctttaattcgatctctgaacagatgcttggacatgtcgctcgatgtgcttcatccactgaactctggagtgtcttaagtcagctcttctccaacacatctcgtgcacgaattcttcaattaagagggatgcttcaatccacaaagaaaggatctactccggttgacgagtacattctcaaaatgagatgtctcgcagatgctttaatggcagcaggccaacaaataactgatgatgagctcatcctctacattcttggaggattaggtaatgaatatgactctgttattgtcactctcacctcaaaagatttcattaccttgcaggatgttcaattttgcttcaaactcaagaacttcgtcttgagcaacaacagtctcctactgccttggatcttcataatccaacagcaaactacgcttccaagaaaagctcttctacaccctcaaatactggaaattccaatcgaggtcgtggtgcttctcgtggcagaggtggtaggccaccaaataataacaatcgaggtggaaatcgaccaatttgccaagtctgtggcagatctggtcacaaaatgctatcatcgatttgatctgagttaccaaggaaaaggcaactccaactcaacagaacctacttcagatgagccacaagcttttcttgcttctgcaacaactgttgcagaccctcaatggtatttggatagtggagcatcgcatcatgttgtggctgatgcagcaaaattgagtgagacagtggattacaagggcaaaggtaaattggttgtaggtaatggtgcttctcttcccattcttgctattggttcttgtactatcccaacatctaaaccattgcatctccataacattttacatgtaccgtccatccataaaaatctaatcagtgtctcccaattcacctttgataataacattcatattctgtttgacactaatcactgctttgtcttggataagggcacgaagaaggttcttcttcaaggaacacttagccaaggtctctacaaactatccttgccatctcaagattcttgcaacctgacttctccaaatgttcatctagctgtaaatagtgcagatgtaattcccaattcagatcaacattgtaatgtttcccagtgtaatatcaattctgcctactgtaaggagtccaatcgaattgctgcactttggcacaatcgacttggacatccatctcatatcattctcaataaagttttacattctatggataaaacttgctccaaatctgatttaccattctgtgatgcatgtcaatatggtaaaaaccatctaatgcattttttaagtgttcctttaaaaaccaccacttgccttcaactcattcactcggatgtttggggaccctcaccatacccaactcctgaaggctatagatagtacatcttatttgtagatgattttacaaaatatagctggatatatcccatgaaaaccaaaacagaagctgtccccattttcttgaccttcaagacctttgtggaaaaacaatttgatctcaaaataaagggtatgcaaaccgattggggaggagagtacagaaaattacaacctatactacaaactctaggcattctttttagacatccatgtcctcatactcatcctcaacaaggaagagttgaaagaaaacaccgtcatgtaactgaaatgggtttaaccatgctagctaaagccaatatgcctctaaaattttggtgggaagcctttgtttcaactgtgtttcttatcaacagacttcccacaatcgttaacaagtacaaatcaccctatgaaagtctatacaagctcattcctgattatcaatttctcaaaacattcgggtgtgcttgtttcccttttcttagaccatacaacacacacaaatttgagtttaaaacttcaaagtgtgtctttcttggatacaacccattccataaaggatatagatgtctacattccactggtcgtatatacattgctagaagtgtcaactttaatgaatctgaatttccctattcttctctattttctgtcaagaatcatccctctgtcaaaattaacaacaatcttttagcacatgcctttgttattccagttatgcctactcactctccaaccactccacctattcagtttggttctgtaccaactgaagaaacagatcgtgtttcatctctttctcccagccccacactacacactactgatccaaacaattctgcaccatctccattcagtaataacagcaactccaactcgaatgagttatctaatgatccctcccaacctgctgtttatataccacacttaccacctcccttacctccacgacaccatatgcagacaagatcaaaatttgggatatacaaaccaaaagtttacatggtgacagctaccaaacaacaggtttatgaaacacctagaactgtcaaacaagctctcagtttacctcagtggagaaatgcaatggaccgtgagaatactgccctcaaaaagaaaaagacatatatcttggtgccttattcccgtgatatgaatcttttgacaaataaatggattttcagaaccaaatatcacaaagatggcagcttagacaaattcaaagcaagattagtagcaagggattttcaacaaactcctggacttgatttttcagatacttttagtccagtaataaaagcatccagaataagaattgtgtttagtttagctgtcacttttcaatgggatattcaacatattgatattaataatgcattcttgaacggagaactccaagaaaaactctacatgaaacaaccagtcggctttgaagacccagaaaaacccgatcatgtgtgcttacttcaaaagtctctctatggtttaaggcaagcaccacgtgcctggtttgacaaaatcaagactgcattactgaaatgggactttactgaatctgtttctgacacttcactcttctatatgaacatatcaggtgaattacttctggttttagtctatgtagatgatctcttgattactggtgccaactccactgctgtctcaaaacttatttctgatctacacaatcaatttgcattgaaatccctcggttcagtaagctatttccttggctttgaagtctacagaactggttcaggattatatctcactcagtctaaatatgctgctgatttacttgacaaaactcagtttcaggatgccaaagaatgcaccactccgatgatacaggctaataaattagctcttgatgacagcaacttatttgacactcctagtctctatcgaagcaccattggagctctccaatatcttacacttactcggccagaccttgcttatagtgtaaacaagctcagtcaattcttaaaagccccaacaatcaatcattggaatgcatgcaaacgagttcttcgatatatcaaaggcacaccacatctcggtttacacttcagaccttcccaaatgcttcacttagaagcctattcagatgctgattgggcatcaagtttggatgatcgaaaatcaacatctggtgtttgtttatttttgggtggaaatctggtaaattggagctgtagaaagcaacaagctgtttcccgatcgagcactgagtctgaataccgtgccttagcatctgcagcaacagaacttgtttggattacatccttgcttacagaattgggaatcaagttgcataaacaaccccccactctatggtgtgataatcaaagtgcacaagctcttgcactcaatccagtttttcacacaagaaccaaacatattgaactggatgttcactacatcagatctcaaattgcagccaacaaacttcaagtctgctatattccaacaaaggatcaaacggctgatctatttaccaaaccactatcatctcctaggtttcaatttttgtgtaacaaactgcaccttgaacattccaagtatagtttgagggggggtattagtgaacaaagttagttat

SEQ ID NO: 186428 - DNA, 1348 bp, Cannabis indica
ataagtataacgaagtcactgatcttcagtcatccaaattttaaagtactatagtaactccataacaatcaatggctttaagtcccatatcattacttgtcttcagacctctcatcctctgcttattaattattacaacctcaggtaatgtctctcccctttttattattaataattatacatatatatattcctttattcaaaaatgatcttataattttaatcatgcaatactcgttaataagtacttaatttataaccagggccaaaaccatccgaaagtaagagaatattcaccatagtaaattactgcaaggaagtaatatggccagcaatgacaaacagtaacaacttcaccggtggaggaataccaccactaaaaccaggccaatcaacagtctacaccgccccgccgcaatggagcgggcgaatttgggcccgaacaggctgcaatttcgacaaagacggcaacgggaaatgccaaacaggcagctgcggaaccctgctgaactgcacaggcccaagtacaccaccagcctcaatagccgaatttaatctaaacgaaacgatggattattacgacgtgagccttgtggatggctttaacttgcctatagttgttaagcccagcaacggcactgggaattgtagcagtgtcgggtgcgaaggcgatttgaggcagagctgcccggcggagcttagggatgaagccacgggcaaagttgttgcttgccgaagcgcgtgtgacgtgttcgagagggacgagtattgttgccgtggaatgtatagtaaatcctgtgagttgtgttgctacgaattattcgaggattttttaaggagttttgtcccatggcttatagctttgcctatgatgatcctactagtgttgttacttgctctggtgccgattatactctcaccttttgtggatcaaggtaataaatatagtgaattaatactacaacaatttcattaataaaaattaaaaaataaaaatactacaaattttatgaggtaggattatttataaatgtaatttttgagtaataataatgattgtaatatgcaggaaccagacgttctgctcatatcatgataacaagctcgtttgtagtagtggatcaaagaatgttaaagtacttctctctcaaaatcaaaaaatgtactggggttttattttgacattattatcttattttatttttgtaaatgatcattatttccgaccctagctagcaaaattgacgtgtacagttaagtaatctgtcttttttctaagtcttttcataaagtatatttctaatcgatcattttttcaagtttccttataaaatgtgtaattttctgt

SEQ ID NO: 186429 - DNA, 844 bp, Cannabis indica
attaaaataattccaactcccatctcctttccctttctcaagtctttttttccaacttacatactgagtttagtggctagcacacctgtgattccaacccctcattctggtcacatcctttggggaccttgggatgcccatcctgaaacatacaaggaaaaagaggaaaactcagatgctttgtgtcaccctccagccacttaggatggaaagaagacaatttctctttttctggtaccaaggccaaaagaagggaagtggcccagctctataaggaggcagagcagcccctggacccaaaccagtaaggcttcagatcatggctcatgcatataccggccacacccactatggatgtgatgggctaggtctttggtaaattgggtggtgtggaggggtaaggaagggttctcccagggccttgcaaaccagctttgcccatcacatgatgtgctaaaaattgaagtctagaatttctattacattaggctggccatcaccctcacgcttgactcgaatattatcccaaattgaacaagccccagagcaagcaatcctctgctaggagtgtcgtgataatatttaataaaagctcagatttgctgagtggttccaacgtgccaggcagtttatatacatcatttctgctaatcctcagacaaatcccctgagatgaacatcattccttttcctggttcacaagggaagacctgagggtgagagaaagtaagtaacttaagcacctttccagatctaatgagtggcagagcctatatttgacccaaaatcatctgtcatcaatctgtgaacagactcttagacactacactgtctagcatgtaac

SEQ ID NO: 186430 - DNA, 10492 bp, Cannabis indica
ggtttagtcaatttgggggtttcgatttgtcattgttttggtgaaatttgtgaattttgatacttaaataatgccaccgaggacggtgaagagagggggtgctgcggcgggaacgaggaagacggcgagaaccacgaggggttctcagaaggcccagaatcagcctgtgcaggaggttcctgaagagcctgtccgggtcgaagaggtcactgttgttcccgtggaggaaaaagaggaagtcaaggctgaagagtcagttatcactcaggaaaaatcatcacccgctgttgagaagaatcccgttcctgtcgttcagaaggattctgataacaaatctgaattgaaagcccaacgggttgagaagtatttttttttttttctttgtttcttgtgaatatattggttattagggcatgaggcgatgggtttaatgaatttgttctaattttgtttaatcatcttcttgttagttatctatggcccctttgatttggatcacttttacttcacgtttgggtgacgcttttgtctttattacgttgatttgacttaaaaaactatggatttgtcacattgttgattaatcaaagctattaacttgatgttgttgtttctagagcttaaaatacaataaagggagaaggggtcaatatactagatacttataccataggattgtctatggcactgacataatcatctgtattcgttaagtagttatatggtgtgttctttacatttgggattaattttttctttatagttgacataatcatatgtgttatgttcgggtctgagatcattagtaatggaagcggagaagaccgcgtttgggtaatacgtatatataaaatttcgttcactgttcattttaaaagaatttaacttttgggagaaaaaataaagttgatttatagtaatggattttgtatggatctatgttatactaattcgaaactttttgaaaattttcctttatagttggcttgacttgagcatttcgtatgatatcctcttttgtttactgttacgtaatgggtgagaaagatcttagggtgatggcctaagtgtgatgaaattggatgctacccttgaacacttagaagtagatcgcacacacatttttttagcattcgtagttctgattatcccgtctctctcgatctaaggacatgaatgttttttcctactcaaattactttttggtacatatgaaaaaggaatttcagcctcatctaacgggattgctcgtcaacccctattttatgacagaagaagataaaatgaaggaatctgcggatgaatatgaaaaagatgaaaggttagacctcgatgataatgatcctgagtacgaaactgaagaatatggtggtgttgattatgatgagaaggaaactgatcaagaagatgtccaagagctgggtgaggaaggggaagaacacgaggataacttagatgaagaagatgagggtgatatggttgaggaggagctggaagacattaatgaagagcttgagggagaagagtatgaagagaatgttgaggaagagcaggagcacgtggagactgttgatgctgaggaagatgagcaccatgaagttgtaaaggagaggcgcaagcgtaaggagtttgaagtttttgttggtggccttgataaggatgctactgaggatgatttgagaaaaatattcagtgaagttggtgaagttactgaagtcaggttgatgatgaacgctcagaccaagaagaacaaggggtttgcgttcttgcgttttgctacagtggaacaagcaaaacgagctgttcaagatttcaaaagtctagtggtaactgttgatcttagttttaatgtaaactgaaacttcctcgcgtataagttgaactctttaaatggattaaatttcaggtaaatggaaaacaatgtggtgtaactcccagtcaagacagtgacactctttttttgggtaacatttgcaagtcatggactaaggaagctgtaagtatattgatttttcagatttactatctagtactacttaccggcaaagaagctggcatttgatggttattgtgattcctttgttttctgaaattctgtttcaatgctctttcagctgaaagagaagttgaaacattatggagtcaacaatgttgaggatttgacattagtagaagatagcaacaatgaaggcatgaatcgtggatttgcctttctggaattttcatctcgctcagaagctatggatgcctttaaacgtcttcagaaaagagatgttgtgtttggagttgataggcctgccaaggtttcttttgcagattcgttcattgacccgggtgatgaaattatggcacaggtattcttttgggtctttgacaaatctgcattgtaatattaggaactgaatccttagatgtttagtctacctattaataaatatattgtttgatacttgaggttttcttttttttgtttttttgaatttgaaagccaataatgaggaggctgtaatttatttgtattttggtgtttttcttatcagacagtttctattccttgcacattctaatatattctatggtcatttcacttttttttcttctttgtttttgatatattttggcacaggtattctacaatattcaatttttctgtattacatttgattttttggttgaaaatctttgttgtattatttttattctcttttttactgaatatttttgcatttgcacagagtatgtgctcttatatatgatagttttatttgatgttttgatatttatttatttagtctggattcataagtcgaaagtctcaactgttttgtttatgtttcttcttatatcttatatatagattacatattttggtatggggatagggaaggggttctgaggtggttgatttatattccttttatttgagtctggattctcatgtatgaatttacaggttaaaactgtattcgttgatggcctacctgcaacatgggatgaagatcgtgttcgggggcttcttaagaaatatggggaaattgtaaagatagaactggctagaaatatgccatctgcgaagaggaaagattttggttttgttacttttgacactcatgatgctgcagtgacatgtgcgaagagcattaacaatgcagacataggtgaaggggacaacaaggttcgtaatgagagctgtttattgtagttttggtactttttaatcaagtattcaaagagttgacattagtggtgtttaaatttattaatttagttatgttgacatttcaggctaaagttagggctaggttgtcaagaccacttcagaaagggaaaggaaagcatgctggtcgtggtgattttaggtcttcacgaccttctgggcgagtgtttaggggttcttggggccgtccatcatcacgtagtgtttccatgcgcacaacaagaggtgttgctagtcgttttcctccaagtacaaagaggcctctaggatataaagatcgccgacctgtgatgtctgtgccatccagacccaggcatttgcctcctccagctaggtcatatgacaggagagcacctggtatgatgtggatcgcactctgttttgcccgtttgcttcttgcgtactgcatatttatatgcttacattgctgttaattttttcacagcacaatcttatccaaagagtagctcgaagagagaatatagtcgacacgatgagattcctcctccaagaagtagagctgttgcagattatagttcaagggctgtccaagagagacggctgtcatatagagatgagtactcctcacgtggtcatggctactctgatccgcctaggagtacatcgcgatcttcaggcaggcgagcttatgctgatgatggatatgggcaaaggtttgacaggcctccaccttctagttatcgtgaaggtgggcgtgcacgcgattatgattctgtttcagggtcaaaacgtccttactctgccgtggttagtttcacttcatgctatgtaattttgttttgaaaaatgtcatttttttactattttttgctctgcatgaaagctgaactcatatatatgtcatgctaggatgatgcccctcatcgttttagtgatgccagtgttcgtcaatcgagggcacgcatagactatgattatggtggcagtggttctcagtatggggattcctatggtgatagacttggacgttctaatttaggatatagtaacagcagaacaagtcaagactcacatgggatgtatagcagccgtcagggcatgggttatggagggggtaagcttaatgtgctggcattttgttcttgttgcatctcttttgtggatttgatgctaactgtgtaactatgaatggcttaggttcttatggtggtggtgatggagtatactcatcaagctatgggagtgattatatctcacgtgcatctgatgtatgatgattgttttttctattcttttcccttttggaagtgaggaaatatataaaaagagaagattagtaatatgactttattgatatcctatttgcttacataatttcttgatgttattaaataggttggtggtggctcatactcatccatgtactccagtcgtggggtgggagggagtagttatatgggtagtggcggtggtggttccggttctggttcatactactgaggtaatttaagcttttttatttcgttttgctcttagtggatgggtcaattttctaaatgtattgccagcagataatttttgtcgatcctaaaaaaaaaagtaaatagttattggagtttttattagtactttctactggggatctcagctactgaaggcgggcatctctattatgcttaagtgatgtggttggtgaaaatggagcctggtcacaagtgtgactttatctacggaacagatctgtgacatacaaagaggctgctgtaggatgtggacttttgatgctaactttatgaagaaagaaccctatcaagtttaattgcttctcttatatgttccaagaattattctttaatatttaagggctgtattggttcaaccctgcttggatctctacatatgtggaaattgtgtcggatcataattgtaatgctgtaaggacgcatgaacatttcaaagatgaaaccaagaagtgctatgttgatatttatgactttcatcttctgttttatcttctataagaactccgctaattggacaatgtggaggcttgcttcgatatctgttcttttggacagtattatcagaggtttgaggattttctgtattattagggttcttttggatattttttgaactggctcttctggaaaggttctagctttttctggccactttttactgtttcagtgcctcattatacaagcgatttaatgaggctaaccagagactcaagtttaagggaactatttagcttggctagaataacctttaagtataaggttatgatctttaactgttgaattggattttatttgattggtttttgagttttggttgctattttgaaaagaaaattacagttctatataattgaattatatgtgatggtgtctttattatattggtttatttatcttgtgggcataacttagcataaattgtatcctgcaaattttcattgaggattagaggaaaatttaatggcatttttgataagtttgataaccagaatttatatatttgtacattgtgaatagccattcacagaatggtgagctacatattcccacaaaatgatatatattttcaagttttgagagcttatatgtgggtttgtaaacctctgttgagaattctctaagagagccagtgctaaagctagactaacagcggtaaaagtttaagcgagcaaaaatgtggacatttgatgcatttggagcatctatctcttttctaattttagccttaagaaaggtgccatttggaattcttctaccatggatttcgtaagacttgtattattgctgctaaaagtttatcgtggaagtttgtgtattctacgctatgaatttgttcctgttctctctgcaattcttggatgtgtcacactttgattatgttaagcttgctggtgttgaaatttctcttagtgtagcaaagttgatgattacatttggaatgggaaaagaagtatgctacaggatctgtagaaaactatggattttgttctacaagatccattatcacttctcatgattggaacagaattttcagttctggtagggatttttttcaatttagttgcttatatagttaccataacaattctataacggggtttaaaatatttctaataatatcaagccatatcaagtgtagcttaaccttttggtctagagatcttagtaaacacgctaggatttttggagccttcccatttcggaaagggttttattaacaaattagttagttttggcgttgttatatacttgtttgccttacataatagatgctagaaataggctgcaaataagtgaagcagttatcgttttcgttctctaccattgttgtcgccatctgttctatgtactagttttgggatgtgcgacagatttttacttttctttcccaccggaatgaattgtactgtgattaggagtccaaatataggttcctgagaacatgagcacatggtttgagttctttagttttggcgttgttatatatttgtttgccttgcatgatagatgctagaaataggttgcaactaagctaagtagttatcatttttgttctctgtcattgttgtcaccatttggtctgtgttgtagttttgttatgtacaacagatcttatacttcttttttcgttctcaccggaatgagttttactgtgaatgagccaaaatataggttcacgagagcattgatcacactttgagctcatataattatcttgcaaatcattgtactgtgagttgcttttgcacacgctacctttcggtgcaagctataatttcatgtctgtttctgttttagcattattgcttctttttgtggatttatctgtttgaaactatgctctcctttaaccctacaagatttggagttgaaaatcgagtagcagatatttaagagcagaggattcacacatccaaagttgttaccaactatatgtttttgagacatgactagtgtttttaggttgaattctcgtgtgaatggtgacaaggtattgtgcattgtggtgcgacgagtattgtaaataatacagcttattgttttatctaatcaattttttcttccaaacgttgtgtacttgctgtttatatcaatttcagattgtctagaaacaatggctagctgcaatttgctaaattaaaatcaagtaatttactattttgaaccaaattaagtgcataaactttacaacaagcactatacaaaataagcaaaacattcggaaactcattattaacccttaaaaattatatgtacacatgaagataagcacaatacacgaagatgattttaagtatggttaaatgtctgttattaactagtacgaatggacaacaatcctgcaaagagccctgcaaatcaagtcatatggaaacaaaataagcactgaaattaaatatgaacaaaagctagacgtgagagcttcgaattgaaagccacattagcaaagtgggaacagacagcgacagaggaaattggtactcacccagttggagagcaacatccacaaaatgaacccggtttcacacctcccctaacatctgcccaatacaaactatggacacaagcttagttcaaaatcgacagcgatgttgcacgctcttactgctagagaagtggcctcctatgagctctgctcaggtagcaagatgtgaatggtcaagatcctctggtcggattaattaaacaatgtgtgtaaaaaaaagtgatagaaatggtatctatttttttttctccttcttactttggattagacaaataggagttgaatagtccgcgactgaagccttggtgaacatcggcgttaactataacggtgctaaggtagcgacattctttgttgagtaagtttcgacttgaacgaaaggcgtagcgatctaggcactttctctgaaagaggctttgtgaaataatcatgtctatgaagatataaaaaaagggaacaaaaataaaagttttggaagcaaatattattgctaaatgatttaaatattaaaaaaattacaataggggtttaaatataaaagtaaaaatatatgtaaaaaaaacagaatagaattttgcattataattatttatccaaaattgacgtagaactgatgtgatgcatagacataaaatatatgtataaatagttttttaatgacagtgaaaatttatatacattgttaattgaagtctagacatataactaactggtccgtggagcttacaacaccaaatcaagattacgtacaactaaacataagaatcaattacaactgaaatcatttttaaacctaagaaatgtattttttatacctaagatcaagaccgatcaagtatcgcacaagccaatccttgctccgagaacaccaaactagagagagaagctctcctcacaagattaaaggagagagagagaggaggaggaggagggggaagattagtgtgagattaagagagatacagagaaaaatacttgtaaaagaactagcaagatgagctagaaaggattacaattcaaagatgatcttttcatttctgttggtataacaattgaaagcaaacattgttaatctgatgaaaaacaaagatttagcatggcatttagtgaagttaaagcactgttcaattaagtgtgcatagcatttatgtgtttatacatttgtgtgtgaaaggtcaagattgacgttagtgtgtctaacccaattgtgagtggtgtagggatgtaaaggtaaattttaacataaatatttttggagcaaatatttatatgtttaatgtgaataaaattaatttcagtcagcttaaatagtggttggtttaattacaaagtaaaaatatatattgctgatagtggtttagtaacaaaataaaaatatatacacttttaaaattaatttatatgtttaataccaataaatttaattcagcaaacctaagttagttaaatatacatttatactgtaattatatatatataatattctgggttcgagtcttaaattataaatgactgtaatatgtaaacgcttaaataaaaaaaaattattataataataattatagtttgatattttttttgtttgttaaacaaaatgtaaagaataatctctctgagaaaaaaattctatttattctaaaatgaaacatcacttatttattttatttttcccctaaaaagataagattgaaaattataatttaattcttttaaaaaaaattaattccctaaataaacgtagttgaagtaattaattttgaccttttcctttgttaataataataataatataaataaaaaaataataataataaatataaaaaaaaaaaaagtgttctaatcgtgtccacgctgtcgtatttctctgcaaggtctgccaatggaaccttcccaacttctcaaagttcctcatatacgatagtgtcgactacatgaagaagaagctctggatttaactcgaaccgtttctgggttttccgattcagtctccgttctcaaatgggtcgccggaaaaatgactcagaagtgggccgtttcgcgattctgatcatattcttgatgggggtaatctcctgtagcatggtctacttttgcatctctgtgctcttcgttcccaccgctaccgacccaataatttcagtctcgtattctgttcaaaacgttgaccaagattcggggactcaaaatgaagaagaaaaagaagtgtgctgtagagggattgagcatttggagctttggggtgacgccgcaaaatggggttctgagtttaagctcagttcttctgaggagtgttgcaaggcctgtaaagctatgtgtcggaaaaaaggcccttgcttgtgtgattcgtgggtgttctgtggaaatcgagaagcttgtggagctagatttggcgaggtatggttattgtcgtttttctaatgtcaactgtcgtttttgagtaaagtggtctgcaatagttttcgtatttttcatgagatgataaactaaatttgataattgtatatacatttgtagctgattcagtgaactgaacatgtttaaatttatcaactgtatttatgaattgagagtttttttttttcaatcaagtttcaaacttttgggattgatataattcattgtaaccgaaaaatgaccaaaattaagtaatttgttgtaagatagagcttggctatctaagataagaattcacaaatttccttatggtatttctgtttgtataagatgttttccattcttctgtctttactgcagtgttggttgaaaaaacaaaagaattccttggtgcttgatcggcgagagtcc

SEQ ID NO: 186431 - DNA, 1585 bp, Cannabis indica
tgctcatgtaagaaacaagaacattgtttagactgaaagttgttttatacccttattagatagatgttacagttatagcattctctgtagaaaatatgaggaattatcactagcttatcatttagataaacactactgcaacagcacttttgatcttaagcttatatgacaaagaagcataaacatatggcttcatccactaaattgaattgaattcagccaaaagtcattaagttaatgatgcaggcagtaaatggtaaagttgatcgttataaattctataaagttagaggcatcattaaagttaacaataagcaatactcaccgcaatctctggtgttcttttcgcaaactgtcaagttcagcatgcaaatctggtagactcttaatctcaccatggactttctccaattccttagtggcctcttgaattcgaagagttagctctcgccgtgcagtgaccaagctttgtgcatccttacaagcctgtttcaggtcattcctcaaaccttctccagctctaatatcagcttccattcttttaattctatcaatcaaaactcggagttgaacatcgctttcagtctggagatttctcatgtgcattttgagtctctgtatttcatgctgagcagttaaaagctcttccctcataacaatatgagtagaagccaatctttgattatcccctgcaagtcgttttatctcagctgcctgtgctgcaattttagtttcaagtagttccacgtgatgtattgtttctaaagaacccttgccagcagcagagcctgagcccgaaaatgtaccatgtcggatcatccctgaagctttgataggatgtccctccgaagcttttgaattcctccttctttccgccatctatccagctatgtactcaaactaagagtacctttattatacaggagctgtacaaataccatctgctgtgttattacaagtcacattgcaccaattagaatcctctaagacagaactattcaaaagcagggagcgtttgaaatgatatgatacaacaactattcaaaagcaaaggaggttcaaacatgaatcattaaattctagtgaacccaatcatgaggtacttttgtttggtataaactgagctcaaatgtgaaatgtgcttttcccatgaacaaacaaactcaattccaatgcaaccatctaaccatcactaaatgtatcaagctggtcatgccagttatgctattcagtattcacgaacatcatgttagaagatggtttgaggaatatgagtaagaatcggagaaagagtcgattcaaaagggggtttagcaaggaaacactcatttaataagctaactagacaaagttccctttggtcatttttaattatagatacactatgatgacggaaatatatcaatcggatttgaatccattaaaagatgtgcattgaattgcaatgtagtattaaggaaaaattgattcttttcaacaaaaatttggtgcaaccaaccagcaaagacacaagctgaaaatatataagagaccacactaaacagaaacaacaaacttatgaatgtgattaacaagcacactgttc

SEQ ID NO: 186432 - DNA, 739 bp, Cannabis indica
aagcgggctttacaaatccgttttgtgcagatggcaccgttgagctaatggaattgacaatgagcagagctaagacttatctattttttagcagatccttaatgagccaaaatagaaggatttcagtacctccaaccttgctaactttcaactagaaaaggggatccacttacacacatctatcagtttcagcaaaagatggctctaaaaactgtaagtttggtgatcctatttaagttattctctactaccttataggggacgactctcactttgtttagaaaattgtagcccagatctgtatcgaacttcaaagatcttcgtaaacattaagtatctaaacacgactgtaacagctgtaattacatcaagcttgagtaaacatgtgaccggaaaaggcttgtgagattttagcttcatttgcggggtaggtaactttaaaataggttctgaggatttttgagaccgtagaaactaccgaggaagatgtacaactcaccatgaagacaaaaaaaatgatcaggcggtacaaggcccactgccacactgttaattttttaatgttgcatgaccattacttcccagctgtgccaatcatcttcatcaaaatagatttgcagatgctagatctaccacatgaagatgcgcgagtaattgataccaatttcatgttgactatccttattcctagagccaaatcaccgggaaagaatatggatgtatttctaaagcctttggt

SEQ ID NO: 186433 - DNA, 1304 bp, Cannabis indica
gaagaagatagcagaagcaaaagcaagttgctaacacaattttgtctcatcatgcaaacctagttctctttctttttctattttcttttattattcataagtaataataattttttattaagtaataaatttataaaatgaacagttgctagagagagaaagggagaaagagatgtatatcagctgggttctgagtcctacccacatgcaacccatcattacagctcagtgaaatgggttcccatagcaatttttgcttattaacatctcttatatattgtcaactctcatgcatgtttttcttcaccctttctccctgcacattagtttataaatattgtaatgtacattaaaaaagaagaaacataagatttctttaaaagatatgatcatttaacaccccactcattttctattgcaacaacagcaaaattatagtagtgaattaataaaatcaattgaatacatattaattaccaaaatttaggactcatgatgagattgagatctgctgtagttactatatattaattaggctggactttaacttcctttattgcttgtttacttcagtagtatatataagagaaatgctgaacgcatcactaatgcctaacacttccttatatgtcaatatcactattgatctagttaagtatcgggttccatatagtttaatataataacttttagagagcatcgctagccaatcacaacgcgacatgtcgagaaagtactaatattttggtgcctaatagcaatgctctatatataattagtagtgattattacttctctgtatatttgaatttgggggcattattattatatatataaaggctggctcataactaagtttgttttagtattgatagatctgatcactctctctcttctctcttctgactgctgtacttatcagagaagttaagttggtgatcatgtggtcttaatctttaattctattcaagacaattcttaatggagagattgagattttttatttgtctttattagcaggcctctctaaataacagattagtttacattaaattcattctgtttttcttaccgtttataaggtatatatatttttgtatgagttatacaaaaatgaagaatgttcaaatgattctgtaatgcttaaataattattaattagatcttccaacgtttaaccaactaaattataagaccattattagcttcaagtacattgttcgtaaatgtgacatataatagaagtagaatttgcttgtgaaatgccattatttatttgatcatgcatgaatgatatttttttt

SEQ ID NO: 186434 - DNA, 4708 bp, Cannabis indica
atcgtatcaatgaacacatatccatgatccgagaccatgataggtgcattgatcacctttgccgcaggaaatctagtgatccaatcacccaaagcaatggcacgatccaatctttctctcgtaattcctcccgaaaatctattgttttgccatgtgaacttacatcccctataaccgaggtcgataccccttgtcctcagcagcagcctttggagaatcgcagtatcataaccggagactcttttcccaccacacttttcccaaagatgggcaattaagttcaagtctccgaccatcatccacggcctttggcatctgctaactctatatttcatccaatcccaaaattcttttttctcactgtcatacggcctaccatagaccgcaaacaaataccactcccactgatcagtcgagtcctttatacgggcttcaaacacaccccacaagcttcaatcacctttaaattaacactagcattccataacaaagaaaaacctcctcttaatccctctgccgatataattgcagaatattgaaatcccaataatttactaatctcttccataccatcagccttacactttgcttccattaagaaaatacagtccggtttaaacctcttaacccaagtcaacaaagcttgggatgccggggttctatgaataccctgacaattccaagataggattttcatggcgacggagggggcttgattagggccgcctcctcgcccgtcaaattgagagatttgtttgtaggtgaatcaactagattgttgtcaaaattaagagttgtagttccagagttacctgagatccctccacttccactggtatacttctcacctctcttactcccaacttttgatcctcttcgtgctcttcctgaacttcccccaccacggcttcgagagtaagctctttttttactacccgtcgagccacggctgctgcttccaggtacaaaagtgttgacttccaaagttggtagcatggtaatcggtgttgccggcgttttctcccccatattattcacattgtctccatggtcaatgactggaacaattgatacacttgctttcctttttttcgcaccagaaaatgtagagcctgtagtggaaaaatcaacacaatcatgtgataccactatttgagatagcccatgttccctttgggccggttgtatgacttggtctattacttcttcaaggcttttgtcattgggccaagttacataagtgggctcaggatattggtgtgggacattagacttacaaatctcctcatgtggtctttccaccatttgatcacgtgttggcccaatatcagccattagactagcaataataccctcatctcttcttttattatctataccattcataggatgcttctttgtctttagagaggctctcagcctatgttggttggcatttcccaattcggttaccctccaactctgaccaagacaagctttctttgtcccctgagaaaccccccttttccggagaagaactcattccaacggctccctgcacctgtgtacactacttcccaggttttgatacatctctatccttctctgttatgaccaatttacccttatcctttcctgccaccggccgaacatcatgggcttcacaggatttctccggcagcttcattctcggaatcacaggatcaaaacaacttcgaatcagaactccaactttaatccaagctccatagaggggaaccgccttccccacagggggatacgcaaattcctggggccggttacatttgtcaaaggaatgagccaagcatccacagttaaagcaaatggctggaagtttgtgatatttaaattgcacccattccttcctgtctcgagagatattcaaataaaagcctgcaaccagcctttgattaaggagaatatcaacttgaaatttcaagaaacctctccgagcgatggtagccctcgatgctctatcaaaatcaatgtattcccccacctttcttgtgattacgtccgtattttctcaggttaaatatggcgtaggcaaaccatgggcttcaacccaatatctagctttgttcatatccaaatttgcccatatcccatcttctggccattccctaatgttcaatagcgccccattgaccaaccaatgtcgtttcttgagcacctccttcttatcattttcagagtcaaaaaaaattccccatagccctggcttcatagtcttcattctccagtgaccttcaagtttccacattttccccaatatctcctttacacgacccctggcgacactccttcttccgaaagttgtagctaacacccctttttttgtcacttcatcacttaactccacatcagcctcgagttcaagagacatggagtccataaattgttgcctcacatcatcaaaaaggccttcttcgtccccattgctttccactcccccctccatttggttgttgatcatggcctcttcatcctgttcgtggtcgagcgttactggccctgtcgagtcgatatttgtattttcccctaactgaaactccatactgacctaacgagacttaaactagcacaagaaccagattcaatcagaaaacactagtcggatataccgaaatcacaatagtgtatatgggttttatcatacttcaaaaatagttgtttgcaacgctcggaccgttagccaggtgagatggtgcttcagacttcaggccaatgattacaatacaaatcttatcatcagtgatgatgctttttgaccgtgataggttgagattgaaaacaataaggatgctaaagtagtctcacaccatagtccctaccaagattagggcaatgctttcatcattattattgaggcgaaaaaatggtagtttgaatagaacttttgtttctagaaaaagaaaacaaaaacaaaaaataaagataatacatatacataacttaattttacttcatttttatttcaaacttttaccatataccatagatacttctttaaaataatttactaaaacaccaccactttttcttttcaaattttaatatattttttgtcattttaaatatataatattaatgtatacacatttacatataaaaaaaaaattaaaacttaaaataattaataaaatattattgacagtaaaaactcatcaacaatgttatttgtcaaaaaccttatgtgtgaatgatgaaaaataagaaaataagtaaacttgttgaaacttaagaaaagttgcaaagcaacaatggttaaaataagagtgttatcttgaaaactcataagctaggattactcagtttccaacccctttgagtgagggtttgagtccaatttataggtgaactctgatggctcatattacatgtggtccccaagaggatagcttggtacccagtacatctgtcaatggcagaaattagaggactaggtgcagggtggtggctacaatataccattggtcgggctccaggttggtgttgatcccactcctttctcagttcttgtctccacgacttttcaggagttgtggctaggcacgcgaggatcggtctccacatggtggtcccctataccatctcccgtgacagttttcttgtcctactctagtcattcatatttcctccccaagcgctaaatgtctgaacttattcttccaaatgagggtagtctttgttcccttaggattcatatcaattcactttggagattaatcactatgatatcatgcctcgtgaattaaatcgaacaaacaagagtggtacgacctgttgatgcaaagactctagagtgaccaagccccttgtggtgtatgcacaattggcgtaggacctggtggcgatggggcctgctgccgccaagggtttggtgaccacagggctttgcttcttggttctctttctcgagttgggactatttgttttgtggtacttgttattcaaatttctacacaaggtgacacgacatccatctggacgatacgtgtaatagattctacaaactggacgggcaatcccacttataatgagtcgtgcagggagatttgatacttgaagtcataaacagaagttcggacatccaaacaaagcatacgagaacacccgaccagcttttatcacgcaagtggctcgcatacattgaccagaggatgcgagttagacaatttcaaagttgagtattggcttgcttttatgatattatttggtactttatggattttcttactaagtcattctaatttaagggcgctctatggtgcaggtaagagcaagtggaattcagatccaccatgagttggagatcaaggcagttggtgcacatgttctagttcgctcggcctacaaggctaagttagttatggggaatggtttctaaaccgccttggaaaaatcaccaaaacatttttttagtaaatcctacttttgttaactaaaatgcatagtcttgaagtttgagttctccgctcctaaattgaattgtaatttgattttttttttttttgtgtgattatgggtttcgatcaactggtgttgtggtggtgattttggattcagtacaagtggtgttgtggagatcattgtggtgacgatggtggtggtggttgttgtagtggtggtagtgtgataagagaaccagaggagtacaatggattagggttacgaaggtaagagaagaaaataaaaaatatatttt

SEQ ID NO: 186435 - DNA, 5672 bp, Cannabis indica
tttttttttaaaaaaaaaaactatgataaagtgtcattttaatttctacagtaacagaaatatgttttcgatatagaaattataatctaaattttgtataagatgatttatattacaaatattatacatctctaactattttcataaaattttgaattgtgtacaatgttaaaaatagagtccaaagtaaaagttttgttgcaaattggatagttactgctgtattatcttactttaattaataaaagattgctcataaaaattctacaagcacaatgaattttagtccttttattcagatggagcattggtcagttcctattattgatgtgatttttgtcaatgtagatatttttgtcacttcttaagctttttattttgaaattagacggcttgcccgtgatcatcatggagctgtcctttatcattggtccaacacaattgcctgaccatgtctctcctcttttggtagaggcaattgggttgaaggaagctttgagctgatcaaagaatggagcctaggtcaagttgttgttgagtcagattgtaaaatcatcattgatgctatgtatagttcgtctcttttattgtctctttttaatttagttatttttgattgtcgtactttaatatctgattttaataatattttttgtgtttttgttaaacaatttacgagcaaggcagccaatcatttggcgattgtcgcttgtttctccccaagttctagctaggatatggggtttcttcctattacttttcaagctattttaataaatgatttgtccggtcataaataaaatgcatcttttttttatcaaaaatatagaatttaaaataattaattgtacaaatataaaaaaaattataaataattcgttatttaacacatataaataaaataaaaaacattttcgaaattttttctaaaagtttacctataatttatttacacgattatagaaaaaaaaaattgtactacaaaactcttgtattcatgaaaaagtagggggtctaccgagcgtacattttagagtatcaaaaaaaaaaaaataactgatgaacatgaaatccaaaaacattttaaacaaaatattatgtgcattaaataaaagtaaactaccatgatttatgacggtaataataataacacaacagatcagaacagtaccgactcactcacacactattccgtattgagtaatttttttgaatagatttttggtcattctattctagaaagtagaaacttggcaacaaaaatgtacgaaacaaaataattaaaataagatattaacactgcaaattagtcgcacctcatgatctcctaatgatcttctttgtctgtgaaaagcaaccaaatcacacacccttttctcttctctctctttttagccatcaagtttcagagagggtacgtttccacaaagtcaatgcacccactaaacagctttccttccatggatctaacttaactctctgctagctcattttgagttggttaaacaacttttttctctctgctttttttcttcttttctttctttcttttcaattgttctgtttttgagtttgtttggtggggttttggaggagaagactcaagttttaacacaattcttaaaaacaagtataaaactcaggtaaactgtgtttggagtttatatagaagtttagaccatttttttaagctaacaaattatgaatgtgctcaacatttttagatttaattactttcacatttttttccttcacatttttcttgaaaaaaattccacaccctctgaattatctgtaaacagagtatctcttttagtatttttaagtgttgactattagttatttttaagtattagaaaagagaatcttcttttcgttttctgatgacattatcacttgattgtttatttatctcggcggcaactgattttatttttgtttatgtttgtgtcttttagtgaaaaaaagaatcaaagaagtattatatatgtctctcagtggaaaatcttggaaaagattgactagtgtatccaaacccgtgtaagtattttttgtttttttattttatgaaattaaattagtattgggattgataaaattttaattgtttaagagtagtattctgaggtctcagcttctgatttagtcaatgtatgtaattttctatgacagagaatatgcctcaagacggtctaagatcatccatatacaggtcttttgtcacatgtaatgatcctaaaggagtaattagttgtagaacaatcataaaatccaaatcatattctcagaaaatgaatcatcacaagagagaacgccaaagaaagttgaagagcttaagtacaccatctttgaactacgaaccagagttagaggagataataatggcatcatctactaaagagatcccagaagaaattcatagcccagctgcttttcaactcatggaggtctctaaaggagccaaaaaacttaaccacatgattgattcttggactaagggtgtcaagtttgatgggcaatctaaagatatggcaaaggatttgttaaaaggtgctcttgatcttcaagattctttggttatgttaggaaagttacaagaagcttcacagtacatggctcacctaaagaagaaacagattgagaaaaatgaaagaggaaaagaagatgatgaaccttggattagaagaacaagctcagatcagtttagagaccatttttcagtgacaggttatcaaaagcctcgtctttctgttgatgggtatcctagcaattcaacagaggagcttaagaaggttataaaagaaagccttgtgagccaaaatctgttaccaaaagctagaaagcatcatcatcaaaagactcactattttcctcatttggactcagcttcaacttctgagtctccatctgcaactagctcaactagccaatcttcaatggctcgtgtcactactaactccccaactgcttctacatcagtatcacctcaggcaacaaaaggtctaatttgatagccaggctgatgggtttggagaatgccctttgaaacctttgcaaattacacacagagaagacaccaaccaacttgaacccgtcttagatattgacaagcccaaggtaaaaaacgtctcaaatgcagagctcagaagactactgatccagagagaaagactttggatgaaatacttgaaaacatgcaatataaaggacttttgcgtagtagcaaagctgcaaaagaggttcagctgccttgtttggatgatctcaatgtgtctcgttccagacagagactactaagtgataatggtccaccaccacctattgtacttatgaaacctctgagagttccattccaggtaccaaaggagacaaacagaccagtgtttgaagaagatgaccctttgtacagaagaaagatgctgagaaaattgagaagaaaacaagagctttatcccaaaggaataaactacaaagatgggaatttgaagtctggtatggttgtaagcaggagaccaaatggagaagagactagaattcgagggattaaggaggaagcagctaaagataaaagagtagtagttgaaactccagtggatcacaaagaagttggtgtaaacgaaacaagtgttgtagtaaagttgaaagcctatcaatctgtaaaccagaagcaacaaaaaagtgaggacattgacaatagagctaatgaaaacatactaaaggtgaccactgctaacaagaaatctttggataaagatgtggtgaaaactagaagtgttccaaagtctcaagttcaagccaagaaaaccttaaataaggcggtaaagccggagtctgaatcaaacatggcaaggaggaaggaaatatctagacaaccgagtaccaagccaggttccattaaaaatgcagaacaaggtgcagcttgtaattccatttaccaaagaaagaaccgcctgaagaaaggcaagcctgtgaacaagcctacagcatctaaaacagttgtgagtctacctcaaatctaagtcttttgtttaaattccaatataaagcttatgttgaggtgaaaatattgtgtcaaagaaagaaaataagtttgttcaaaacttgatgagctcttctgtttatccaggctgaaacttgtgtacgtgaagtagatgaaaagatggacgataccagggaaattgattgtcatgtagtaagggtcagcagtagtgttcttgagcaacaactccctaaacttgaggatcaaccccttgaagaagagagcatagatagttctggttctcatattagaggtaagaaaaccccttattacatgtgcatataagtatatactgtcatgttaaatgactgacaaccatattcttacaccttgtagagcttggcaaagaagggaagatttctcctttagaaatcatattaccaacaccaagcgccaacgatgaaatggacaccaaaaaggaagagaaagaagaagatgaagaagctctcaaaaccatagatgtttgtgaaatcacatatgacaaaacttccataagtgaaaccagtttgagagatgtgctattgagtagtctatcttttcaaagttgtgcagaggagcttttcgatgtgaacatgaacaacagtagcagtactaacatcattcaatgtcaaacatcttgcattgatgattttgaggctcaaacactgagactgcctttggaatgtgcaaaagaaatcatggaacgtaaaagctttcaaggctcacaaacaatctatcctttgttaccatgcatagctaaatcaagaataagcatctccatggagatgttggttgaggatgtcatgaaagggattgagagtcttgccatttacagaaagcttggtggtgaagatcttgtggattgtttgtatgcaatgttagagagagacttaatgtgcaatggagttgtgaatggaatctgggattctggttggaagactggattttctttggatgaagctgaacaagttgtgaatgatatcgagaaacttgtcttgactgggttgattgaagaggtatttgtttgatttcagcacagcattgtaacaaaataattttcttggctatttttggccaagttgtaaacaaagtccttttttttaaattttattttagtgtaatgttagtttgtatgtatatatcatattaagaaatgctaagtttcttacatgggaaaactaagaagaggtagacatctttttaactaatgtctttgttctgatcactgagaacctcagtcctcacaatggctttttattgtattatgattatttttatttatatcaaatattcaataattaggaaagaaatgagtaaagagatattattaaacataaagttcgaataatcatcacaagtgcaagaacgtagtgtagcaatgtggtaaaaaaatgaagttttttttttttaccatttttctatatattagaggtgtatctttttttgcataatccattgtagtgttgtatagaataacacaaggatgatttgtctccttttattgtattgatttatgttgcgtagagtaagtagatgacgaaagtaggtttgatttgaaatgtattttgacatattgaaaaacattgtcctacatgaattaaatgtaaaactattaagccatataagaatatgactactccactcatcaccaatt

SEQ ID NO: 186436 - DNA, 3251 bp, Cannabis indica
aaaataaataaataaaaatacaccatttaataatcatcaccagatacagaaaaaagacccacatttaaattccaattcagattattaagttgatatgaataaaggagcacttatgttgcaactatattaggagagaataagaatttagatttacgagacaatcattttgtacgaaaacgatgataaaattgcaagttgcaacaaagaatttgcaattctgtatgttaaaaaataaggtatcgagattcaaattttacctgcggaaccaaactcttaacatgtgtttcccaaatctcttccccgtgtacagtccacgcagcaacattcccatgtgtatcagtagtcactagttcaatctttccatcgtcattgatatcagctgcaacaacacctccatgaatttcagccatttcaagaggaaactttctcctgacgttccctgaaatgtcatgaaacaaaattagtgctcctcaggaaaaaataaaactacgaaaattaatcctgttaaataaactaaaactcccaaattctcagtttctccaaccacatacaaaacaatatatatgtttcctatagggtgaagtaataaggcacatattttcaggaaagcaatagaaaaggaaagctaaaaagggcagtatatgctctcagtgtaacaagccatcacccatattctccacagaataatgcaccagaccacaaagagagcatataacagattcgttaatcaaccaaaaaatatcgtggtttgtagcaacagaaatatagacttgaatcatcaacttaaagttatttactaacataaacacaagcaagggaagagggagctcaattcatctactaaatttcttgcatgcatagttcatgggaagtggcagggatgggtaagtcctctaagtttatatcgaatacaaaagcaagtacatggaaccaattgacaattctttatgtttatattgaaaatatatactattccttaatatcctttaatagtgttgtagaatctatgccaggtaatgcactagaaatagcattgcataacaacaaaaaccatgcaaacaaaggaatataataatacgtccacatacattattctagaggaggacttaccatgatgatccaagacatagaacaagccataggaagtcccaacaaggatatccaagtacccatcaccatccaaatcagcaacggtaggagaagaatatatgtaggcacggtagtttgcagaatctgtactcagatctagttcagctgtccactttacttctttagtatcaagattgaaaacaacaatcgaactagctacatattttccaatatcaatgtcgcccaactccttcatgttctctgagtttccataatacctgtcaattcattgctttaagtcaatcttgtcaaaaccatggtacttttttgttttatgggcttgattaccactaaagaagaaaacgatttcatcaaattattatcatatcaacaagatgacaaaatgagttagtgagataatcccacaaggctccggccacaaataaggtcaaaacaacaagcaaaaaggacagaacatatttttttttctttttgtgaaatgccattcctgcaataaatgcccatgcatcgtctgaaactctaggattaactcaatttccatcatagagtaacaataacgagactatgtcaaacaaacatgacaaataaagcaaaatcaacaattaatattaacacattagacagactatatacctaaaaaattgtttaacagtaattttcaggtagctgaaagagaaacttttcattatcaacgtgtcaattcagttaaaataatatatgaaaagaaaaaatacaataatggaaagaaacttactcatgatcgaagaagtgagaaacagcaacaaccatttcaggtattccatctttatcaatatctgctatgacctgataaaatatgaaaaatgaaattctgttgacttgcctccatcaatagtctacttgcaaaacacatgcaaacatatataagcaatacataaatttgtatcttacaggagtacacaggatatgtgagtcaacattcacataatcctccagtttctcatgttgcccctccttccactcctcatctccccacattgtctcatcaacataatcatcatagtcataattgtactcatcagccagctcatcgctatcacgtaacagctcgaacgatgaatcagcatctgcttccaatcctccttcattttcaacagttacaacaggagtatcctctttactagtgcttttggattcagactcttgtgatcctttggaattgttatcgtctaaaagccgtctcccagtgcttgttccattaatttcagttcctactgaacttatctttacagaagaatcatttacactagcaggttgcttgatgtctattcctatttggcttccattagtttcagttccaactgaacttatgtttacagaagaatcatttccactagcacgtagcttgatgtctattcctatttggcttccgttcaattttctttcatcctctgttgaaatcgtatctgaatggtttgtattatttccacttttttctacaaatgtaaccagaaatttcaggtgaaatgagttgctatcgcgagatatacttttctttccctcaatacataggagagtaaattttcatgacaggcttatacttatcttgaaaactgaaaagtctcctaattgatgatgagaagagaaagaagcaaagtcaacaatagaaagtatatacataagggggaagaacttacggtgcactgatttttccaactcagactccagaacgatttggtcatcgtgaacatctggatgagaacgatccactggctctggatcaagacccacataccagttcttttttactttcctacgtggtactaccagtttatctaccatcatgtagcctgacacccttaagaaattacagaatgaacttcagggattgatacttaactaccacacaaagaatgatgacatcataatttaaagttccaacatctgaaacaaagaattacctgaaaaaaagcacctcgccattgtaggttgccaaagatatttctcttgaaccatccttgtcaatatcatacaggagaggactggcatgcacagttgactggtggaatgcaggccaaccttataaatcatttagcaagtagttaagtattttcctataacatactagcaaaaccagtacaaatcaccaaaacaaaaaaaaa

SEQ ID NO: 186437 - DNA, 3313 bp, Cannabis indica
  modified_base (121)..(121): a, c, t, g, unknown or other
tcctcagggctacaaaaggcaacagcataagatgcaacggcccatttttcaaaatttgaattgtccgcttttcttttcagatcccaaattcgattgtctccatttcattttccgctttccncgttttttttttacaaccaaactcagtatgggtgcttctcacagtcgtcgcgaggatctcgaaatttcagactcagaagaagaagaagaagattatcaaaccgaagaggaagacaactacgaagacgccgagggtgagaaatcttcggagcgccgaaccaaaaaccccatcttccatagacgatgtggaggccaagcttaaggccctcaagctcaagtactcgacgacccataacccgaatctcagaaatgcggtcaaactctacctccacattggtgggaatacgcctaaagccaaatgggtaacttctgaaaaactcacttcttaactcttttgttaagacctcaaggattggagatggcgaggaaggcgatgaagacgaggaagatgacgacgacgacggtaaagattcttggtgggctttaaaggttagttcgaagattcgacagaaggtctcttctgagttgcagttgaagaccttcgctgaccagcgtcgcgttgattttgtggccaaaggtgtttgggcaatgaagttcttcaatgacgaagattataaggtttttgttaccaaatatcaggagtgtttgtttgagaacacacaccgagttgaggcgactgacgccaataagcttaaggtttatggcaaagatttcattgggtgggcgaacccagaagctgcggatgattcgatatgggaagatgcggaggatttcttgaagagcccaggctctgttacaccattgaggacgaatcaggatttgagggaggaatttgaagaggcttcaaatggaggcattcagagcttggcattgggtgctttagacaacagctttttggtgggtgattctggcattcaagttgttaagaatttcactcatggaatacatgggaaaggtgtttatgtcaactttgatcgtggaaatggaaattatagtggtggttcgagtttgacacactcaacccccaaaaaagctttgctaatgagggctgagactaacatgctcctgatgagtcctatcactgaagggaagcctcatggtaaggggcttcaccatcttgatatcgaaactgggaagattgttactgagtggaagtttgctaaggatgggactgatatctcaatgagggatattacaaatgacggtaagggagctcagcttgatccaactggttctacattcttgggattggatgataataggctgtgcaggtgggatatgcgtgacaagaatggggttgttcagaatcttgccaattgtagtgaccctactctgagctggacacaaggacatcagttttccagagggaccaactttcagtgttttgcaaccacaggtgatgggtctattgttgttgggtctcttgatggaaagattcgattgtattcgatcaactctatgaggcaggcaagaacagcttttccaggccttggttctcctgtcactcatgtggatgtaacttttgatggcaagtggattttgggtacaactgatacttatttggtacttatctgcacccttttcattgataaagatggaaagaccaagacagggttcaatggtcgaatggggaacagaatatctgctccaagattgttgaagctgactcctttggattcacatttagctggacttaataataaatttcacaatgctcagttttcatgggtcactgagaccgggaagcaggagcgtcatttggtggcgactgtgggcaagtttagtgtaatctggaacttccaacaggtgaaggatggatcacacgagtgctaccgcaaccaggagggcctgaagagctgttactgctacaagatagttctcaaggatgattccattgtggaaagtcgctttatgcacgaaaaatgcagtcactgactcacctgaggctccactggttatagcaactcccatgaaagtcagttcctttagcatctccagcaggcgttgacatttggaggcgttgccgttcattaattgtgagctgtaagcttcatatattaaagtttcatacgcactgtttagtacttctcagatgtaccttattagactgttgttaaactaagaaattttagaaactaatgatctgattatcagttgtactcttgtcccaaagagtttctccaattgttattgcatttgcaagttattctaatgatagctagcctttttgtttcattttatatttgaaattggtatcacatgttatattttgctttcttgtgaaaaacatattccttttgttttctgttcagcttgtactagcattcattcatttcaagatacctactttttttttatgtttgtttcttttcctgaatagacctcttcattggaaagaaaactaaagcaagctagtgacctcaaaggaggccacttcccttgaaacacatcccgaacctcataggtcctaacccactttaccaaacaatcaacaacggcattctcagtcctacgaatgaacttaaaactaacataatgaaattgcttcacaagagttaatcataaggaaaataaataataaatgtcccaaccaagggagagaagagaaccagaatgaaaagctttcacagcaatcatgggagataaccaaaagtataactactttattatatgatttggcattacagaatgcaaggtgcaggctataaatttctcaagcttcatcaaaatttctaagtttccagaagagaacaacttttattggaagttggaaaaaacaatacattacttcttttatgttatcatcttagagatacatttttttttttttactttagtttgtagtatctttgtaattttaatattagcttaaaagccatggagggtggtctcaacacattttctcttcccggttctaaaattaaaatcactatcactcaaagcacttcaatttttctgggtaatggcaactcttttaaatcacatgaaaatccttaattcactttcaaataattgtcatatgttttagagatcggaattggatatagaatacataacggaatttacataagaatcaaatgcttcaattagtaccagtgtaccaccaattaattttctccacaattttctaaaatcgtatcaagtgggcaatattaagctttaacctattgacctttgacttccatttaagattcatcaactgtttcaaaccaattaaaattacatatatatatatatatataaactagggaat

SEQ ID NO: 186438 - DNA, 3822 bp, Cannabis indica
ggtattcctccgccacaagtgaggttcttaatacataatggggaggggctagtataagagaagcagtctctttctctttttcaaaaaaaaaaatttaagaacacccagttatacaatactcagcataatccttaaacatccccggtgctcatagtaaaatcccaatctactgtcatactagctatgcaaaattgttaggaaactggcccagctttctagctaggatactcacacctgacacattcatattcctaaggcaagaataagtgatccaaataggaggactaccataagagtaccctacaatttaaacaatgctttcatgataccgaaaattcaaatgttgttgcggaataggaaacatgacaacataatataaaaggggcacttgtgtgaagtgaggagtccagagttgatcatcctagacaatggctctataaagtaaatggtgagaatgttgtatcgactaggtagtaattataactacttgaatgacattttgacctcgtaggtgatttatgtcgctcactttgtgagattggtcccactagaaggtactaactctaatacctttgctaaaaccaaggttgacaatattgatatctaatgaaatatcaatattctgattttatagagaaatcttttatatcaagtctaaacaacaaaaaaaaatctttgttgactctaagttgaatatgctgatattttctaattacattattacaataataatataatataaaaggaaatgtttatttattatttatgagaattatcacaaatatttgtccttctctttagtctttatcaattattgaaatcccacttatatgtttatcaccatattatcaatagtttaatccttgattaaacacataagaacttactcctagaatcaaagcaacggttttgtgataccaaaatcttcaagttggtcacaaaacacacaacacaaaaataacaacatcgagtaatggtaagtacactgaaaatatgcacccaaacattacatacattgagtcccgatttaaataaacgttttaaaaactatcatgtcactgtgtgcaatgtttaagtgcaatgtgcacatatcattactcaacaacataatatgcaagttaccaatgaatgaatattctgagcaataaaagtcaaactactttagcatcatagaacaaaatgagggtttctacaaaaacttgaattctaatatgtaagtcagatcctagctaacattccaatatgattaaaaacaggcaaatgatgggtgaagaactctctggattgaatgtgaaggaattacagaatctagaaaatcaactggaaatgagtctacgtggtgttcgtatgaagaaagtatgaagttctaataccaagcaattgcatactatctaaatgctaatacttctacaatgcatgccaatggtacttacatgtttgttggttcaataaaaacttttgtaggaccaaattttgatgcatgaaatacaagagctgaacaaaaaggtcaatcccaaaacaaggattactgatttttaaactaaatagcttatttaacctcatctctttatattaaaaaactgaattttcatcttgctatgcaggggaacctcattcaccaagaaaacattgatctatataagaaggtaaacctaattcgccaagaaaacatggaattgtatgagaaggtattcatttaaacaattaagacaaacattaattgtgaaaacataaaaatctctctaagattcttaaataaagtagtgagatgttttatagcaaccctcagtggaaacatttcacctactaggtctatggaacgagggatgtcaatgaagcaaatagaattcctctactgacagaagatttggggatgagagaggaatcacacggtctaggtatggaacaagggatgtcaatgaagcaaattgatctccagcttagccagccgcaacaacaaaactatgaaccaccagcaagaactacgaaattggggtatgattcctccataaaactatacaatgaatcatgattagcaatacttgtatcccaaacttactcctggatgttgcagcagattacaactgcattaacactggcagaaaatcatcagctggtgtaaggtggcttactaaatttctatcaacaagactatagttacaagattatgcttctactgcatgaggtgatacaagagaacagaccaatcgattaaaagactttggtttgaaacaagcaacaatgtaacaggtctgttgtgatcttgtgactaaagacaccagccacttatgtaaaggtaaaagttagacataacagaataattaaagttgcactaaatgtgcatttgaattcttcatgtgattgaacattttaataatcgtttcatctttcattatccttgagaatggagaactagcttgagctttcaaaaaatatatacatattgataagtatagcttaagggttgctaaatgcattcttatggaaacatactcttgtaaccagatgtataaatatagcagctattatttgagaaaattaattgagggaaaacgaaacaatgctaattgataacaaattgaaacatgtaagcatataaactaatgaattttagtttagataaagttgattgggttcatgaagtatgtatgtaccttgtttattctggcccttaagtagcatacacaacctgtgaaactgatttcattgcatagagattatctgtattggacaacattggcattatgttcggatgaaatacatcatagacacagtaaataaacaagcataaacaaaatttagacaaacagaatatatgacttcaaactttttaaatcatttcctagcagaaactaaaaaactacattgcttttgtgctaaatagcataaattttaccacgagcatagctaataaaatattccatatatctatcatttaatacaacagtgtcattattgcaaagtagtccaagccatgggggaacaaattataattaccaaagagaactacaaagtccaagctaacccaggtatacactaaacggacatgctagcaatcagttttgttggtagctttatttgtatcacagaaggaaatatgtacagaaacctaatttaaagattgaagcttcaattaccagcaaaagctaaggcaaagatatcttcaaaataaatgagagcagaaacaagaattgaacaaaggtattaaacttcacatttcccattctctagaacagagagtcttaagaaagattgaaagataggaaatttacttttccagcttgggtttccaaagaggaagaagacaacaccatgctgcaatttaagattgggttttacttaaaacagaactggcatgaataaatcaggacaagtgtgactaagaaacttcataaatctacacatagagttactaataataactaattttcatatataaaaaacatgagaataataagattatgagcctgaggataaattacaaatccctgcccaggcaaaatcgcaaagatgggtacttgttaccaaaatagagcttacaattcaagaaggttggtcaaatcacattctagcatcatcaagaaggttggtcaaatcccatcctagcatcatcattgctcagtcttaactttcacattgctttcttttaccattatttttgtcaacattgggatgactaattctcagatatttgttatttaagaaatgttccacacaatcagtaagcccaaataactatacatccctctacagtctacacccaagtcttgattaaatttcaatgacttatacaaaaggtaactttttttcttttttgaaaca

SEQ ID NO: 186439 - DNA, 3297 bp, Cannabis indica
attttgtcaagcattaaatgcactcacaactaggccaaattttctgtgaaaattatagttagttaatttaaagttttcaacatcaaatgatgtacagtataactaaagatgtgaccccatagcatgatccctaaatctttaaactctaaacttactatttcagatgttgggttgtcggtcaaggggattttcgtttacacgtgcactattaggaatatctgccgatgaacttcacatttgtggagatacagctgctattcccttaattcaggaaatgcttaaagttaccggtgatcatgtagaggtaacacagtttaaattagttattcttttggcgattaagatcaatttttttgtgaatttttaaatgctacaagattctcccttgcatgagtttcagtagtatgtggatgaaatatattaaaaacattgggacatttgatgactcttccactgtatcatgtccacatccattttgtattgtctactttgcttgatgaagatggaaaatgaaagccaaccaagagatcattttattttgcattattttgatcataatctttgcactatcaatagttctacagttcttcaagttcaaggattagggcacttgtgccacctaaggctagtttaagcggttgaatgtgtgtgtgagtattcagagcttaattcccgttaaggaagatgtgcttatttgatgtggaaactggaaagtgtttgttgattaaggttcgtaccctattgtttgttatgtcatcgtaagtacaagtacaagtattcttttgacaattggaggaatccccgacaatattactgacatagaacctcaagattcttaaccgcttatgtcattttgctatgacttataaacataatgctgtcactttgaggcgactaatgtatatctatgctgtccactatgaggaaaccaattcttatttctaattcgttgctattttttaacctattataggttcaacactatgagagactttcgccattggttccactgaaggttcctctcgggtccttcaataacattagaacaggggattgcattgtatcattttcacgaaagaaaatatatcaattgaaggttagtatttatttattatctttttgtcttcttgcattctcttacaacatgattggacttatcttatttagctagtttcaaccatcttcacttcgtactttttcacttttaattttctcaaatattgttgatgttctgatttggaggatgaaacatacatctcctatgcaatttgcaaacaatgactacaggttaaaacagccattttattcattagttgattagttctgcatttcatgaaaagcaaatttcatatcttgcttcttacaaagttccgttaacttgtaggctagaatgagatatagatgacccaatttaaaataaataaaagcaactttcatattttgcttcttacaaagtttcgttaacatgtaggctaaaatgagatatgggtgaccgaatttaaaataaataagttgtgatggtcattagggacattgaattttgaattgttgaattgatcctacttcgcgcttgatatatgacagacaatgggagaaccagtagaaggaagacaaaatatgtactttttttctctgtttcattgcttaataaacttaggagttgtgaattaagcccgtcatcttattcatatccaaacctggggtatatacctgtaggattttggttatcaagatggttttctgcatcaatgtatatagtattgtaggatatctatgaacctttgtaaaatagagaagaaaggataaaaactattttagactctctattttgtaaaaattaccaattgagttctctgttttggtacatgacaatttagacctcgtgtttttcaaaatagtacaaaatagaccctgaatttagttcttgtcgatttctttatacaaccaaagctagcttccaacatgaatagatgcaaaaaagaatataacaagcttggtcataacacttctaggtcatgcaattattaatttttaatttgacgaaaattaagttcaagatcaattttgtactgttttgaaaaacattgagtttgaattgtcatttaacaaaatagagggttcaatcggtaacttttgcaaaatacatgttcaaaatggtatttacccaataagaaatgaaaaatgtaatatgactgccagtgtccatacttttagatgaaagcactgttcttctctcaaatggtgaaaactcagtgaaatatgtttgcccttttatcaacaattctttcagtacagtggaaaaaaggatatgattggaacatgcacgcttccttgtttcaattccttaagagggtttagttagtcctgtccatgactgcactatttctcattctgtaattgcagagggaaaaaaatatgatttcaaactttgtatttgtaatgtgttcatgtttatttgtccttttttggttaaatttcttgttattctgttgtgtttgtgaggagctgttttgccatattagtaaattaaatcttattaatggattgtatcttttcttgtatttctagagacaaatagaaaatgagaggaagcatctttgttctgtagtttatggctcactacctccagaaactcggacaagacaggtgacatcaccccactatgaatattatggcttttgtttacaattaagtcttatgaggatgtatatgtcattagcctataatatgtagaattgtagataatggtcatcagacaaataatgcagcattgaggtccatcgtatgttttctatcagtattcagtccttcctagttgggaattggctaatttaatatctactctaggattgcaggcaacaatgttcaacgatgaaagctctgagtttgatgttcttgttgccagtgacgctgtggggatgggtcttaatctcaacatttcaagaataattttttcaacaatgacaaaatttgatggtatcgaggagcgggagctcacagtgccagagataaagcaaattgcaggtgcattgaagtcaatggatattctgttgcatttttcataatctaagtatttgactagcttcatctaaaaaaaaagtatttgactagctattttaaaaaattccatcgattctcaaatttcatcttgcttactatttgtcatgaagcttattaggatctttttgcgcattaagtttaatggaataagcaattatgagtgtttatacagaaaatggtttcactgggatcttttcctgtaatatgctattcaatgttagtcatgatatttttctt

SEQ ID NO: 186440 - DNA, 1600 bp, Cannabis indica
aaaaaaagagctacataaggaggcaaaggaaaaaagagaaagagaggatcatacccttgttgggtttggtatgagaaaaatgaaaaataaaaaccaaaatcctctctgttgtttggtgtggcattgtataaaatgacgaaataaaagttttggaggactaaaatatacttaaacttatcaattgaaatccattccttcttaaaatcattctcatcaaacaaccagtatactccgaatcttttctcctaccttccacatctctttcccaccaaacaaactctcaagaagataaaaagtaaactaagacatgacaaggaatcattacacgcaacttaactaacctattcaataaagaatgaaatcatttctcatataacacgtacacagagcaaccagtacccaacaaagcagtttttgcaccacaccaacgaggcaacgagagaactatatctagaaactgaatttaccaacagaaatcaaaaattccaaaagacttgattgatttacggaacaactttctttagctctaaccaaagctaattattattactcttctattttgattgtattagcaacttttgcccaaatgctcatagccaaaagaaaattctggtcctgactctcatgtaaaatcagaaatcaaatcccaaaccacagatacaagaggaacaataataaagaagcaaattttcagagattaacgaaaaggaaagcttacagtgctgccatgtgtttccagcgaaatcctcagccttcttcgtcgcttcacccaccgtctttccccatctccccagaacatttttcaccgacgcaaccgaatctgatcaaacaaacaatcaaattccacataaagaagtatacatatgtagatatacacgcatataaaacacatttgtgaatagatacgtacctttgaaagacaaggaggaagaaggaggaacaggggaagaagcgacgtagggattggatcgatcaggagaagtcgcggcgctattggtgtaagtagattcagacactaattcggggctccacctgaccgatttcttagaccctgttggagatcggttcgtcgatggatcggcctgattctcagtcggaggcggagcttgatgttgaggttccgatcccatctctacacttgcccagccaccgtcgccgttcggagcatgaagtgagtctttcgaatcggggatcgggtgcggatcttgaatggggttttggagcttcttctccgtctccactgccttgggctcttccatcttaacaaagcttcggatcccggtggggcgcgtgagacggcgcgtaggttggttagcggggatttattattaatattggtatttaaatcgaaaataaaaattttggagcttttaatatttaatttaagtatttatgctttcggaatgtgactttttaatttgaaaaaaataaaaataaaactgtgttgaaattggaaatgtcgatgggtttaccgataaggacggcagtggcttccatctcaatctctagcgtggtctcatttttagtcgcgaagaagcatccgagaatggggtattatcgtcattacagagagtagtgagccctgtttctgtctttcggc

SEQ ID NO: 186441 - DNA, 1715 bp, Cannabis indica
tttatttaataagtaggatatgatattaaattttgctatcaatcgtgtcacgagatgcttattggatatctaaacataccatcatgtattaacttgaataatctacatgtacaataaccacaggtgctaaatgacgagatgttcgccattttggttatgatggccttatttactaccttcatgaccacaccaacagtcatggctatctacaagtcgaagtcgccatccaacattattagttcatcattgaattcaaagttaacaaaagccaaggaatctcagttgcgaatcatggttgtcatccatgaacccgaaggcgtaccctcacttctcagcctcattgaatccctaaaaagctcacctatcaagctttatgttatgcaccttgtggagctcactgatcgttcgtcctccatcatgatggtccaccgagctcgcaaaaatggctttccttttgtcgaccatatctgcaaagatagttctacattgtactaccaaaaccaaatagttgctgcatttaaagcctacagccatgtccacagccaaatcaccatacgacatacaactgctatctcagggttatcttctatgcacgaagacatacttcatgttgcccaagccaagagggtgtcgatgataattttgtcatcaatggaagtctcgggacattgttggaaagtgataaatcagagggttctaaagacagcaccatgctcggtatctgtgtttgttgaccgcggcttcaaattgagatctgaatctgatcaaatgcttattgcttcagctagtacatctactaataatactacaacaacaatagcaactaatattccaaagaaggtgtgtgttttgtttttgggaggaccagacgatcgacaagctttggagttggctgggaggatggctcaccatgtagatgtcatggtgactgtcatcagattaaccttcagatgttatgataaccatgatcatgaaagacattgttgctcaatctccatcgtcaatgatgagaaagagaaggtgcatacatatttgtgaagtaatgttttcactcccatgtataacattgtaactaatttttatgatactttttaggagcttgatgagggtgcaatggttgaattgaagatgtcaaaagaagtagagttcatagagaaggtggtggacaatgacataatggagacggtaaggagtattgggcagagtatggtgtacgagctagttcttgttggaaagggacgatttccattaagcatggcatctccattactgaatcacaacattgatgaacaagtcgagttggggcccttaggagacgcattggcttcttctcgagatgtcatttcttgttctgtgcttgttgtgcagcacaaagagccactccagtcaacgtcatctgaattacttttgcccaaaaaggatggaattctagttgccgaaaatgacgaggacccttctcatgtgtgaaactagttgtttatgtgtacttataggtatcttctatacaccattaatgcttttaaataaaatagtttgctttcgtttgatagataccaaagttgtgaaaaacctctccgggagtaattttgatttaaaaggacattactatcagatctgtttggaaaaatgttagcccattgtcagactaatttccctcctcgaaaatcattaagaacttgataaacaaaacgatgtattacaccgtattgtattgt

SEQ ID NO: 186442 - DNA, 3632 bp, Cannabis indica
gttgcagccaaaatcaacagtacccatttactgcataatgtagaggatcagatacaataaggttaggattttaatttttgtttaaaataaaaagaacttgtcttgaattttataggattgatttggatttgataaagaaagaatgttggatatgatataataagtgtgatagaatgcttgaaacatgtattttttccaccctatgcttaaagaaattgaacttttattagaaaataagttgttctgaaacataaaagatagaagaatgtaaagattaaaaggtaactaagttcatatgataagagtactcaattattagcagaaattgatcaaattaaactatgataacttagagtatctcaatttaaaagttcatgtcgatgtcgaagtctgtctcatcatagtcataacgggagctcgaaccgttttgacgcatcagcagttcctgctcatatagctggacactctcaaggcaagcccttgctaagtcagcttcctcatttctttctttcatttcttccattttgtgtgtttggaggctctcttttatagcttcgtcgagtaaagctttttccttctcatccatctcctccacaacctctccttgaggaggtggtggtggtggtggtggttgtggtgaagagtgacatagccctttcttctttctcatgtcctccaacatttctctcttccgcttctgtttgttctctttttcaagtgatacctgtattagatgctcctgcatctccattgtcacgtttgctggacatcttttgcattctgccacatctcctcgcttctgtgcaagatgctccttgagacgacttacacctccccacatggtgtgtccacagaaaatgcaacagacatgacagcttttcccgtcaaccattgtgcagtagttccaagctttgtcgggcaatcttgttcttcccattttgaacctatgtcactgtaaaactagatcaacaaaaataaactttaaaaaatctcaaaattgattggtttggtttagtcctaaagtctcttttaaattttgtttgtttatatctttctggtagaaaatatacacaatcaaaataaaacctcagattgatatgtgatatagcctaatacaataaacacaagacataaaccaatatatataggcctactgattaattaaatctgtaatgagtaaaacgcgaaacaaaataaataagaatacgaaatctgtaaaatctgtgaaattatgaattttgtttgttgttcttgctgatggtcagagagcaatctcttacataaaacagttaaatcttttaggcttatatacatgtgctttactgctcatgtacaaatgactagagaaaatagggccatggaaatataatcatgatgatccaagagtgtaacaagagctgaacaaatcaactataacaacaatcatcaaatataatgacaataatttaaagattggagattcaagatttggggaaaataagaaaaaaatgggtttgaaccttaagcagtatattttaatcatttcaggaacaaatattattacataatcaacaaaaacaacattagagaaaaaaaatgctcaaaagtatggtgaatactaccttgaaagatttacaatctagatctggagtctctgctgttctgttgattgtatacagattaaaatgaaggcactttgatatataataacaataaagtgtataattaatcttcgctctagaaaatacacacctataagtatgaccatcttaatctaaaataacatttttaaaagtaatttcacaccttaatttaatcagaaaattctgaaaagaaaacaatggaaaggagtatgtaaaggcctcaccaagtcgagaaattttttaggcaaacaaaatagggaaaacctgggattagctggaaaatttactagaaggtatggagagtacctgggattagctgcgcccacaggtagctatgtcaatctcttaaatagcaaagagaacaactttggagactccgctcttacgcgctctgagatctccgcccttgcaccctcttttaattgtgtgcaaatgtaagaacggaaatgttgaaatttattagtgatattcaagattaggaagggagaatcgctttaaatgattatagcaaaggagaaacaaaaataagttcaacaaaggtaataacataaatgcgtagttagtgcttctatcctttttcgaattaagaaggaatctggaattcaaaaggtggaaatggtcattctttttaaattcacgaggaaaggctgaaggcaggcgcaagaatatttttaccaattcggttgtttctagaataggtttactattttggagaatatatcttaatatcttatcttatttggtgaaattcaatgaacaatgaacacattaagaacaaaaacaaaatgttaccggagattgttttagcaaatatgctcttacatcaaagggcagctccttcattattaggtgctcgttgtctaagttgtccgccgtaaattgtagaaatggtaataaggggtactcaatttggtataactggtgatgatttaggatttaaaggtaatgataacccaaaatgtaggacttcccttatgattttcatattgaaaccataagtggtggtcaaatttgggttggattttttttcaacattttccttactctccatcaactttaaagtattatctcatttcataattggaagaaaaacataattaagaaataaaatatagataaaatcgctcgaaggttcagagaatatgtggaaagatttgtccttactaacagttctctactattgagcaaactgtttgtttgtgtagatggaaaaaacaacatactttatatgaatgatgacattggttgaatttgcttaagaagttactataaagattcacaaaagtatgtttgtgtttaattgggaacttgaaaataattcaagagagtgagctttgtagttagtctttttaatgccaatctttcatattaaaaagaaaatatcttaccacactacactattttgaactgtatcaattactcaaaactacccttgcttatctgggtaggttattcttctatctttgttgtagctttcctttttatatcaaaagtaaataaataaaattttgtaaaagtgtcaagtggaagaaggagggggtaggtactaaaatacgtatttcatttgctatgtgtaataaactattgtacttttgctataaagaaaattctgtcactttcggtggcaatttatgtgctagttattttgtactaagttggttctttaatgtcttcagctttcaacggtttacttatctctgttgctgaaattattttcaatgttttatcgtttgaagtcgagtgaaaaggaattctagttcaggtccatggttttcagaaggttcagtttctgatttgggtaagtttaagctaaatggagaaaattgaaaacaaggtgaaaaaaaaagaaggatcttaaaagagccccaggggcaagttaataacaagtcacttataactcttaggaagatctttaaatcgatttttcaacacttgcctttctttctcttgttttatgggtttgatagtgatttcagagatgtgtttctgctgacattccccatttattca

SEQ ID NO: 186443 - DNA, 1470 bp, Cannabis indica
tctagaagctagatcgaacaaaaatgatatgaatctccccatactgtggaaatccctaaatatcgtcatgattagaaagtgattctctttgattggtcacgtgatgataagacatgagtgcaccacataaatactcgacatatatattcaccaaaacagttatggcatctgtatttaggttcaataattagccattaaagaaagcaatctctcaacttttatgtatgcatcggtatgttttgttaaatttcactgatataattgaccaaaataggtacattcatcatgatatatatatatatcggcattgattaattccaagcatggtctatatatccacattagcttcgaaatgatcttctttcttaattgaaagtcattttttctcctcatgttcagtgttgtctttttcctgagtttcacattttcccaaaggaaaccatataggtaagtagtacagaattggacaaaatttacaaaaacctcacaaccttatccttcctggattacacatggcaaaaacctactgataagcctgaacacagatcaggacagaaattctttgttggtttcttcatgccgtgactgaataaatcaattcagttccaccttcaacttctagttgtaatactctccatttctaaaaatacgtatataaatgtatatacatcatacaacatactagacatactagtggcaatttttctcaatgaatgaggtccacttatagctttattattagtattagaaaacaagtcagttggcataattctataagacaatttggtgctttctaaaccacacaaaaagatgatctagacgtttgcatagatcagtaacagagctcaggccttagtatatataaggttcccaatactagaactttttcttcacacaaaatttgacctgaaatacctctttttatcatagtgatgttggaagggaaagcagtgattggagagacagatatgttgcagactatgcaacaggatgcgcttggtttagccgccaaagcacttgatgttttcgatgtcacagaggctacagagatagcccgattgattaaaaaggtaaaatcaatattacattgtgctaagattgaaattttcatgttttggtcaatcaaaacatgtgacatatctgtgaagaaagttttgaagatgaagatttcggcctttaagacatcttcattatttttcatcttgattgtttggttgcgcaggaatttgatcggttacatggagctgggtggcaatgcattgtggggacagattttgggtcatttgtaactcattgttctggctgtttcattcattttagtgtagggagtcttgccatattgctctttaaaggatctgctggttttgatgctgaggctaaccaatttccagccatggagtctgtcaaagcttagaagtttcttttctctttctttcattatgttatgctcttcttgtatccccttgtatt

SEQ ID NO: 186444 - DNA, 5195 bp, Cannabis indica
cactctctctctctctctctctctctctcttctcttgtttctctctctaaaataacgtatccctctctgagcctgaggaggaagagagagaaacaaagacaattatatgtatagcttcttctctctctctgcttttggtggtgagcttcttcttcttctccttcgctcgcttccatttcacgaaaccaattgatactccaagctgcccctacatttctctctccttcgctttctctttctcttaaggtcagcttcttcctctctctatctttctgttgcattcattttagattgcaattttccgggaatttttttaaggtgaagaggtttctcctactgattttcgttggaatcttattaagaaatgttgaataaaattcttgcatttttcttttcttctttcgttttcggggttttcttttgtgtttgtttgttttgactcatttgtgaaagcttaggacttgattggattgtggtcgatctgctctggattcattgcaatcaagccaaatcttgctataagcttattgttttaatgaatgtgattggattttaattggtaatgggggtttattttttgttattgaattgattcaattatcgttaattgagtttgctgcgtttaatttcttctttggtttgtgttgccgcttgctctatgatcaaaattgagcataattggatgaaagcgaagtcgtgtgatgagttatgcatgtaatagtagattagttttttgagctttgttagctcattgatagcagtaactggattgggctctatgcattcattcaattttatggctgcggttcatttagcttgaactttcttgtatatagtggtgatttcagctcgattagtatggtctgatctacctcttagttgaatgatcaatgggattttgtactgctctttgacaggagggtttgatgctttagactttgttgttgaagcagatctggagaagggcagagttcttggttgattttctttgggattgtgaagtgaagcaaagctggccgccacagtgtcttggaggttcgccagcaacggcagcagtctggccaataatgatttggtttgtcactgactctttttgctcgttttctcgcatgaattttagtgtttattttttatattttttttgggaagagagtaagataattgaagagatgagatatgtgagatcgatctctttagagcagtgtgagatgggactggatcccatttgaaatgcaagatctatcaaaaaaaacaaaggaaattcagcgtacaaaactgatatgctagtatgtgtagaatgccaaagctgttttataaccagtgggagctaaagtagctgtgattgtctatggaagtgctgaaagctggttttcatttgtgtggaataatatccatgcacacattttggcaacttttgggatgctatagagcttttgttttatttacctattcatttaatcgttttatttttttatggaaatgcgacacatactttccaccaggaaaaaaagggccgcctttccaatcttggtcataaacatagaaacaacaatactggccagcggatattttctgaaatttatttgattttgctgaagtacctacttgcaaacaatatatactattttagggatagttaatagttggccacttatattggcattgtgcacttaatcagtcataatttatctttggcttcagttaatggattttttacttttgctcattgcttgcattttatggttacaggaaagaaatggtgatatgaaagttcaagattcagagcctccaactccactttctgttgcaaagatggggtcaaggtttgttcaagtttcattatgcgcaatttgcaatctgtttttttttttaaaaaaaaaaaactttgatcgttgttaagctatttcattgtatgctcatgcgttctggagtgggaacattgcctagtttaggcaagcatctgtctgcatgtgaatagatttgaaatttgaattatactgttgaagtcatttttagactgttccttcatataattattactactgactatttgcattttgttgtttgacattggggagggtattcgaacttgagacctcctcattgtgtggagaagtgtgaaaccactaggctatgcctatgaccacccttaatatttgcatttagtttacagagctccataaatttttctttgtagtatcctcattctgtacaaatagtagagagatttcatgtaatgagaactgccttagcttggatactctgtatgtcttaaatgacaacttgttaatcaccgattatgaagattccagatttttatatccatctttcacaatatagttgggttatttgccacttaaggctatctcaagctgtagggtgagtgcgtgtgtgagtaaggttctagggttcaaaccccagctgggacttactaagctaagtgtagctttacatttaattcgaatgtctcaactctttttccaagaaagtagttcataacatttcattgctctaaataagtgaaacttgttcttccttttgaaaggcatatattagctatggttatgctttttagttgcactcctcttcttgcccttgacatgatgatttctgtatgctcaattctgtatccctttattctatattgagtacctttttttttttttttttaatgaaatttatttataccctgtcaacctagggacatgctgagtaaatgaccatttattgtaggaattgacaaacatatacatccaaccacaattaacaaaatgaaaatcaagttctttcaatgttaagtttgttaaattcttgttttttgtctcacatgcttgtatggtttacagagatcgtagcagcatggaggatccagatgggacattggcaagcgttgcccaatgcattgaacagctacgacagggttcctcatccgtacaagagaaggagtattcattgaagcaattgctggaacttgttgatacacgcgaaaatgctttcagtgctgttggatctcattcccaggcagtgccagtacttgtttctcttcttcgatcaggatcgcttggtgtgaagatacaagctgctactgtattaggttctctgtgtaaggagaatgaacttcgggtaaaggtcttacttggtggatgcatcccacctttgcttggtttactcaaatcaagctcagcggaaggtcaagttgctgcagcaaagactatttatgcggtttctcaagatggtgctagggatcatgttggatcaaaaatattttcaactgaaggggttgtgccagtgctttgggaccagctaggaaatgggcgcaagaatggtaatttagttgatgagttgttgactggttcacttaagaacctttcaactagcactgagggattctggagtgcaacattgcaagctggaggagtggatatacttgtaaagttgctgaaaactggacagtcaagcacccaagctaatgtttgctttcttatggcatgtgtgatgatggaggatgcatctgtttcttctaagatacttgctgcagaggcaaccaaacaactactcaagctcttgggacctggtaatgatgctcctgttagagcagaagctgcaggggctcttaaatctctctctgcccagtgcaaagaagcaagacgtgagatagctaattttaacggtattcctgttctaataaatgccacaatagccccttcaaaagaatttatgcagggtgagtatgctcaagcattgcaggagaatgctatgtgtgctttagcaaacatttctggtggtttatcatatgtcatatcaagtcttggtcaaagccttgaatcatgttcttcacctgcccaagttgctgacaccttaggggctttagcttctgctctgatgatatatgatagcaaagcagaatcaactagagcttcagatgctttggatgtcgagcagactttgcttacacaaatcaaacctcggttaccatttcttgtgcaagaacgaactatagaagccctggccagtttatatgggaatcctatactctcagctaaacttgcaaattctgatgcgaaacgtttgcttgttggtttgatcacaatggcaacaaatgaagttcaggatgagcttgtaagagcacttcttacactttgcaacaatgatggcagtctatggcgtgcacttcagggccgtgaagggattcaactcttgatttctcttcttggactttcatctgaacagcaacaggaatgtgcagttgcacttctttgtgtgttatcgaatgaaaatgatgaaagtaagtgggctattactgctgctggtggcatccctcctctggttcagattctagaaactgggtccgtgaaagccaaagaagattcagcaacaatccttaggaatctctgcaatcacagtgaagatatacgtgcatgtgttgaaagtgctgatgctgttcctgcacttctatggcttctcaagaatggaagtcctaatgggaaagaaatcgcagctaagactttgaatcatttaatccacaaatctgatactgcaacaattagccagctgactgcattattaaccagtgatcttcctgaatctaaaatgtatgtgctggatgctttaagaagtatgctttccgtggttcctctcaatgatatattgcgtgaaggtagtgctgctaatgatgcaattgagacaattgtgaaaattttgaattcaaccaaagaagagactcaagccaagtctgcattcgcgctagctggaatatttgaatctaggaaagatttacgtgaaagtagctttgctgttaaaactcttgggtcagtgaagaagttgctcaatgttgaatctgaaaatatattggttgaggcctcacgttgccttgctgcaatctttctttcaattaaggagaatagagatgtggctgctattgctagagatacattgtctccattaattatccttgctaattcttctgctctagaaattgcagagctggcaacatgtgctttggcaaatcttatcctggataatgaagtttcagagaaagcagtagctgaagaaattattttgcccgctacaagggttttgcgtgagggcactgtctctgggaaaacccatgctgcagcagcaattgctcgtctactacagtctcgccaacttgactttgcaataaatgattgtgttaatcgttctggaactgttct

SEQ ID NO: 186445 - DNA, 3031 bp, Cannabis indica
agtttctttttttttttttttgagggtggcaatttaactaagcacaacttgtaaaagaaaaactagccaattaacaaaagaaatagtgttaaaaaaataattatgccaagttttaacatttaaaaatacaaaatccttaaacatcaacttaacccaaatatttataattttataggaatctcacactagagtaagagtaagagttgagtacattggccgtggcccgattctttccaagaaaattcatatattcattggggaatgtaagtggaggtgtatcggataagaccaatgacgtgtctccttcttaaggattgatgttgattgccgcgtgggccccatctcaacctttttgtttcccatctttcccacgcaccgccaaacgtggcactcactagtcactatcatttctcaagcaaagaagggaaaaaagtgcactagccaaatgacaattttatcctcaactcaacaaacctacctacccaatcctaggggcaaaaccaggtgacttcaatccgcttttctgaatgggccacaaaattaagctcatcttcaccccaatccaaatcaaccagccaccttttgctgactctccttgcttttcattcgtaaattgtcgttttcctaaataattattagtggcgttcttgtaatttaataataaagaagggctatttttgttaggacactgtatatatatacccattgatatttctcaaccttatctactttaacatcatcagctggaatatctccatcttcaacctcaaggttcgttctttctcacattcgttcgctcagatctcataatcccatttgtaaagacgagattttaacaatgtttttttattttttgtatgtatatatgtaacagagttttgattgaatggcaatggaagtaatttctggaagatcgtcttcttctactttgaatcccaacgctccgatgttcgttcccttagcttatcggacggtggaagacttctccgacgagtggtgggtcctcgttcagtccaatccttggttccaagactactggctccaggagcgcttctgtgatccacaaactgattcttccttccttgatatttacgatcccgacctctctgaattcgatgccctattcgattacgaaggtaaaaaaaaaactgtaataaacaattccaatcactacaattgagttgaatcgttccgatctaacacggttttcttttttattgttgcagatgagaaagtagagggagatgcagatactacgacggacttgatcagtttgggggcagggaaatggcggaagggccgtgctccggtggaagctccgaggtacatcgagaaagcgccgaagtttgtgaagccaaaaatgagtccaaggacgattcagcagccgaggtagattcgagtcaatgttcgactcagtgagttcggtcgcgatttcctaacttatctgcagtttttctttttttcttttcgtaatgtaaatctttcttgtacagagtaatgactttagtagttggtactcgtcgtagtcctagtttttaattttacgaccgttcttgtaattgcgaccttttattgtggaataaatagaaaaacaaatttacagagtaagaaaaatggataatattttaatgatgatggaatataaggtttcattacattaaaaatttcatgtgtaatccaagattgtgcaaaatcctaatgctagtttatattagttactcataagagtcgtttagcttcactgggtctctggctctgcctcccaagctgtagcagacttgccaatcttttgaagagctttaatcacttcttctgtagtaacattgcccgtaacaatgactttgttaagctgtttatcaacgtcatatgtctcaatgtctgaaataaacaagaacaagaagttgaaaaccccaattcaagaaaaatgaattagaatctaattgctcttatagagtactaaccttgaattttcttaatggccttcaatatcttcttgatgcaatcaacacaatgtaaacccaccttcacttcgaccacctaatgtttttattgaaaggaaggaaattaagcatattaattagtgaaactgaccacaaaagcagtgtgcacaagagtttacttacgttaggcattggtgaacttagaaggaagagctatcgtttattagtaaagagaagagggaagaagtgttattttgaggcttattaacttcttttagcttcatagtgaaaccgaacctacatataaaccaacagtggtgggtgaagaaaggtattggattctttacgcggtggaggatagctaacttttattttttattttttttgtctttattgttaagttgctttattcttgattgactttatacgatagagctagcttccactaacagggtcggcacaaatcattaccccgccgtttcatgctgcgtaaaaagctttgtatattattggtttataaatcaatttcggtgaaaaatggtatatgaactttagcaaaagaaaataggctacaatcaccaatgtaaggctttgttaaaggttcacaataggtggaagaacagacaccgtcaaaggatctttctgagaataattatcagaatattatatgatatccatgattctaaattttgtacggacgtggtttatttatggcaatttgggaaagagagagatgagaggctcatcaactcacctttggtcccaattgaagggttcaatttcttcaattatctatcccacatatataatctccatgaaaggaatgatgagagacataattactccaaatcagctcttttaaggctcgggttaagcagattttgtgattagtagcaacggacaatatatcagttgctctagtaggaaaataaagagagtataaccacaaaaatctagtgatgtgctacgttggaaaaccacttaaattttataatttgtaacattcaacctcataaatttatttttgatgtaagtgctacagtgaataacttatgagtacacaaatatacacgaagttgttatagtgccaa

SEQ ID NO: 186446 - DNA, 1948 bp, Cannabis indica
tatataaatatatatattgtagacattgaataaggaacagtctgcacatatttataatggtccattatatgtgtacataataacttcgaaaaataaaaggaatgggctttgacttggtcagcaattgtaaatacgtatacattaatatataacaatgtcctgagaagaaatttaagatgcaaaatttagttagggctataagtgcgattgtttcaataataaatgttatcatatatatcaggtgaactcagcaagtgcactggtcaaaatgattattagatagaagagagttcaactgtcacgtcttgcaattttctcattttatttttattcttgagtgatgtagtctatgttaatctaatctaacataaagagagtctattgtgtatattagtttttaattaaacttattaatgatgattttcaatataaattccaatagttaagtatcaatttatttgttgccaaaactgatccaatacactgatttcttttcctctagtcctttataagagacattaacttaatagcagcactggtccaaaaaacaaaagaaataaactatatagcatggcagtgatgattttttttatttttttaatacttgacagtgatgattttgctttatacaaatatatatatggtttataagatagggatgtaaccatggtggtccaactaaaaagctccaacttataagcaccttcctaactcatgagattgatatatacctttcttgtaatcaacatataacataaagataaattagttcaattaaaaatttaatatgtacaaaaacaaaattgttggtacaacgataaagtatgatcagtaagcaaaaaatatttttttatttatttaaaaatttagtatattttttcttctaggaaaatagccctcaagcctcaaaagattttgagctattttgtggaacccagtagccaagatctgtggggacatataaaaaataaaaggtattctatttttacaaactttgagacaagaaaatggccatgattcattattataagtttaataaaatttataagatcccaaaaggctagtgatgtctatggtggatccaacccatttaagtctgttcctaaccataatcataattgttctctttagcttatacactgataaaaaggactactttctttttatcttttgtacctaaaataaagatatacatttttggactttagagaattttattttttccttttcccatctctttaaatgtaactttatcttcttttaggacgagttgtctctgttttttatactcgtatcaatgattaaattgtggtaggaatatccttgaagattatataattgtttagtataaaagagtattgagttaaagcttcattcaggagagaattggcttgtttagtcacaagcacgaggcctatcgaccccttcatattgttttaatttttaagatgtgtaattcaacaaattaaagatgtatattcgccagactggctctaactttgctttcagacttaatgaaaaagagaaaggtccaaaggaaaaattgaatcgatgactaattatataaatatatatatatatatatatttatagagagagagagagagagagagagagatatatatatatatactagctacgccctttagttatttagttatgatggtaccaatatgacaaacaaatatggattagcctattctatttttatttttggaagatagattatacgtacactcctgtgatgaataattgtttttcacttacataatgctttcctcattgctcacaatgattaatggatcaaatccccatgagatggtgggagtgatcatagtttcttgtgaatgtggctaaaatcatattagctagaaactaatattaagaaaaggacattagttagcaatgaagatcagtcttataattatatgtagttgattggctatct

SEQ ID NO: 186447 - DNA, 4341 bp, Cannabis indica
  modified_base (32)..(32): a, c, t, g, unknown or other
ccatacgagatgtacgatcctacgtgcttacncagttttcgtcttaggatcgggaagtttgtacagcacagcagccgcagccaggtgcgccagcttgctagatcttcatcttactcaccttggaatgtcccccggcgaatgaaaattgtaacatgtacatttctccatcgacagttagcttctctcccagtggaagcccgatttcgcagcaagattctcattcctacctccctgatcagcgcaattcgcctgaaaatacttatggttctccaatcagtggctcctgcataactgatgacatgagtgactggaagtacaagctgaaagagctcgagagtgccatgctgggtcctgatttaagcattcaggacagctatgacactgatgttcaaaggttggcaaataatagttcaaatgagattgagagctggggacaaattatggagccaatcttcaaaagggatgtgaaacaagtcctaatatgctgtgctgaagcagtttcagataataatctgttagttgcggagcggttgatggatgagttacgccaaatggtgtcggtttctggcgaaccaatccagaggttaggtgcatatatgttggaaggacttgttgctaagtttgccttctcagggagcaatatatgcaaatcattgaaatgcaaagagcctgcaagttcggaattgctctcttatatgcatattctgtatgagctctgtccttacttcaaatttggatacatgtctgccaatggggctatagcagaagccatgaaagacgaaaaccgagttcacattatcgatttccaaatcggtcaggggagccagtggatcactttgattcaggcttttgcagccaggcctggaggacctccccatatccggataacaggcattgatgactcggtgtcagcttatgctcgaggaggagggctcagcattgtaggaaagaaactctctaggtttgctgaaactttcaaagtgccatttgagtttcactctgtagccaaatccggttctgaggtccaactggcggatcttgttgttcgacctgatgagggtttggctgtgaactttgctttcatgcttcaccacatgccagatgagagtgtcagcacacaaaatcaccgggataggctactgaggctggttaagagcctgtcaccaaaagtggtgactcttgtggaacaagaatctaacaccaacaccgcagctttcttcccccggtttgttgagacactggattactacgcagccatgttcgaatccatagacgtgactctccctcggcatcacaaggagcacaaggagcggatcaatgtggagcagcattgcttggcaagagaagtggttaacataatagcttgtgaaggaactgaaagggtagagcgacatgagctacttggtaagtggaagtcaaggttcaaaatggctggttttacaccatacccgttaagcactttggtcaatgccaccattaaaacactattagagaattactgcaataagtataagcttgaagaaagagatggggctctctatcttggctggatgaacagatatttggttacttcttctgcgtggaattgagaaaacaaaaggaactggggcaaggaaaaacaagtagtttttgttgtttacttattttagtttactttgttattggtttaactttcctatgaggagggtgacatgacattagccatgaactcttctcacattaaagttagccgtttttgtttaaagccatttccagagaacttaaaaaacttcctgtgtttcactgatagagagggaatacatgattttgttgagttattaaaggctttgtatatggataccgagtaacgaaatctcatttttcccttttcttataccattgtatcatgtgagtgaaaaagttaaaagactattgtaacacttttggaaaagaaaaagtttcttgaacatatgctaaagtaaaggtattctatattccattctttgccaagtttcgatgaagacgtgaaaaagtgacagagaactggctctaactttgtttagccagccaagtaacaagaaaagtaaccaaatccattcaggtcacttttttcaaatgcaattaaaatattaaggttgaaatcttgccgtgattgaattgaggagtgagactattgcacgtgcagagataggcaaccaattttagcagcataataatgtcattatctctcaatgtgatgggtgctagctgtgtggtttatgaatagaataggatactgcaatggggaccaaataatgaattataaaacagagaatgtttcaataagtcaacaaatgttattattatacccacctggctcatctcatttattcacatgtcattttttaaaaacaaccaggcgcaccaacctttgtacttcattcatgttacagtgtacttactaccatgaaagagtaagaacaaaacattagcctactcagtaggctagaaagcaatgaaattatctaaatcaaggagacaaacgacctatttagtcgacatttcagctttaaccaaggtgaaagcactaaacaataagaaaataaatattcccagcgaagaaattatttactaaggattctgtaagtccaatttcatctctgaaaccttaaccctacaccaagacagtttcaactttctcataaatctcttctaagttttgggttttcaagaacgttggggtagattacaaatggacaatgtaatatccataaattatgtgccttatacaatctaaaatgttaaatcttttattccagttaacatagataatctaaatctacacacagagatatatttccaatacatgcttttttttttttaacatactagctacttccccacacccaaagtagaacctcacttggacgaatagacaagggaaagcgatgaagaaacgcccaataccaatatgcataacccgacatattaacatcatttaaggtctccatgtaaattacaggaacttgattgatatatcactgactcagttgttgatgttttctaccgtctggcttaaatggctcacttgtattatggtggctttcaagacccagtttgttatcaacaacctggttaggttttgacttaacaatacctgactccccattttgctggctctttatccaacttgtacagctcgaactattattgtcattgcccgattcaacggcaacattttgaaggggacccctttcttctttgacacccgacttaacattttgttgttcatctggtttaccatcgagggtggggcaagattctatggccgtgttggagtcaggtgtgtttggtgatgatctagtttgtaactcaccatttgattgttctttgggtggtttactttcatgttccaatatggtactaacacccatatcaagagaggcagttttaccatctgacttggcagtgttgtcaacttgatctgcagttggaggggcacttaattcggatacattatgggtgacagtccttccgggtggcatgtcatgattgtgttgtccttcatatgtggccatcaccagttttgtgtcataagatgccctttccacatgtttcttaacagggcatccagaatttgagcatctatagtaactcctgcacaaaaagattgcagaaccaaagtcaagaaaatgctaaatgcagaatcattatgatcttattctacaaaatcaagattacatgctactggcatacggaaaagtaaaagataaaggaataaaaaaggtcccaaacggatttacagggtcaattattacactcataaatcacatttatcagaatgcttgtagcagagcaattaatttgctaaggctcaggtcagatatcacacattgtggaaaacatcattgagtgtgtaaccatcttaaaattattgactccacgctatgcaagacactgaagttaaatgacacacagcattgactaaaatcttctttctcattacgcaggaaaactcgtctgaaacactatagatttatttccttgttatctttgagaacttttttaactgtggacatcacaagagatgaaagaagacatgtatcttaatttggagcatttaaacaaaggtgcagacacacaatacaattataacagtctataagcatgaaatgttacaaaccttggattcagatttcctttcaccattttctgtccatatttacgccacctaaacccatcattcacgatatcaacctcacttagagtctgaacaacaactcgtggcccactggttgaggttgttttatcttcagtggttgttttgctacaatgtctgtctttctttctatttcatgtggagaaaaacaattaagcttatgt

SEQ ID NO: 186448 - DNA, 1811 bp, Cannabis indica
tacagaaattataaaaatataacagaaaataactagaaaataaatttaagtatttatgcgataaattatttttaaaaaattttgctctaatttattcaaatttattttaatctattgaatagatacacaacacgaccactaccacccacgccacctccaggtagttatggagcgttgtgtacacgctccttgttcaacgcgtgagatattccccgtttaagcattttgaggccccacgtttctcatctctctctttctctctctccagcgagttaagtttgagttgagtttggcttagaaatcactcgaactctccgaaactccccacacacattcacaagaagaacccaccattaacccaaatattctctctcacaattttcgccaacaccaaggattatttccagtgagttcgattcatctcccgccttcctctctccctctctctctctcaaattaatatatatctttggtttgaggtctgtgaaacccttgcttttttttctctttacaaaaatggagattctttctctctggtaatcgccatttgggttcatttgatctctttgtaatactgtttggtttccgagaatttcaagggtaaaaaattcagaaaataaaaataaggtttttttttatcatttcgaatttattcccacacttttctctctctctattttaaatttttatttaattgcttatcatttcgaatttaggtatcgattaaagtgagttctcaagtttgctctttttttcgctggtgaaacttcctccatttctgaatttgaagctttttcaggatttactttatctctttctacccatctctccttttttttttaataattaaaatttaatggatcattggttgcttaggatggccaaggccatgtgcgtagcctcacttgtaattataatattaaattaataactatctgtcttgttgcgtgattcctttcatttcccttttttatttttctttctcagattctatatatctctatgtgtttgtatatataagcaagtcttatcccatatccaattcttgtggatttcatttcagatgcactttgctttctccaactaacttatttctggatccagattcgctcaaattacgaggtacaggttaggaatttcggttctaattttcgaattctgaaattaggatctatcgcaattttcttaatttttacagaaatgtgttgtttatggatatgaattatgtgatttggtattggctgatttttccctgacttgtcaatgtttctcttttgacaatttctttagcaagtgcaaggacttctttgatttactgaattgggatttttagttctctgataattcagttgatgatctcataaaatcttaggaataaaggtcaaaccttttctatagtgcaattctaattgatttaggatataaaggaagaatattttttgtaaatttagggtcttcctgtaaactgtaaaaggaactggtttttgggtcaaagtgtaactgaaagaaggcatttacggatgaatgtaaaaatggtggatgtagaagcaaagagggacaaagaaatgcttcagatgcctcatcctggtacttggatctttatacttaaaagtcaaagtatgtagcctatggacatgagtctttttttctagttttattttcttctccaagttgtagtcttccgtacgaattatacagtgtgtttcaaaaaattgtaattttgtgggaatctcattagctttggtttatggattttgtgtatttgaagagatcaggatatgattgctttgaatttttaaacagttgtggtt

SEQ ID NO: 186449 - DNA, 1018 bp, Cannabis indica
tactttcttcttgttttccttgtggcaaacaatgctcctctttctttcttttttcctttcctacgagcttgattctctcaaggaggagatggcagtcagattctcgtatcaagatcagtatatacgtatcacttcatgaaagacatgatagtatggagagaacaaaggaaaaagaaattataaacttacacaaaggagttaccaaagtggagccaagttatattgatttataccgaactgaggctaggtaatattggcatttcttgcactgactgcggataaaaaaaaattaaaacatgaggtaagccgtaaacaatgaactaccaccataggtaagttatatataatgtgcatccactccacataattgcatttcctatttcataatttgaagttgatgtagatgtttctaaaagagtttcgtacagctcaacttagatcaatgatcatcgaatgccttgaaaggcgataccgattatcatggttgtacagaaacaacatacaaacaaaatatatatgagcatcttataattgcgcccagttactttacttaaaattaaaaagcaaaataagcatatgatttatataaaattttaaaatggctcttgcctataattgcatgaacacaattacactaaaacaaaagcgaagcaaacaataaatagtctaattcattttaacaagctgtaatagtgtgatttaaagatcaccatggttaatctatcatatatgattattaggccagaaaactgagactctgcaaggaataaaataaaagcatgaagtcatctacagtaaaaagacaagaaaaaacatggacaggttcactataaagtgcaaagtgcagtgctgtatattgaagtatggtcgccaaagtacaaggctaagtgtttagaaaaccaaaaccaaacctttcactaaaatgttagaataggatttcactcaaggtgcttaacttttgattgtaaggaagaacactaacttttagtgtatgatcaaatatatgtttacgtgaccc

SEQ ID NO: 186450 - DNA, 977 bp, Cannabis indica
tgcgtctttctacatccccataactctagttttactaaaagtcccttgtgttggatcatattataatgaattattcgttaatttagaatgagctttttctttaattttattaaatgaaaattttaccctaaagagaaaaaaaatgaaatctatagaagagtttgattcacaataacagcaattggtacttattcatttcattgagagagcaaaagagtacctcccatctagacgcggggaaaatatgcttgttcttctcataccagtgtctttcaaccaccttcccagcatgagactgcagaaaggtcacttaaaaaatgattcaaatgaattttcccaaaaaaagagtaccaacaatataagagaatcaatacactattatatgtaaacgataaagaatgttcatttaaaaagtaggctccccaaaagaaaagttgctatagatagtcatgttttggtttcacaatcaaaggcatccatataaaatagcatggcaaataacttcttcgcaaatcaattatcataaactaattttaatattgctataatcaatatcatcattattgttgtttaaaattttatctcagcattatggatgagaaactaacacccacataattacttgtgaaacagggacttattatggtgagtataatgcaattataataggtacgaaaagatgataagatatcatcttagaccgaaggtgattcagagtactataaatataaacaaggccaattgtcacatcttcatctgtcattcatgtcatgtttagatggaaaaacgtttggaaatttggtataatttgaataataaccatttttacttgagggaaaaggatcagaaaaatgtgtttagctagagagcaataaaatatttctaaaacacaaaagatataaggaatataaaatatacctcatctttctctattgttgctatcagcaattgttcgcacatcctcgtgcacatcaaag

SEQ ID NO: 186451 - DNA, 2417 bp, Cannabis indica
ccaaaaaagaaaaaagaaaagttgaattgtatgattatgttgtatatgacaattcaaattttgaaaacacacttttattcactatatatatatatctagcctcattcatcaaccacttgcttctgcaatcaatcatcttggtggacctttctcacataactggtggagccctataaaaatattgagagaatataacatttatgactactgcatttacccagggctatggttatggctatacttcaaagtaccatgaccctcataatctaggcttttgcgtgttgaatttcatggtagtccccctcatactttttttctcacaaaagaactctatctattactaaaaaaaaaagaaaaaagaaaaaacccttttgttttctgaagtctacagattaattgaatgcagctgttatcaagtatggaatgatttttttttcaagaaggaaaaagtaagaaatgactctctaaaaacttacagttaggtggtctagaagggacatcctatcttctcttattaacggtttattcaaaatgagaagcaaaagaaagtgacataataagtaacattaattgatagggtgaaaaattaatgtcacatttattttttttcaacttgctttactgtttttcctataatatttatggttgacactgtagttaaagatagtatgaaaaattatgaatgatattttttgcttctactgctcaaaattttgatcttataccacatcattgtgatgtatgataagaccatatataaatggttctctgaacttataaagaacattattattattattattattattattattgttttgttctagaaaacagaagaggggtttgagctgtcagttatgacactgcaaaaaataaatgatttgttattaagaaacttagcccttctttcgttattaaacttttgatcccataacaaggcacttgagagttgagagctgtgatctgtgtgaaagaaaagagggagagattagaatgggcccacaagtccaattccattttggagttatgggcttgtagggcccatatccacgggccctatccgaccatccttgaactactttgtccaaacccatatggagcagagtgttaggggaacctttgactgaagccatattgaaaaaaaagataatccacgtttatgtagtcccactcactctcataaatattattctgtttaatcacaacacaaacttacctattttgtaaaaatatatatttaaaagaaagaaaaaatcaaatcaaatctctacctaagaacaataaaggagtatgtttttctctttcaccctttgagactagagtacctaaccaaacctacctacttatcttaacttacccatatgagtaagaggagtgtgtgtaattacttataatgaatggaatttggttgacagtaattatatttttaccaaatataactttgcccataaaagaatgataacttaaatgaataaatgtttattgaaaaaggaaaacattttcacatgggtgttagttttcgactttctaacaatggaccatccaatccactaatggatcgggctatatattccaagtatgggttgtctctattaatcttcctttttttttttttttcttttatgtggatccgagtcttcttttattttattttaattttaagtaggaaaacgatacacctcttttcatcatatgttgacaagggtattttcgtcattttaggaacgcatgtgaaatatgaaacaataaaacatgagttcccttctcccttccaatatatcatatacttgtctaatttaaatccaaattaccacaaatattctagacaatatccttatattcatggcttgtttattttatttttcatttttattagataataattaaaaaaatattattattttttttggctaattcaaaaattcatgctagatttttaactattaaatttaaattaatactaaaactattcaaaaccaattatgttgtatgattttatttattgtgatactatattttaattaatagagaaataaaaaaaacagaatttattttattgtttggatctataacattttttaaagtgttttggaataaagcgggtaccccggtcgtcattttcaattaaaaataaaagattgaaaatgatggtctttttataaaataaacaaagagaaaataaaaaagctcaaagatgggttgtgggtgtgggcctatgactttgtatgggttgtgagccttcaccttcagcttaatcttttatgatagatcataaaacacattctcctctaactattaaaatatgatacaattttttccctaataatataaaattatattttagatactaaaaaaaagtagaaattgtacgttttatgagtttttatacaaattgtgtgaaaatatgaaaattttgg

SEQ ID NO: 186452 - DNA, 4875 bp, Cannabis indica
attaagttttgttgtgactagtaaattaaggtttttttttttactaataattttagcatatttaagaaaattactattcaaattgtgtaactaaaaaaagtgttaaatttaacacaatgttaaaagttgtagcaataaatttgacacatgttaataataataataataataataataataataataataataataataataatagtatacgtttgtaatacaataggtagctacccatcatgatcaactgaccatccagaagaaaacgacttaaatgtatatttatataactagatcgtataatgtttatcatcaagctgactaactacatagtttataactacagattatacagcgcccaatgaaacaaatatatatgactcgatatcagagatttttctttcctcattagcccgagcagattataaatattgataatttaatttggattatagtaattgttgtattgaggatggatcttgatacatatacatattctagatgcttagtttaaagaaagtctttgctactagaaactgtgactatcataagtcataattgaactaaattatataattgtttttttttcgaaagcatatataattgaactaaatatttatataagtgaggtagggttaatatacaaaattaataaatatatattttaacattgatttcattatatgtatgtaggttaatatatatagttctaattgatcaattaaatatgcatagaaaaacaatagcccttttaatttgatttgtatttctcattgttggtcaatttttttaattaatcaggcttaccaatattgatttaatgatcaacttggcatgcatttgtattttattaagtcattttgcaatatatgtttggagggaaagaaaagttatcagagaatggaaacaaattgtttgattgaagaaaacgaaaactattaacaaatattattatttatatagcgcacactactacaaataatggaaacttccatggtgcacctctaaaaagatgttcattcagctcatatttattttagcatctaaacaaaattagtctaatttttatttttatttttataattatgtacgttatagttatttaagacatgctgcaaaattttgagaaattcaaaaaaaattcaacactttaaaaataaggtatagtgatgtgctcgtgactttcttaatttatatatgcgtgtgaaataaaatattttaatactactttttatattgcaaattattccaaatttcctaaaattttttacaaaatattttaaataattataacgtatacaactaaaaaaaaactaaaaaaattcttagataccgaaatataggatacatgatggaagcatccaatcacattattaaattatagtctcaaatattaagagattgtttggctgtaattttagtttttaatttttagagttgtattttcaaaagtgagaatagaaaataattttttgtcattttaaaaatttactcgtgtttgactcatgttaattttttaaaacaatttttagattttatttaagaaaaaagaaaaaatcaatattctacaacataccacaacccatcccacctctcgtggactggaccccaaacctcagaccccaacttggacccgaactcctaacccatgctagagtttaggtctagggtccgggttcgagcggggtctaggttgaggttcgggttcgaggtttgagcccgggttctggtcttggtccggagtttgggttgagttttagggtccgggtccggggttggagtcggggtccaaggtctagggtctgtgttcggggctgggtctaggtccaggtttggatccgagtatgtgagcaaaaagataaaaatgaatatgttagacaaaaaaataatgtctgagtggtcctttcttagctagtgttatgatgataaatttcatattcgtgtggtggacttggtttattcattgatttataccgtcacttacttgatcacttatggtggtagggagatagggcctattgctctaggaagaggtatctgccaaagtaatttgttatcccctaatttattctttctttgtgttgaaggtttctcttcacttattgagaaatttgaagaaggggggctcttcatgggtgtcgtgtatgtaatagtgctcttgttattttttatatgttttttttgctaatgatagttatatttattgtaaagctattgaaatggaggctcgaaacattctttatttgttgcaagttttcgaacgagcttcgggtcaatgtgttaattattctaagtcgacaatcttctttaaaatgaacacttctcagcctaccaaaactaagatgtgtgatctgttgggatgatggaggcgtcggcaaatagtttgtatcttggccttccttgtaaaatggatcgtaataaaaatgatattcctggctttttgaaagataagattcaaaagagaatttatggttggaaaggtagattgttgtcaaaagcaggaaaagaggtgttgttaaagaccgttgctcaaactctgccttctttttctatgccaattttcttgcttcctattgatacatataataaattggaaggaatgatgagttaatactagtggagttcgggatagtctcaaacgtgtggagtgagttagctgagttggaagaatttgtgtcttcataagcatcatgtgggtcttgagtttcatcatttacgagattttaatttggccatgttgggtaaataagcttgaatattggttacaaatgtgtcaatcctttgtgagtcatgtataaagtttgatactatcctcgtggtacattcttaagcttctcttggtgctaattgttgcccataatttctcctaaaatatgtgacaagtcaagagctggccacatggtgctgagatcgatgctctaggaataattatgttaaaatttcctaaaattataaggtaaatcattaggcgcggtcgagaagtcccttcgggagagcaagctgcgctatcccaactccgagagtcaaatctacctggagatgtggtaagaaaaaaggaatggatctagactccgcgagtccggaccaaagtcactataaacgcattaaatacagtatggaagaaacatctgcaaattaccttaaaaatacgtatcagaggtttaaacccatcattctctaatttcacactattcaatatcccttatgacagttgcaaaatgaacagtcaaatcatcagcagaaactaaaagtctatctcaccaaatacctatagcaagtctacgtgttatacaaaatagccagactgccctattatccaaatttaggaaattgtgcaagtgatactcatataattatgataatggtaaccttttcactatctttatgaggctataaataccctcaactatattcagttaagggattagaaaaacagattgtaaaaaaatgtttgtaaaaagttattgcattaataatagtgactcgtggactaaagctcattaatgccccaaccacgtaaaaattcttcgtattaaacttcttataataattaaaacaactctaattaatagttgccaaaaatcttaatcaacactaatgattatcatgctattgttttcaatattgtgagagagtcgtcgggggtatgtcattgagagaaaccagtgtcgggtgtgttaaagttgagctatgatgcaagccttcatcttgttgcgaaaaaggctggagtgggtggagtagtatgagactcatggtactatcttagtgtccagtacctaattgtggagagggatgttggaatcggttgttgttgaagccttggcagtctactctagcactttgttgtgtgtttgacttggatatcaaggggtgatcattgagtttgtgccaatgtggtttgtgctatcaattcacgccatgttgatcaatcttatttaggatgtgtcattgaagctatccttgctcattttgattcttttggtatatctcttttagtttttgtccttaaatggccaataatgttgcacactttttagctaagcttgctttttcaatgtcaggtgattatatttggtggtctggctacccgaagtatatttataatgtaattcaaaatgacattaatatatcttaggcactcttttctctcataaagtttttgtgaaaccctagcctatgccttaacaaaaaaataaataataagtatttatttacttttaggagaattatcctaaatattatttttatttattttttaaaagtttataatttaggttgctctggtagtttttatgtgaattgttatgaattctagttgtgatttaaagttgtctccattagttgctatgtgaattctcgtaatattgtaaacaaaaaaactgcattgaagtataaaaagaaataaattctatatttttaacatgatgaatgaattgtaattgaaattttttgttacaaatataataataattagaatataaaaaaaataattgctaagaatattttatttaataattataattaatttattaaataaaattattcttaattatcattttataaagaaacaaaatatataaataaatgagaagatatatttttttttaaaaaaaaaaaaaactacgtagcaattttattaatagtctacaacctaatcaaacaatctcccttacttagaaacacaagtaaagataaaataaaaaaatagagctaattaattgattgtctgattcccgaacttcatttagtacaaaacgaaattaaataaaagtcaaatgaaaatattagagcatcacataaccttaagaatacctatatttagttttatcttactgtctcaaagaatacaacagtagatctgttgtagcatgtcca

SEQ ID NO: 186453 - DNA, 3295 bp, Cannabis indica
ttaggcagctcaatgaaagctcaactatgtaataaggggaagatttacaatgtaatttatcccgcggactccctaatatgaaattggttagcaccacatatatatagttcttaacatgaaaattacttccatatattgaaacagttggttccattgcacggttcaaattattagactgttaacaactgcttgcatatcaacaaaaattaacacatcttgaaatattctaaatgccaagtgtaggaagtttaaaataacaagtacatcaagggaatcagaaaatctaattttcttcatctaatggaaatatatctcaaggaaggaagtaaaaaaataaaagtacatcatgggaatcagaaagtctaattttcatctagtggaactatatctataggaagtcaaaaaataaaagaacatcatgggaaagatgcctttaaaaatattttgaaaaattgaaaaacttcactaaatcagtacaactaagaaaccagggaacattgaaatgacacttaaggaacctctgattgatcagatcagctattgcaacatctaatcttcggtagtttgtaaactctataactaacatagtatttaatcatcacaattctaccatgttccacgaattcaattccaacatgcaaaacgaaaaaaacgggaaagggtaaacaagtacacaatgatttaaagagaagactgaacacaattttaatcaaatgttcactacaaaataaagaattaccttctttagctctaccttaggaggtggaggctcctggtagaagctaggcattggagttgctttaaaggtcaggctcttcctgagcatcttaatctcagcttccagagtttcctagtataaaagatgatgtcaaaacaaaacaacttttgaaaattctttttttatattaaatacatacattaacagaaacctataacaaataaattgtcaccttagactttgcttgcaagttgttcttctctaactcctttgcatgaatcttctcctcaagtttagtgtagaactaccaaacataacatagcaataagaaaacacaataatcctgaaattgatcttaaatgccagaaagggggaagaaaaaatgaaaaagaagacacaagttagaagcccaaaaattacctctctcctcttttcagctcgttcatcacacttaaaactgaaaccatagttcggaagcatacccatcttgcgagatctagcatcttctgatgtgggacttctgcaaagtagttaagtagactgatggattgaacgcttgattatacgcatacagaaatatatgtcaaaatccagatactagcaacagcaaagaataacaaaaaggatacgaggaggatttagcatctgcttccacttcagcttgattcacaagttcttttttcagaggtttcatcttcggtttatccctgcaacaatcgattctgtcaaatttgccaccaaaccataatagggaaggggaataaagaaagattatatagctagaccactaactataaaaagatttgaagaaaaagattgtattatagtaaagagaaaaagaacaaattatcaatatcaataagctcaagataagaacaattggaaaggacaaatcactactcacgtaaggtcctcgggcatagctacctcagactttccagatagctgatgaaagcataaaaaaaatgtcaacagcatcagatacgacagagtacccattaaataaatgtttgccaccgccacatcaacaaaatgaaagaaacgaagaaaaattcagtgctctcataacaaattttactatggataacagaaccttctgttcagtagatgatccacttctaaatgtctttcttgcttgtgcattagaagcaattgaatcgttgggaacagtaggtactgcctcaacatctttgccagttttgttcttgtacgctgaatttcccgaagcaattttgggtgctgagggtttcccattcttgctcctggcttgacccttttgcaatttggtctgctttgaatgatcagcacctttcgcatctccttcctgtaacaaagtcagttgaaaggcttgaatcggataaatcacaaaaccaataatattacaatatgtaacaaacaaacactcctacctttgcaatagtcagtccattgttttcattatggctaattgattcctcttcagatagaccatcatccaacttaacacgaacccttgcatttccattcagtgatgctgcctcattgttattgacatcgtctacaaccataaaatcctcaccagaggaggaattttgagcataagagccattctgatggaccacctgaagcccatcagtgcccactacctcatctgaatccatttacacacgggaaactgcaaaaataaacatgcagtgcaacaaattagaaaattcagcaaagaaaaacacaccaaccttcaaattgtgcattggggaatcagacaaatctcaaaaccataaactagaacatgaattttcattaattagcaaaagcttttttcctttacttaagcgaacatatgacattttcagcatatgtcaaatacccaatcgaagtctttgcaatcacaaaggttttaacaaatgaaatcatggaaaaccacttaaaaaccatcgacactcgtttcctccagtttcccagcaaccaaacacaaaccaactttcataaagaatgaatcttggcaagaaacttgaatagtaaaaaaaaaaaaaaagaaagaactccggcataatcaaatcaatgcacacaaacatggacttatttctcaaaataaaaaaacaagatttatcaaacccataaagagaatcctaaaaaccacaataacaaaatcaaatcttcatagacaaatacttaaacttctcacattgatccacttgtatagagcgcaatgcaacaaataggtacagaaaaatcgatactcctttaattaacgagacagccgcataaacaaaaaataaataatttatttcaatttaaaaaaaaaaaaaaaaaaaaaaaccctaacactagagataaggctagacaaacacaagatttaaaacccaaaatctctcattttcttagcagccaaacatagattaaaaaataaaaaatactgacctcgtgaaacgtgaaaacaaaatcaaaagttcattatctccgattcaaaacaaagggcttcgaaggatctgagaaagaagggttggagaacgagaacagagtaaatggatcgagggatccgaacccctaaagctagatctttaagattcaatatatttttttttaggtttttttttt

SEQ ID NO: 186454 - DNA, 7193 bp, Cannabis indica
gttagtatcatgggtgatttgaggccaatatgtaatgtcttgtataagattatctctaaagtattggttaataggttgaaaaccgtgcttccccaaattatctctgaaaaccagtcggctttcattctaggccgactaatctcagataatattatggtttcttaaataatgcattatttcaaaagaaaacgtaaagggaagactgactatatggcattgaagcttgatcttagtaaagcctatgatcgtattgagtggggcttcttgagggctatgatgagtaaaatggggtttcactaccgcttcatcgacttgatctttcatacggtttctacagtctagtatatggtaatgcatggggggcataagattggtccaatcatttctagtaggggaatttgacaagtggactctttatccccatacttgttccttatttgtgcgggaggtctttcttctctgataaagagggttgaaagaagcagccacattagagggtgtaagattgctaatggtgcgccaactataactcatatgctttttgtcgatgatagctacgtctattgtcgcgcaactgagaatgaggctgacaatgtactccggttactacacatgtttgaaatggcttcaggtcaacaagttaatcgagcaaagtcttccattttctttagtgctaacacatcttttgatcttcgagacagactttgtgcaaggttgggaatggttcatgctagtgacaatagcttctatttggggtctgccatgtattttgggtagaagcaaaaaagccattcagaatttccttcaagagaaaatggaaaaaattaagatcttgagttgggagggtagattcttatctaaagcggggcgtgaaattcatattaagaccgttgcacaagccataccgtcttatgctatgtctgtgttccttttacctattgaaacatgcactttgctagaaaggttgatgtccaagttctggtgggggaattcgtcccaacattcttgaggtattacttggatgaaatggagtcgtttgagtcgacacaagagtaatgggggtcttcgtttccgtaaccttagagattacaatttgtcgctacttgggaagcaagcttggcggttgttgcagaggacagattctctagtaggccgagtatacaaggctcgatactttcccaatggttcaatgctaaatgcttctcttggtgccaacctgagttatatatggagaagcattcatgaagctcaaaatttgccttggtttgggggatgttgaggtgttgaattctccttggctggctgatgatgtaaacccctttgttacttctactcacccagcccttaaccattgtaaagtgagacagctaatgaatataaatggagaggcttgggatgcagatttggtgaatgatttatttaatagcagagatgtttcccttgtcttgaacacgcctattaatgtggggaggggtgacaattaatactggaaacatgatcattcaggcttctatacggtaaaaagtgcttacaaatatatacaactcaacaaaggaaattggagtgctgatatggaggatgtagtgtggaaaaaactttggaaatttaaggttccaccaaaagtgctgcactttatgtggaaggctcttacacattgtttacctacaagattgcagctccaaactaagcatgttgatgttcctatttcgtgtgttttttgccacataaatgatgaatctatcagccatgtcttacttgaatgtcactttgttcagagctgctggaatcgggcaggggtgaatgttgttgttgttgctgctgctgttggcttcgacttctctctctagtacaaaattttgctgcattagggacggccaggtatgattgaggaaggattaatggtagcttggtctatttggaaagctaaaaacgagctgctatggaagagtaagttccgtactgctgcagaagttgttactcatgcgcgctcagccggccttgatcaatggagttacgctcaatctcatcgttttgatcctttgtttgtgcctggtgctaaccaaaacaaggatgagcaatggtctaaactagaaggaaataaaatcaaggtgaatgtggatggtgcaatcttccaaagtaacggttcttatggcattggagtggtggctcgtgacagaaatggtcagttgattgaagcttttactgcactaagagttgggaatgttcaaccggccattgttgaatcatttggagttaaggaagcgttaagttggattaagggtaaaaattggtctaatgtggttattgaaactgattctattgtgtcagttcaagctatttctagttcagtttttatgccctcagcttttggtctgttaatttctgattgtaaacgtttgttaaactgtttggttgatgtgtctatttctttggtgtcgcgatctgctaataaaattgcccattgtcttgcttgcggttcttgttattggtctaatcgcatctttaatgtcagtaatgtccctagtgttatacatccttctataatggctgatttagctattataagttaatgaagttcaccttctattcaaaaaaaaaataataaaaaaagaagaaagagaagatataaggatgccatacagtaatatttttattattattctcttttactctaatagtaaacattcattaaaaaatgtcaaaaatatatctatatgttgttagatttttagttaatcaatgtgttatcttaataaataagaattgaactaaaattgtaacaataaatataaataataatactagaatttgcaataaatgtaaagaaagatactgaaagttaaaaaggttcggccctagatatcggtaatagcatactccccttgtgctttattgatcaaaattgtaaaatcaataatagactcttgaatgcaagaaaaataacaatggcagagtcttttctcgctaagtactcaaattttcagatacctttcccagatcatgactggacctttatatagggaaaaagatcggtgcttctcacttcaggagacgcgaccaatgcagtgttatctcaaccgcctccttggttattggaggtgattgaaatctgattcttatggtaatatgctactattttcgtgggtttgtaactgtcgttgagcttcttgtgggatttgaatatttgagttagtcactgattatgaggatctcccgagagtgtgatatgatcgttaacaacctttggggatagaagctaatacttgggagtgacacccccgagacctaacatgaggagggtgtcaattgtcatctagggctgacacccccgagatcctttcgacgttgtgggtagtcatggtgtcatgaggatgtactcatctacctttgaggatgccattacgtccatggtgggggtagtatcatctaccccctagactaatttgactcgtaagtgtgtggtgattgtttatcccacctatgagggtgttagtccactatttttgttgatttcttggatgcaaccaccttgctcaagctaggggtaaaggtgaccgtcaaacttccattccaacgatcatgaccacttgtcatgactaacagtcaccccgacggtcatgcctttacatattctccattaatccagtctcagtatttttatgtcacgtgtcgttactcttgccacgttattatcgtcaaattttgggtaaatatttgcccctaagtttctagcacaatgactatacgacaggaactttcagtctgcgccttgctttagttgttgacgctttagtgatacagtgccgagaataccatgcctatactagaattacactccaaaaactcaaaaaatatttttcctaactattacacttttcacattttacaacatgtcccaatcacaattttttccaagaaaaaataaattacaaggaagaaaggaattatttacaagaaaaaaaaataacatacatattcaaaaagagaaaatgactaaattgttttttagccccaaatagtagtgggaattataatagaaaaattgaaataaatgacctctttttttttttgtaaaaaatggtattgagtagttatgggattaagtgaagaacaaaaaactttcaaaaattaccaatttgaaaaattgcatctttttttcctctctttctcttaccatttcgggtgtgacttcaagatcaactagtagaggcatttttgagatgtttgggtgatttcttggaagctttgtggtataatcttcactttgggcaagtctccaatacttccatagcaattttttgcatagaaatcaagatttcatggagttttgaaactttcttctcggtatcccttgctatggccaaaaattcattgtagtgatagggtttttgattttttgatgaaatgtgagtgtttaatgcttaggttttgtagtatagatgatgggtaatgtatttttggttttcatttgatgaaatttggtgagaaaatgagtaattttaaaacttttggttgattgtgttcttgaacatttgaagaacatgaaaaagtttcattttccctccatttttcaatttttattctcataaagttgtaaaaaaatgtgtttgtcaaaatgatgcataccttgagagagattgttgaccacacattggttgtgacgctgggtcacattattcgaggtcagggtaagtaccccgagtgtgtttgtgtgtccgagatagggctcttcaatgccttgtttggagatttagggtacaccccgagactacaatgtagcctcatcccaagaatggggtgtcggggtacaccccgagatgaggcttctttccctttttaggtgaaaataagtcgagatgggggtttggggttattacccccgagaccactacatgggggtcgggttaccccaccccaaggcctatcaatacccctcgagaccacgtaccccgagttgggagctctcggggtacaccccaagcttcctttatctctttttttttaaatgcctcgaggccctgaagccacaccccctaaagccatagaccccgagatggggatttcgggggtacacaacgagttcgaagcatgtatttttttatgggctgagagaaagtcttaggggtgcatcacgccgagaccaccatatggggtcagggtgtagtgcttcgagacaaccgtaactcaatttaatgggttggagacaattgtttcatggctacctctctgggtcttatatatacattttcataatatgtcagaatttcttttacaaaagaatagaatggaactgtgactctacagcgaaggatgggaacaaagatcaccgcaacgttagtcagaatgatcgatgtgttggtaaaagaaaggtgtgaacattgtattgacatgggttttgtacaaccagtgttaatcagtttcagtctctagaatgttttcaagtcagactttcttatgcgcgagactaaatcctcgcatgagaatggttcgtctaatggcacatcttcaatgaaaaccgcgacatcctcatcatcttctcatttgtccccacgagcaagcaattcaaagtcttgccccatatcctcaatttcattatttggagcagctctgggatggataaagcttccttgagaaaatacaatggattcgcttccttgcacttcaaaaactgtcggtacttcaagttcttgaaccaattgagctatttcgccaatagaccatgaagcttgcaagtgcaatgttgctagaacctcatattttgacagcgatgttagaataaagttgtcatcttttttaggttcatccacaaatactcctccatcagactcgaagatctagctacctgagagatcgctcatctgaaagatagaagatcttttcagcgtgttgtgcgtgcaatttcaagaaaagtgtcctcacatgcataagttgacaaaaataaagcatgtaaaagtaacattatagaaaaaaaaaatgcaaatattcatgctatttttcatatcccaagtgaaaaacctatagacatgtgtagacattcatagtattctaccaaaaagtgtgagtattcgtagttcattataaataagatgtgaatactcaaatcaaaggtaaaaaaaaaattcctgaaaaattccccttttgacttatttcttcttaaagagttatttcccagaacttatcctcccattttcatactatttctacccaaaaaactcagaaggcacgcgattattcaaagaagatactttaaactaacaaaaagtttttagagaaccaacctttaatctaaaagcctattggagttcatgagtttgattaccaccttgaagaattcttcgaacctcaaaatgatctttagcgaaagaaaattcctcaaagttgactaaaatttcagaaaagttcttggaattttaaagaattttttttaatgaaatctaaaaatgagagggaaatgaaaggaatcattttgtatcaaagaattttaaatacggatcagtctcatccgttaagatcgtgatatgtggcgtttgaaaaatcaaaagtcatccaatccaacagttgtctcaaaccacgcctgcgcaaaccctaaagggttcgatgacgtgacatcttgggaagataaagcaataaatacgattgtcatttaaaaaatctcaacaagacaatcaaaggccatcgccatgtgacatagcaactcacctgtccctcgtgattagtttcggtacttgacaaatagttgtcatcgcaaaactagggccatgtgttatagtgcgaatattttgcctaaatacgataacaatctcttaaaaagttacacgtggagccagtaacgagtgaatcaaagaacataatgaacacgaataagagttcatgtatactcaggattcagactgatctactaatgatcattgttgtgatatgaataactctttcatggtaaacgacatgttagatgttattttatatcggtccagtcatgtataattgaattatacacaacacatttaatacatgtctatccacatatgtgattcaaatcaaaatcacacacactagaatatagtgtatagtaaattgtacttgataattctatattaaagattccttactttaatacactaccgatgtattttattcatattgtacaatcttaattttcgtgtacagccttatgaatatgaaatttttagata

SEQ ID NO: 186455 - DNA, 3497 bp, Cannabis indica
ttgtgcaaggtacgtaacttcactattagtaacctcttcagtcgcagagaacttattattttcaaccactacagtgatttgatggcgatctatatcaaagaataaaggagaaactaaaacactcaaaatcaagtcactgaaactggctaaaatactcaaaatcatgtcacaaaaacaagattaattacagtaacaaaattctaatcacaatatatagtaaaacttaaccccgacttagctacacctatgcctaagaaaggctaggacccaaaaaaattaagaacaaaaaaccttaaatacattattatcatagattattatcatacaactcgtttaataaatattatttgtgagtatattaatctttgttattttactttaaaaataaaaaatttcatatatttttattttaatcttaatattagttccttaccaaaaaaaaatgtcaataataaaattataattagttattataatttaatagtggtatatatgatatgaaacaatattggtcaggcaattatttttattaattagattattgttaaatataatcattttagaatatgaactgaaatattatgactactataagtataaatacattatttaatcactattaattctctactttcacttattatttctctccataaatatcacatatatatatatattattttctctcaataataataatattaataataatggacttcaataattttggtcctccagggattaaatttcatcccaatgatcaagaaattattgaattttatgtttcaaacaaaaatttcaacactcatcatcttcaacccaatctcatttcagatgtgatgaatttgtatgattttcatcctcaacaacttactggtaacaatttttatacaaaattattactttctttaatataacttaattttctttaattgtatattagtaatattagttttattttatgttatcaattcgatatagatcgatactcaccgatgaatgaaaatgagtggtatttttactacgaaaaagattcatctttcttgtcacaaaataataagagatcgaatcgagaaggtaaaaatggaacttggcttggagatccgaaaaagccaatcttgaatcaacaaaacatcgagattggttttaaaaggagtttggaatttgttgagtcagatgaaaaactaactcaatggaatatgatcgagtatcatttacttgaatctaataatatacaggtatctaacatgttaccaaatttcgatattcactttaatgtttagtatcttaaattcatgtaataactaatataatgttttttttttttgtgcagcaatgcaattggatgttatgcaagatttataaaacgaaatcaagagaaatgaagacatttacaaatgaggataaagaatcgaacataaaacgacaaaaattagtacaagaagaaccaactctcgagtcagaattaaatctttattgtaattctttcgaagatgttgaagtagggcaagaatcactaccaaattcatcaacagaattaaagaaggatgatgagttcgaaaccatatctgccaagttcgaaaacttgtttagaattaattaaatgtttctttctattattgatagatacatgtcgtcttttcgaaaatacgaacttaagacatgtcgtttttcattaatgacatgtcgttaccgaatattgttagtcataattggtgtcaaatctcattacaatcttaaaactcatttgaagcaatttagattgtaataaaaattattagtacttaaatgaaacagagttaattttgcctaaatttattattttcctagttagagatatgatagtatgaatatgttcattttgttccattatttgtataatgttcattttgttccattataagaaaaaatttatgttttgtataaatagtgataaaactttaaaatatagtatttttaaaaataattaaatatttttttaataaaatatcaaatatagtatgttaaaaaaaaattagatattttttttagaaaattaaaatatatgtccctactgccccactcttgagttggccctgagtagagtgtaagtgttggtacaacaagtactgtcacctttaatgagtcatgttttcgttctaaatctaatatttccaccacaaatacttgtaagtacattatgtttaagagtaattaaactcaaagcaaagcaaaacttgtagctaaaggattgtataacggttgttatagactgttttaaaacctttactcctatgattaaaccatcatcccatttcggttttgaacatccttcctataccaaccaaatgaccaatcatgattgtaagcttcacacttgtttttcttaatattgggaaaaaaaaagccaaatggtgcattactacttctaattttgttatatgtagatgacattttaattactaacggctccaatcaacatatgatatattgagccaacttatattactcagatgtcgattgggcacgttgtgtaacctagatggatgatcgaaaaatccatactagttttcaaattaagttagaaaacttcttagatcaactcttttttttttcagttataaaattttgatcacattttgatcctattctctatcatagcactattggggttggtgctcttcaagttttgattgaatagaatgttcaaagaaacattatattaatggtaaacaagtttatagttacttaatttagagctctctctatttactaaatcttttggtcaaattttcatagtaccaattaaagattaattcaagtatatgaaacagaggaacaatgttacaatattacacaaagaaaatttaacaataaaattgatgattacttcttctagttctcattattactcatcttaacactcaataatttgccttaaaaactttgtttttttttattaaattatacacatgtattggagagaggtatatgatcaaaaacttgaatttattactttactactaaattcaatcaataatccaaaatttaatacatcaaaacacttgaaaaaatgataaagaaaacagaaaacaacttttaaattttcataatctgcgatctaattaacaccataactctgaaatcttcgggttaagaatttgaactatcaattctttcatctcaatatctctttgaatagaatgattaagaaatttgcgatgatcttcaatcaacaatggaatgagttcccacaatttagcttcaaacatttgtacaagaaaatctccaagctcaattatgtcatcaatctctaatttgaaaggaaagaaaggacaaaagagaaagaacacgaaaagcataatcatatcgaagatcgaatcaagaaaaacatcatcattttcatcataaaaagcatcatgctgaacttttttcttccctttcttgtcaacaattattatatcttcaaaatacttaaccaaacaaagaaacttgtgtaggaaaaactggcagttccg

SEQ ID NO: 186456 - DNA, 2405 bp, Cannabis indica
tttttttttttttatttacttctagatgcagttgtgggggatttatgtatattgtatacttataaagtgtgttagttaaaataaagaaaggccttcttgacttcttgtttgaatgagataggaaggtcttttttgtctttccttcaaaagataatataaaataatgaactaaaatgaagtatttagtgttctgaaaatagaatctttaacaaaaaagaaagcatttatgtgtgggggtggggcaatgggtatttgaatttgatgtggatttttgatgggcttgtcaaaagctttgtagtggatgtactaatgtagtttgttaagattttttctttgcttaatcacaacattattatcattatattgggaagatttaaataacatgatggtgttgatagtatctagtgtagtatagtttgccactttagaaaattgtctccggttcatagaattgtaagttttggtcaaatgagaatattaagctaaaatcatacttgagggccatccatgtgataaatggctaaatatgcaaatttcctcaattattttcttatgagcctctatcttggttagaaataaaatgtatgcatatgggaatactgatgctagagatcatttcaggctgttcaattaatgattatgtcattattatttataaagatgatttggttaatctttcttgaaaatatacttaattgacttgagttctttaatttgtccatttacatataagtgagaaaggcttcaaacattatcctagagtaatataatgtttgcctagtttaaaatgtatacccctaaaaaattgtgtgtattgctcagcttggaatttatgggttgcttagtgcaactcatatatggttcaatttagaaaatgaaattctaatgatttttttttatgatatttactcaaattagagcttgagtttgtaagcaacattttatcttagtcagccataagtagcaagcatgtgatagaatcttgcgttaatcgaaatagaagtttggaaaaatagcaatatttcattttgttattactattattatatctctatgtatgttaatgaagtttttatcatgctcctctagaatttctttgaaatgtttagtgagattttgctgattcatttcaggactattgaaaaaagtttctcctgaactgtcacgtttatctagttttcgggcccttttcctttttcgtttatgaaaacaatcttttgtcatactttgcaaagaaaagttctattgtgttttatttatttttcttttctcgatttattaatgtaatttattatactttgactcattctctgttacttattttatagctaatgacaaagttaataataataagatattgcagaggattggtgaaaaatatcttccatgagagtgactcaacatgaggcacatcagtgatctataatgtatcaaaaatatatatgaaaaaaatgaggcacatcagtgatacgagaataaccattttcacaaaaaaatacagtagttttagagggaacaaagctagaagagtataataattaagaagaaaattttctcatttgtcattagagttgaattggattagtggattccaatgtcatgatttttccttttgtgagcttttcacaaaataattgtgcaccttaataatgtaatattattagctatgttcgttctcataaatatatttgtgtttgatctacgtgttttattttttttgctgattcttgttattttttcttaagaaattagactcccaacctaacgccaaagcttgtttgtttcttctttttatctatttgtcaaactagtacaaggtaattcgcgcatctgatctcttgattaactaatttatgatggtttggtcattatttcagtttttgcactattatgagaggtaaaagctaattttgcaattgtaagttgggaatggaaggaaggaactagagaatgaatctgaatcaaaatctttatttattagatgaatttgtatagatttcttcatttatggattttcttactaatgtgtgaatgttagtatgttcatatatcaaaatatatatcatgttactaatagactagatcttgtgtttagtgtttgttttgctctgtcaaatttctacatgtactgattttgtgaggaaaaaccagaaccattattatgtatttttttcagttttaactttgtatttagttttttttttttttttagtctgtaattattagtttattgttggatattgacttttacttgtcttgtagcccaaaagtgtagacctttctttatacagattctgtattatttcataaacatgcgacatcatgttgaaactcaataaagtgaaatttcgtcagtagtgatactcaaaagctggtaggtgtcaatgctgacatttacgtactac

SEQ ID NO: 186457 - DNA, 2656 bp, Cannabis indica
aaatcagtacatatattttttttaaaactgtacattacatgatatatagagagagacagagagagtagattttttatatttattgtttatttttcaaaataagaacatgcatttgtttttatatttttctctttctctctctatatgtctgtagtcctctccactctctgacacactactcactatatggcgtaaacttgatgcctgatagtgcaagcaaagcaaccctctttttctaattttaattttcttttttataaaactcccttcgtataatttcctctttgcctgaaaaaaaatctgtttctctctcttttatggttgtgtctctactactataaggcataacatcttgtttagtgcttcactaacaaaacccacctcctaaactctttcacttcctctcttcttttccttctctctctctattacgttttttttttttttctcttgactgtttgctgtattaaacctaaatatttctatatctcaaccttttctccatctgttatttttctttttattgaaattgcacttaggagcagcgaaactatcgctgtatataagaggtttaaaagaaaatttgacattggttttgtctgtttcagcgttcttcatgttatttgatgatgccttgtttgtgctcactctctctctctctcccaattcctatttctagtgagaaataaagagatagaagggtttacttattgatattttccacacatttagtacccatcgatccctttctctctctctcttttagttgatgataagtcttttgttttgagtgttttgactcatgagtgaccaccatttcttttgatcagtgaagatagacaagtatatatatatataaataaaagagatgcaaacagcggaaagaaagttccttatttgcatggccagttctcttctgcggccgccagtttttggactgcagtattagtagtatatgcttcttcgatttccttttccttctaagtttgacttctggaaaatgaaatggatattcaaagtatggccatgaagaaccttttgcacctgttctttgatcaaaaggcttggcccaactagaccccatcagaatttatagtttatactcttatttctctctctctctctcgctgtgtttattcctaatagcctaagttcgttcattgttgtttttttttcttctttcccttgtcttagttttgattggtctggtagagaattgatcgaaaaaggtgagtgatgaaagacatgaagcagccctaaagagaacatccagtactgtttctatttctctcctattgtgttaatttgcttcaaaaagagtggacaattttcaagaagagattaattctatcttagggtaggacatattttgagaatatatttatatatatatattatttgttttaccatttcaaattatttctccatagagctgctaccttccaattcaacacatacacactctcttcctcttgtcttgttcctttcttctcatctcttttttgtttttggttttggtcttcccacagaagaaactacaaaaaaagaaccttagagtggggagagagagagagagatcataaaaagctcaggccatattatcatggaactttctagtcatcaagaaggagacatcccaatccccttaaacagtactccatatggggatggtgggcatgggcatgggcatctgatccatcatgacccatcaccccacaaccacataattccttcttcggcagtagcccaaatcatcccttccaataatggctcctccatccccacaagcctggaggaccatgtgccctactgtaataatactaataataacaagaaaggtgttaagtacagagagtgccttaagaaccatgcagcttctatgggagctaatgccactgatgggtgtggtgagttcatgcctagcggagaagaaggaaccattgaagccctcaagtgctcagcctgcaattgccacagaaatttccacaggaaagaagttgaaggtgagcctaccccttatgatcagttccaccatagcaataatattaattccccacatctcagtagaatggctgctgggaggaaattcatcttaggtcctcctcatcacaagggtatgctaggcccagattcattaccagggtaccctacagccacaggtactttcataccttcaagaacaggtccaatgccccatcatatgatcatgtcctacaacatggctgggtccctcccttctgagtcagacgagcaagaagatgttggtggtgatggcggtggaggtggaggtgggtctgtggcctacaggcctccacatttggctaaaaaaagattcagaactaagttcactcaagaacagaaggacaaaatgcttaactttgctgaaaaagttggatggaaaattcagaagcaagaagaatctgtggtccaacagttctgccaggagattggagtcaagaggagagttctcaaggtttggatgcacaacaacaagcataatctagcaaagaaaaatcctccacctgcctaattaaaaaggaaccaagatcgaaatgaactcttttctctagctctccctatatattcgatcttcttcttcttcttcttcttttatttttagtttgttcttaagtagtttttactctttttttttttt

SEQ ID NO: 186458 - DNA, 4130 bp, Cannabis indica
gtgtgagcgtgctttggctgcttttgatcttgatctgagagtgggagtaatgttcagccgtattcactgtacctctgaaaattttgcggtatacactggacttttgctccctagtgatcggattatggggttagattcaccatctggagggcacttgagtcatggttattatactccaagtgggaagaaagtctcggctgcttccatattctttgaaagtctcccttataaagttaatccacaaacgggatatatagattatgacaagctcgaggagaaagcacttgattttcgccccaagatacttatttgtggtggtagttcttatccacgggagtgggactacgctaggttccggcgcattgctgataaatgtggagcaatattgatgtgtgatatggctcatattagcgggctagtcgctgctaaggtgtgctgtcttctgcttctggatatgttaacgtttttaacatattgtgtgaatgtgttttttatccactttgttttatgatagtatttaaatgattgcgtattggtcaaattggctttctttttttttttgttttttttgttttgaattctaattaagtaagcttgattatgtagaatattagctttaatctgaatagtctaactctgtttgtaattttttagtatgcaatataagaaaatcttttggtgttagaatacttggtttgtgttagattattagtctataaactgatagcttatactaaatggaatttcttgacaagtaatgaaatcagcataaacttttctgaggttggttgtgcatcctatactgtagtttcttttgttcttaggtttgtgtatgtgatgcttgtatcaatgtatactctcgataaaaagttagacattcctcttgggttacaatgcattacatatttttattaatttggtgggttgttgtgtctattatttacaggaatgtataagtccatttgattactgtgatgttgtcacatccactacacacaaaagtctccgaggtcctaggggaggtattatcttttataggaaaggcacaagatccagaaagcatggagagggtaatatccattttgatgaggataagataaactttgcggtctttccagcattacaagggggtcctcacaataaccacattgctgctcttgccatagccttaaaacaagttgctactccagaatacaaagcttatatgcaacaggtgaagaaaaatgcaaaggccttagcattttctttgttaagaagaaaatgcaggttggtgactggcggtacagacaatcatttgttgctctgggatttgacttctcttggattagcaggtaaatttatctttttcttttcaaacaaacatatttaaagaaagatgtgtatttacctgttcgaatggaaaaaataaatgtttactcaattgggttgtagactcttagtgcagcatatcttgatgcttttcctttggatgctgaaatattaattgcatagacattgtacttatctttttcgttattttcaaagtggtccacatgttttatgtgggacatatctaacgaactattaggttctatctgacaaaaaataaaaaggaaaacggaaagaattattaagttttaggatatgggtttgattcttctgatgtactttcctgcttttggatcttccattcatgattattccagtgacctcaacatagtggggtcaattagctagctcattgtcaattttttagaacaaattggaataaagaaatataagcttcgagtaacgtttatatgtttgttaacaagtgtaagttaggcctaatttggttttcatacttccatttttttaattttttttaataattgtattgcattctttcaagcactctcttttaaccgttggttttttgacttgtcgcattattgtgatttcttgtgtttgaagacaaataagttgcccaaaatgctgtagcttttatattttgttatgttattttagatgatatctggaaattttactttctgaatagtaaaaaaattaaacaattaccatgtttgtggtgacatatcatctagtacataggtatttactacactttgaactgcttagccgtgtggcatctgcattcgaattcctgaatgaatggggcaattgttatgcatattatgtttgatcacttttcctcccaagtttttggctgggcacaatgcattttcccccttatttatctgttttatttaattatgtattgattgttattctattctaactttttgattattatttcaggcaaaaactatgagaaggtctgtgagatgtgctacatcactcttaacaagtgtgctatttttggtgatagtggtgcaatttctcctggaggtgttagaattggtgagtattatcttcctcccttttctttgtgggtacagaggcatagtactttagtacgtagggcatctccaatgtaagcaccaaatggcatatttggtgccaaaactatttttccataattataaagactattattcttattgtggttggaatggaatacaagatgaatgcaaaaccaaatatgccatcgtggctggagttggtcataagtatattgagttatgtaatggttttaaaccacaattttggtacttaaagtaggtgttcctgccattactctgtgcgaggtgtacaatcttgattcagtggccttttaaaaggaattgtaattgcatcaagttacacattcttgatttattggccttttaatcacgattaagaactgtattaattgtagtctgcatgcaatggaatttcaacctagtagctgttgaataattccttagctagtaatccttcttttttcccttttaactcttcttattttgtctggagttgtttttcttaaatttattatttgtgttcttaaaggaactcctgcaatgacatcaagaggttgcttagaagctgattttgagactattgccgactttcttctaagagcagctcagattacctgtattgtgcagaaggaacatggaataatggccaaggattttgtcaaaggtcttcagaacaataaggatatcagtgacctccgaaatcgagtcgagacatttgctactcaatttgcaatgccaggatttgatatttgaacgcggtgaaaactaggcggccttgcaattattggtgatatcaacactatgcagctttctgacttgccatcatcacttgcatggtaacgttttcttgttactgtcatgaattcacatatcaaacttacctttttgtaaatcatagggaaaggaatctatatacaccaaaagaagatgttactaaaagattttataatatcaaacacatggactctaccttgctgactgtaaaaattataccttgtcatctacttctttgtgaagatgcaattaaatctgctccttatctgtacacatctgtatttagtttgtaatacttggcagtgcaagaaaagtactagtatttggaaaccagtacacttatgttgtttttggtccttgcctatcctttaatttgtctcgttatgttgtttgtacttggagatataaatatgtagtaccattttgtctttttgatctctgcacatgacaaattctatgtacacttatagaagaagtatcttgtagttgtccatctcaattaaaaattatacttgtggttgtggatatctatctatatatatataaatatttttcacttcttcctctcttttttctttctgaagggtcaaatatcattttgtctggttatgaatataaatccatagtttgccggttttgggctatgtttttttcgttcttttctttttcttgagtcaaagctttggtacaaccaacttaagttttttttactttcaagtttatcttaaatgcaaatatattattgatttgattaagttggacactgatacatggatgcctccaaagtccaaagagtggcaaagcatgaattcccggcaagggacaaaaaatgcatgagatacggttagcaacttagaattaagaaagtgaccccatgattttctgcttattattatttatttatttttccaacaaaaagagagaagagagaagaaattaggaacatatatttacccgagagagagagagagagag

SEQ ID NO: 186459 - DNA, 7990 bp, Cannabis indica
aacaatattaccaaccaagcccacacaagacaagactaccaattaaattacagttcctcacatattcaaatgtagactcttaaccatgctttgtttgtgccttttctacctccacaacaaaatgtcacttgttcttcagatccttaacaaataggaggcacagagcatcaaacagataaacatgactcttcatcattcatcaatcgctattgtgaacctgcaaaaacacagccctctttcattactccgttggtcccaccaacttattatcttcatcagcctcgaaagccttccttagcttctcttcatctgtttcgaaagctttccttgcttgtttgagctcttcgttcatcgatagcaattctgtacatcggttaagctttcgaaagtcctgcagggttaaaaatggccattttactatgacttctctagcaacaaaaaagaaaaactaactgaagaaccaaagaatcaagataaatttatagcttgaaacacttttagagaagatgctaccacacacgctctaataaaaaatccaaggacaaacaataacactaaaaaatggggtagggcatcattttcaacataacataggatgtgccttaaaagtttaaaaccagatataactactacttaataagacacacctttcgcattaagtaaagaaagtcctcaactgatagctttccctgctttgaaccattatcttgtgctttatgtacctgcagtaatattaagacaatagtaaagcaccctctctaaggatctatctttgcaggtgggaaaaaataaaaacaaaaaaaaaacctaaccaaatctataatatactccataactatgtcctccataagtgccacgctttctggaagaggctgtcagcacaaaacagattcagccagcagacatttcaaaattggtaacattaaattcacaattactgttatagctctcaactaaagataaacaatgttatacattgcaggcaggtctgatgaagttataaagttcagtcagcttctgatattaaatcaagaaaaaaaaaagtctaatgatgaaactcacgttagaacaatctccaaaaccatacatcatatgctgcactgcagatccacaaacaacaccaaattaatcagatattggttccggaaatctgcagcgattatatctctcattcataacttacattctttctgaaagactcctcgtttgcgtttagacgaagtttcaggaggctgtgggactccagctttctgctttgaagaagctccaatggatgagttcatcttctactcagctattcacaccctgatctcagtcacaaatgattttttatcatccatgagctcattatactttatcaaatcaaatgtgtgaaagtgatacctttgatatattttcgtttcttaaataggaatatatatttaataaaaaacaatcccaaacaaaaaggggccagccaatcactctaatttgaaggcttatacaaaacccatcccaatagagtggtatgtcataagtgataacctattttccaaatcaaaagaatttgaaggcttatacaaacatcatttcatcccaatacagcaatccgcatttataaattataatgagtttaggaaacagagttaaaatttacatagtgcagcatacatacatgaacatgatgcattacaatgataatcgtatataaagggaaaatcgtaagtattaacaagctataattgtaagtcaaaatcattcaaataaagaccattagaaaccaaaagcaaaagccaatcaatcgttcggtagtggctcgataagtttttcaattaggcatttacacaaacaactggtgtgcgagatcaatttcataaacaaatttaactcatctacctgaaaagactccgtatgtctccaaatgattgaaacgagagagaagaactgtgttcaccgaaagtgaggtgagagagagagagagagaaatgccgctgtgcccgtttctttttgacattattatataataaccgaccatagggaaaacgacacatttgttgtccgaaaacgacatcaaaatttaaaaacgacattgtgttgcggtaaaaggcaaagcggaacttcgctcgatgtactctttcggacagttccctctgtggcggtgggtttcggcaacgggtgatggttctgctcatgtacggaagctcctcctaagcatcttcttcgctaaaggaccaccctagtatctctttcagaaactctacgattatttagcgccaggagttgaattttccttacttgtttttgttcactcagtcattttgtcgaacacttgtaatcatgttgctcaggtacatgcttaaaggcaatttttcaaccttgtaaaccctagattttattcaacaatgatattaccatgccgttattgaattttatgtcccgattgcatgattccttttcaggtcaatttggcagttttcggctcatcgagcgggcagaagaattccaaggcagattacaactcaggcacgtacaattttgttgatttaactattgtactatgggttttgggatagtgtcagtttattgcaagatgctgttgttaagctcttgctaatgtcgattagggcgcactgaaatagaaaatgacacggtttatgtcgtttgtgctcggatgagcagagcagttgggtgaatgcaattttgaaatttctgcattcatgtcgataaataacatttttttaaagaaattatcatcttactcgtatttttcccttatttcgtttttaatttgtatctgttacaattggacaattacaacagatacccatctctctaagaagagaactatcaaccaaaccccagaagaatgccacccctgaacctaaatccacaggcaagcctcctgaatccagtggctcttttccgaaagttgtttttggaagtgttcttattggtgctgctgttatggcggcttaccaaactggttatttggaccaatatattggccgtaaggatcagcaggattctctaaatttagttaaggatgaggttgagaacaaggatgacaaagatattcaaaagttggtggatcaatttgtcaatggtgaggaatcggatgatgcctctgagaaggatgtcactgagaaggatgtcactgagaaggatgcctctgagaagattgaaactcagtcagaccatcctattgttgaagctttaagtaatagtcaaggtgatattcagcctcaggtgcaagaaaaacccaagacaaaccctgaagaagttgccatcaaagaaaaagatgtgacagatttcccacaaagcagtatgacatctgaggatcatatttcaaattctgggactgcttctgaggggagtgtggaggtaaagagtgcagaagaaaatagtaacatgggatcaaatgaggaggttcaaacttctccagtatctattgagactagcaatgctgagaaagaaagtgaagcaaaagaagcgccacctgtgcagtttactgtagaggaaagggaggaggtaattgtcgtttttacatttttttaatcaactaatataccatagtgtcaatgcctattatttggttgatctgcattggattatattatcctaatgatattgtaagagttggctgaattttttggattactgtcttataaaaaaagaaacataattcttggggattatgttgagagtgaaaactgatgcatgaaactttagctgaacatggagatttgaaagtagaatttttcaatgatttgtttttgcatgtgtgttaattacctgaattatactatagttctttcatgcttttcaaccccttttcccactaactacttcatttaaggtggcctagttcatctgtcccatacctagaaatagataggcttcataaacagcttccaatgcattttaacaacattaagatattttggaattttaacaatcaccatttgaactaaagtcatttgggaacctaaattccatcgtcttggatattttttaacttccataagtacctgaaaattcaattatagagtttgaagttctttctcatggtaaaattttgtaggatgcaattgttaaagatgtagaagaacctagctctctccttgaggcatatcaattaggagataaggctggggacaatggaacgtctttgcatagacatggtgttcatgacaacaatgccctttccaaggaaaaagaggttcaaaatttgcattcttttgctgactatttctgcttattcccattctaaaaatgcaaaaggatgtccaattgtaatgcccttatctggatgaacaggccttaagtagtgcacttgaggagttagacgatggttacataaccaaagatggaaaattagttcttgactttttacaagccattcatgcagctgaaagtagacaagctgaattagatgctcgtttgtatatggaagaaaagagagcattgaaggtctgtactttgctttattatcattatgaaacaagttcttatgattggccatctaactaacaaggttcattattacaggaaaagtatgagaaggagttgaaggatgctgcagtaagagaaatgatgcttgcagaagaggcagcaatgctagacaaggttgcagttctttccatccccgtgcatatgcttctttatctcccttagtgttttaattttcaattttattttgtcttctgctggttgctttttattggggcctgatcaggtagaatatgtgtatttatttctgatgaaagaccctctttcttttttttaaaaaaaaaactggaaaatatttggaaaagagtaaaagaaaaaggagaattttgtaatcatgcttgtgagtcttagggcatagagtggctggtggctttagataaattatggagcatatggtagactttggttttacctattttcttacaatttgaaatgctagaaataaattttaaaatgttgaagtcctacaatcttgaaggaagaattacaagcaaatgtgctatacaagtttatatctatttagataattctacgttttctttggtatcaatctctacccttaaaaaatgagcaaacaaactgaaactgaagatataaattttctgttacttgctcactatttagagaatgacagctttaaattactgaactttacagcttttattttgcttcaggaactaaagagagaaagaacaaaagcagctgctgcactcaagtcacttcaagaaaaacttgaagagaaatacaagacagagctggaacagttggtacaaaatattctctgcctcaaaaatggtttatcagtgttcaagcatccgagtgataactattaatttggtaatttacaattgcaggaacatgaagctgaattcaagctgaacaagatggaagagttggcgaaagcagaattggctgcaaaaattgctagtgagaaggcaacccaaattgaaaaaatagcagaagcaaatcttaatgtaagtaagatctgcttattttacaatcagttctcattcctaattcatatgtttgaagaagaaagggtcaatgaaatgatgaggcagaataggattgtgttaggatcccaccttgaccaagtatgggattggttagtagtatgtaacccacttgagcaccctcctctcttaggctaaattttgatagtgagttctacccaagtggttgtgtctagtggtataagagtcatgcaccctcaagtgggaccaacgtcgcgaaagaggcgacctatggaaggggtgacatgcataaggggcaaactgtggatcaggtccaaagtaggccaccgcagagtaggtcgccatagagtgggttgtcgttgaggtctgctccaaagggggtgtattgttaggatcccacattgatcaattatgggatttgttagtatccctcctcctagtctagcttttgggagtgagttcaacccaagtggttgtatcaaattgctagtgatatttttccgaagagaagagtgaccatagttggctaaatgcttcaatagttgctatataaatgtggcagaaaacaaggaaatccactgaaatcttttgaaagcgactagtttcatgtataacttttgatatttaaatatctgtctgtagttttgataatctctaaagcgtaatatatcctttctaaatttatctctaatgaaagctgaaacggtataatatcttctacttgcagattaatgccttgtgtatggcattctatgcacggtctgaggaggctcgccggagtcactctgctcacaagcttgctttggtaaaaaaaagtaacagtacattcatttgcatattttcaacccattattatctcatattctagaccttgggccttgtagggagcacttgctctggaagatgcactttcgaaagggttgccaattcagtcagagataatggctttgcgcaattatcttgaaggaattgataaagattcaattttagatctggtgttatcatctctccctgaagaaacaagaaacagtggcacagatactttattgcaactggaccagaaggtaacttatttctgctcttgtattctgtatgctattggatgcactcctatgattgactacctattcagttagctatattttatgtcaatgtcttgtagaccttgttcattcttctttgagctaatcatatcacaccctattttctttttactcgtggaggttggaacattattattttaacatattttggttgctttgctctttgtttcattctcattgttcttgaatgtctaatttgtgcaccaactgtttgcttcgctcatggtacgcattttttctactgtgggtaagctcattaatttcagcagtattattatgactttcttgtgatttttcactcaaagacgacttgtcagttgaacatgtataaaaatgcaaattatgaaggcttcaattcaagatctgaatgctggatactcaagaactacataaatgaatcctattgataagccttatctgctaacttcagtaattcttttgtcagtttgatgccttaaaagggacactccgacacttcagcttaatccctcctggcggtggtggtgttttaactcattctttggcgcatgtagcatcctggctgaaggtatgaagatacaaaatcaagcttacgtttccctctcctcctatatacatatcacttattagatcatttttatatttgcatcgaaatttccttcaggtgaaggaagctagccaatctggtgatggaatagaatctctcatcaacaaagttgagtcctgtttggctgaagggaaaattgctgaagcagcagatgttcttgaagaaggtgtccaaggcagccaagcctcagaaatagttggggactgggttaagagagccagaaatagagccattacagagcaagctctaacccttctccaatcttatgccacttccatcagccttacataaatctgtgattttgattactatttttgtatttttgggggcttgcaagttttaatgttagcccttttgagagtcagaaaattcattgatttggtagtcggcctaaatttttttcttcagtactgatatatacaaacacaaatcaagaaaacgttcaactaataattgttcagaacaaggaaatgacttgtattttcacaactgagaattctgtggagctttgatgttatagagaaatagcttcttgtccatttctgaaaaagaaagaaaaatcttatgaataaaattttgcttcttcttcttttatgtgtatacacgttatcaaaatttggtttgccatagtttgagtttgtgagtagcatcttgatgtggaagaaaatttatgggcaatagaaaatcatagtttcctaatctaattgagtgtgatgtttttattttgtagtgtttaatgaaattatttgaaatgggcattatgctacatgacatatacataagatacatgtgtttaattcaatatatacagaatgtgtgcatataatttatataaaaaa

SEQ ID NO: 186460 - DNA, 5240 bp, Cannabis indica
ttgcagtgcttgtttagtctaattagatctgcagtaagtttatatatctcattgtgcttctcatcaggaagtctgttgaggttcttaactgtgtcctctaacttacctttttcagtctccacttgctccaaggtgctttttagacctctaatctgcttagtcatgtactcccattgggcaaacatctcatcataagcattttttgtatactctcgctgtctccttctgatgtagtggatattgcatcatcttcagactcaactgagtgacagctttgggccatgaacgctaatacctgtttgtcctcatctgtgctttcactagcagtagagtttttttattcctcactgtcactccatgttacagcagggctttcttcttttttagagtgtttgcacactctccctgaatgtggccatatctgtgacattctttgcacttgattccccgattcttttcatcagtagatggttgaccttgtttgaaatttccacctttgttcttcttgggagcatttttgttatcaccatgaacattcttcttatagttccttttcaagaacttggcatagtttcttgttaaaagggctatagtctcatcagagataccatttatttcctctagagcaggtttcttattttcttgatgaatgagttcgatactcacatcagatttatccttgaccgcatccttctgtttctttgatttcttccatctggagagtgacaactcatagttctacaaggatctaatgagctaatcgagatcaagttcctcaatgttccttatttcttcaattgaggtcactttagacatgaatcttcttgggagtactccaagcacttttcgaaccagctttgaattagagtaggttttttccagagcatacgactccttagagatatcacacaacttagcatggaattctgcaactgaatcatcttcctccatggaaagattttcaaatgccttggtcaacgctcgcagcctagatttctttacaacatctgttccctcattctttattttcaatttctcccacgtttcttttgcgatttcacagttagctaaaacctttaactggttcgtggagataacattaaacagtgcatgttgggccttcgagttaaagttagcctttccatttcatctatggtccaccagctcatgggtttaggtttaacaatttcattctcagtcatcgtggggcttatccaaccttcttctatggccatccaaaatctttcatcaacaactctcaagaaggcacgcatcttggtcttccattaaaggtacttagcaccttccaacattggaggtctttaggttaatccaccttccctaaacatttccatcctacacagagacacgaaaaggaaatatagcacccgtactacaactctccaagatgtaacttagagaggattagttgtaacagaatcaagaaagtaaattttgaacacgaatctactaactttttctgaatcaaataccaggcaagtataggatctaacacaaaatttatcaaaaaaatatcaagctctgatagcaaatgaaagaacaacttggactggtttctagattcaaattactgactttcttaagaaattaatttgcaattgtaagtttaacattcaagaatcaggttaatgagcaatcaataatgaagacagtgatttacaagcttcatctgcactgagaacaaatttcaaccaactagtgcttgggttccccgaactagggtaataacacccactatattcaaagattcatattacaaacactagttcacaattagtaattgaatacaatctttacaacttttagtgaaatattaccaacaccaaccaagatccttggttgaatatacaagattccttgtgcataagctaagttcttcttcaacacttttctccaatctgaactcctttcagatatgatgacgaagataacactgaactcccttcagttttaactcagctcgaacaggctctgatctttctgctatggatggccaccaccaagatattcaattagacctgtaaaataaagaacaatacaagataccacacacaatacatcacgattatacttaactaactaagaaagcaaaatagctagttaaccaaatcacataacagaactagctataaatatacaaacaattctaaccagacctaacaatattttcatgacaactattaatacataacagactgacgtggacactaacagaatattcacatgtagttacgtcaaatgaacaccacagataagactggaatcacttttaaactaatctgtcaaaaatatgaaccttacactatcttttgttctaagtctttgccacataacgagccacattataaatcagtgtttgggaataattaatctatcccaaacaaacttaggtcaattttgtttttgtcctactgatcaaatagaatagtatgccccagctgaatactatattttttagcaacaaaacaatcttgattgatcttttccttgaatatgtttttgacagccactaacttttttcaatagtagctacaatccgtgggacaagcatattcccaccaattgtgtttccccaggtggattgtatttatccacttaacaaatagattatccttcttcttggtaattgcccaaacatacttccccatatggaaaccaaattctattctgttatattactggatctcaagccacaagctgatttcgacctacaaatcacattccatgcaactaccatcacttgtattttttgcatcccctttccataaaaaagctctgcatttcgcttccacatcttgaagtagactctttgttaagttcataatttgagcccaatatgaatatatagccgtcaacactgaattaatcaatgttactctatccatataagatgaatttctagagctccaaactttgattctattagtcattttctccaaaatacatttacattcagcatgagatatttttttttagttaaaggaataccaaggtgttgtggtattttcaacgcaagtatacgtaccgttaataagttatagactcacaaagagtggggtcgatcccacaaggattgtagttaagtactttaaaattaaatttttaattctatttggttgtttcaaaattaagagaaggttaacactagaaagaaaaacaataaaaacaataaaataaggaagcaagatgcaagtaaattaatattaaaattcatggtgattagaatttagggttattgattccaattgtatctatctattatggtctaacataattcaatttctattactaatttttatgcaatagcaggttgattcaactaatttatagttttctcatatatataaatctcaattacatgtaaattttctactttcgttataaattaaacatgtaaaaggcattaaatacaaaaactctattagctatctaaaccatataagtactctcgtcctataacaaaatttattcatatttcactatagcataattgatactcactgcttagatctcgtatcaaaatcataaacatttgattggtggtcaagcaattaaaagaaataagtacgaatgaaatagaatatatagaaaattaggaaggaatcaaatcacattaaaaatcataaatcgatatcaaacaatatacatcaataccttaataaactacttagctactcttgttcatcgtaacaatcctacacatatcaattaagaacataacaagaaaatagagaagaaaaaatattgaaaactctattggaaaagccttctcagtcattttttatctctctagctcgtattctctaattgcttgttgaaaaatatgaaagtccacttctttttatagtcgaaaaaagataaaaaaagatgaaaaagatctattttttttaaattttagggggcgggctgggacactaggcccttagtgtcgcgactcgtgtctgcgaagggatatttccttgaatatttttttaaacacgcgcctcgacactgaaatctaatgttgaggcataaccctccaaaaatcaggcagtgagacactaagagctagtgtcgaggcacgcccatgcattgatccgatttgaccttctctaccaatttttagccctttaatgcccccacatgggtttttagtgttaaggcctaaattttgtaatttctttgccttaagagctccaatcgcaccgaaacttctggatttttttctcaaattaatttcctgatgctcttgccccgagaattgatttgtttgaccattttcttatttttttttttaatatttctccatttttcttctattttaaacttgtaaaataataactaccaaaagcgtaaaattacacaaaagaagagtaaaacttatttaaaaacacactaaaatcaacctaaaaatagtactaataaaaacctaacacaaggtacctaaatggaagatggctccgagaaaaacatgatacctccagaattcgagtcacatcagtttcagacatgcccttgcagcacactgcagtctttatttcatttggaactaatccaaatatggatgagaagatcttcagccctctcaacatcagcaagatggatatataatctccattgcaaaacaataacaagtcgtctgcaaagcacatatggtttatttgcaactgagcacacctgtcatggaacttaaagtcgctccattctctaacttttttcatactttgagacaagtactccattctcaacacaaaaagtaggggagatattagatccccttgccttaggcttcttttggcatcaaaaaaaccacacatagagtcgtttaaaagcaaggaaaattttagagttctaatacataccatgatgagatttaagaattgttggaaaaatccatacgcagttagcatctcttcactgaaatcctaatatcatctttacttatctttgttgtatatataaaaatattatactatagtaaacacttctagtattttaaataatttattatatcaaaatcaaaattcaaattttttatgttatgcatgaatgaaaaatgaaactaacataagtgagaatgtttaaatcatatttaatttcaacatttaactattcataatttttttaaaaaaaatgttgaaattttgctataaatactattgtatacgatttatatgaacgtacaccacttaaattctccccctcccaaaaagaaacaatataggtgccgtttggtaaca

SEQ ID NO: 186461 - DNA, 1949 bp, Cannabis indica
tatggtcagaacaaggggaagttgtacaatgaagaatgtgaccgattcatggtatgaactgaaaatgcattttgtttgtgtatcatatttttataattttcctctttcaaagaaatgcttaattgagtttatacttgaattcagatctgtatgattcacaaacttgggtatgggaactgggatgagttgaaggcagcgtttcgcacttcacccttgtttcgttttgattggtttgtcaagtctcgcacaacacaggagcttgcaaggaggtgtgatacattgattcgattagttgagaaagaaaaccaagaatatgatgagagggagcggcaagcacgcaaagagaagaagcatgctaaggttcactctacccaacttgtgcatggattctatactcatgatttttgttggttttctgtattttggggatgctaattgtgctattgtattccaattttcagaacttgaccccatctaagcgaggcctgtctaggcaggccactgagagcagccctagctcattgaagaagaggaagcagttatccatggatgattatgttagctcggtacgtatttcttaattcaacagaagtggaggattttcaatgttgataacagcaatgtgtttatttatttatttctactttgcagggaaagagaaggaaatgatataacagtaaaagtaaaagttaggattatttaggggttttgaagcctcgaatatatttaagttatcagtagacatgacatgcctgtggtaaggagatcctgagtttgcattgcaggatagtaaatgtcagctggtattcgaatcatcgacttaattaggaattcacaatttggtattataatctcattcatggagaatatcgtacaatgtatgttttggaaagctgtataaatgaatcttctactatctagatacttatgaactacgccattttgttcttttagatcgataacaatatattagtgaaattaactacttgagtcttgtgagacaagtcctagttcgttgccagagctccaagaagtttttatttgatcaaatgcctccacacatatttattaatgtcatgagaagtttctaatatatacacacgtccgtggctttatatttaatcatttttttaataaattatgtttaatcgttgctaatcaattaaattgcatgcaagaatttttttttgggtttgttgggtatattatgacactgtaatgtatggtattatatataatgtagttatatattggagattagattttgtaatttgattttacgtgtattggatatgtattggatgttggattggttcaattttattttatttatatgtatttttatatttattagtttagatttatttaatattttaaatctagtattttttggattgaattggattagatctatctaatttaaaaaatgaaaaattttaatgtataattaaatatattatgtataataatataaaatttaattataaatttaaaataaatgaaaataataattagatcgatatgttgaatgtattaaatttgtagatattatctaatatttaattcgatttaattgaatatttaaaaataatatcaaatttgatctaattataattagatatttaatgttaacggtagttattattagattagatacatttttgaaactaaacgaagttccatacaatgcgatttaatatggtgaaagcaaattttattccaatgcatcttgtgaagtgacaaagactaactgccagtagggatggcacttatacccgcgggtacccgtcccatacgggggtagactttcgggggcgggagcgggggcgggtatgggtttaaagattcatacctgagttgaaaacggggcgggggcgggggaatagatacccgccccaatatgatatatgtatatatttaaattttaaaatcataactactacgattaa

SEQ ID NO: 186462 - DNA, 3391 bp, Cannabis indica
gacctgagttgcgccgcctgaatccatgacggtgaccgaaaatcacccgccgccggaatcttttaaggtgtctgcactgcacactagctatacacttcacaattacaatagcgatattataatatacacatatttattataatccctctgcttttatcgtgtgcgtgaagatatggaactccctgagattgttattataaaaaaataaaaaaagtaaatttcactttctttctttatttcattattttctcgggaaaatcgtagatttgaagcggcggattttgacggttaagtggtttacgtgggaaatggggaatctacggctttttcttattttaattttttggtacgagagagagtgaaatgaaggatactgatgaaagacgctgatgggtgaataatactactgagtgggattcttattattttttggcttaacactcagaagtgtaagaaggaaagaaatagaaactaaataataaatgctctctctctgtctctcagattattattgaatttgaccaatattttcagtttatgtttgtgcctacttgcactagcagtggtataattggccccctccataatggtacacaagtacaaatcgtacgaagtcaggggggtatttgctattgacagtttttagtttaataaatgtgattaatttggactgacaccactgtggaatgggatggggaatgtacataacctctattcacgctaattaaataaataaaaaagcccataaatattagaattaagaaaacccaaaaatataatagtgagagaagagaagaaaatattttatgttaaaattgaaaaacaaaagacatttgtgtttaaaagcagtgaaataagtcaacatcaaaaacatatatgcatggttaaattattaaatatacaagagatgagatctgaggagcagaacaatttgtcttcttttttgtggagaataattgaacatatgaaatgtaatccactccagtcattcattggatatatggctcacaatgaatgttataacaaattaacaacactagagactcatagagataatagagatagagactggtgtatatagtaagatgaaaaatgctaattataactttttattataatattttagttaatttttgtgtttcaaattacatgttgaaatattttaatttaaaaatttcataatgatatttattatagttagaatactattcttgtaaatttttaaatttttttgaataatttgtattattaaaaatagagttcttgatattttaatttattacgagtgtttacaaagttttaaaattattttccacactagaatgttgactaaaatattttggtatatagttttagtcatacaaattaggtaaaaaattataatagaattttttttttgatactaacagaaactttattgaaaaacaacaggcctaaaagccgaagttcatagtggcaacaaagggtgtcacttcccttgaagaaaacaacttatagcagctattggaggcagcccaagctgctaagctatgcgcaccagaattcaaaccccggggaatccaatggagctggcacctcggcaactgactgaggaggttaagtgtagtatcgaacagcccccgggccctccaatctatcgacttaccagtggagagacctttcaccgccaactggcagtccgagaagatggacactcgcggccaagcaatttgcagaattctgcagcagccaagtgaatcgctgccaattgtgcctcaaacgaagaagataccttcctctttactgtggcagcctcaatctcatcgcccgatcgatccaacagaatgatagcagctatcccaaactcacctcggatagccgcatccacaaaaacattaacatcactccaaggtaaatcccgaaagaactccaccacttcgaagttgggcatattcacctgccgaaccaacataggagactcaaccaaagaccaatgagccaccaacacagagatctcctgctgaatcttggacaccacgggacacgaaccatcatggaaggtagagtttctagtcctccacaacacaaaacagagagaaatcgcataaatagagaacaaagcaatatccctctcagcaagaggggtaccatatagttgcaataaccacttgatcatatccaaattatcagaaaacaccatggaatccgaacagaaaccccaaggaccagatctccgaacctggacagcaccatcacagtgaaagaaaagatggagaggagtatcctcccctgaactacagagcacacagtgagaactattaccgaaaatacgttgaatcctactcccaaacgggagtatatctctagcaagcggcataggaagatcttaatcctttcatgcccccttatcttccaaagagtactccacaagctctcatcatttagacaccggtcccgtatacgagccaaatacgcccttttaaccgaaaggaaccatccgatgccgatttcaaaaagctcatcattagcctccaaagaaagccgagggacagccagcacatccttaacaatgcctgggataaaccatttctcgagagcctcatggttccaaactccgcttcccgtagtgactaaggaactaaccataacacctttctcacaaactcttggatttaaggaagctacataactctcccaagcataaccaggcaaccacggagagtggcaaatatccaccgaagcaccattccccaccacataacaagtctcttcccagatgaactctctagtggacataatgcttttgccaccaaaagaccaagcgttggacttaggagcgcaccaaaaggaattggatctcctgaaatacttatccttgaaaaattgacaccacaaggaattattctcagcggcgaggttccaaccaagttttgacacaagagcaaagttaagttcctcaaacttcttaaagttaagatcgccccaccgtttaggaacacaaatcgactcccaattagccaaggtcaagaaccgatacgaatcatcagaccccttccaccaaaagcgtcgcaccatccaaagcaaggcaaacgactttagggatcaagaaagtagacatggtataaattgaggtgctcaaagtcactgattgtatcaaagaagtttataatagaaagttgataataaaattcctccaaatgaattattgcattgcctttcttccaacaatgccaactgagattatgtggggacttgatcaattaatttcagtgattttcaatttttattttaaaaggacagaattcaaagtcattgagacaagaggaggagggcccaccaagtgaaacagctgcccaaatgtagttctgtcggccattgactgtgtgagcatcactgtagtcttttttttttt

SEQ ID NO: 186463 - DNA, 1698 bp, Cannabis indica
ttgggtcaaaaagataatatatcagataaaatttattacaccctcaatactcaaactaaatatatattactactgaaaactacagaaacaaaattgcttgtatttctcatggacaactaataactgaagtgtattttttctcattctttttgttaaagccaaaacacatgaaagtatgaaaccctggctcagcaatcaacaaaccagatgtgaaatccagttgaagaagcatacattacctccaacacatatacaatcttttcgaagaaaagaatcagatcaactcaatttcaatattcttatagcctacctaacaagtaatcacatacagaggattatgttatcaacattaattcaaagctggcaagaaggcagaccttctttcatacacaaaaacctattcatcaagtagttaagagctcagttcaatatgtcaattatcatgtaatcagaaggaatctcaacatccacaatgctatgcttaattaagaggtttatctcaactacttgaaaaaccacttcgccaaagcaaaacaaataattatttagttcttcaatccctactagactaaaatagcgaaatatcattacaaatttctttctaaagcctagtttccacaatttaaaccctagcatttgcaagaattacattctcaaattcaaatcaaatcaattccctactcaattcgtattatataaataaacattaccggcaaaggagaagaaggaaatccggttcgggcgacaaaggcagctaatctaccaggaggccttcttgatcccattcaacatgcccttgttagccaagtcacggaaaacgagacgagacatgcgaaaggcggcatagacaccgcgagcgcggcctgtgaagacgcagcggttcctgattcgagtgaaggaactatttctaggaagcttggcaagcttgtagcgattctcctctcggacctcatcgggaaggctgggatcgttggatatggctttgtagagcctccgccggagctcgaactgggcggcaagaatccggcgatggttgtctcggaagttagcgttctccttccccacttctcgagaatccgacattgcttttagttttcagatttcagttttcactactcttctcctcaatcaatcccactctttctataattcgtagggttgcttatttaactttttattttttataatatttgacaatattaaaataaaaacttgtgaaacgacatcggtttggaaaatatgattattttggaaggaacgagtagtaaggttgtgtataaatttttgtaaactcttgtctaattaaattaagataatatgatgaaaaatgcaaaccaaaaaatacaatgaaaatataacatgttcactctttatattcagcaggttaaaaataaaataaactccctcaatcaaccaaactaatccgatcaaactgattaataggatttatatatacatgtttttattatatatatttatatataatataatttatataactatttaaaaattataaaatttaaattaatatagtatagttaaattttgaattcaatttgtatatatatatttattttattattataattaactaaaatataacaattgaatgtgaaaataaaaaaaaaaaaaatattaatagctggtttaggcgggttaacccgactgaaccgatcaatttcattgggcaggttacta

SEQ ID NO: 186464 - DNA, 2926 bp, Cannabis indica
tgcattttaaagtggcacatccataaaaaggaaagaggaaaaattccaattactttttttgtagaatttattgtctactttataatcttcttcttctaattagtagtcttataatctagtatttgtattttaagaaaatcttctattcttctcaatatagttcagttctcatgtaatattgtcataatacattacttgtattttcagtactatttggttgtaatctcttatccctaaatgaggaatgaaaatattccccaaccaaaaaaaagagacatggattttatatatgccattagaaccatagatttttcactaattctgcaccgttgagtttagtttgaaaaatgtaaaaaagttagctaactctaataaacaaatacatctaaatatattctaaattaaatacggacaacacatctttaaactctttcaaactatagagtctatataagtaatattattcttgttgtccggttaaattccaagaaggttccataggtaatgaactcttcagcaaattaggattattcaagaagaacatatcctttaaacactataatattgtctcacataattagtattattgtccttacattaaattaggcttttatcatgtaagttgtgagaatggaattttcaagtgtttgaaaattattgaggtaatatatttatatatcatatcagtgggacatcaacttagaagtaaagggattattaagccaggccttccagcaactgattcccttttgagcaattaggtccgatgccttcctatctgtcagctgaagctgcctctgcttcttgcaaagcataaaattccgaactccacatcctatctttgccgaaggatttaatgctattaaacacccaaaaatttaccatgaaaagtattcaattaaatgacgaactaaattcatttaatggtatgcaaaatcatatctaaccaattattttttcaaaaataaaaataatcatcaagcaattacaattaataaaagtttaagacctttcttaaagtaacttttcatgtgtttgtgtaaattttagtatttttagtttcagaacagtcaattatttgattaaataagaacagaagaacagtcaattttagtattctttttcgtttcctaattaaagtaactttccatgtgtgtgagtaaatttatgatacaagaatccatgactcgtgttttctttttcgtttatactaattaaagagacaaagaacctgctttaatttcttctttttattttttaattttttattaaataatatctctcctctacccttcaggcttatagttatttatttatccgaatttgatcccactaaaattaaaaaaaaaaatgataaaaaatatacccgaatttgatcctaaattttagaagaaaaaaaaaactcacttattatttatttatttatttttgaaaaaacgaaaagaactcttataggcttatagttttaaaaatatccctgttttcgtcttttttaaaatctaagggtgtgtttggaagtagctatgtaattactaggtaaaataattattagggtggtaattacacaatattttaaaatgaaaggtgtgtttggatatgaggtggtaattacatataaatttctaatattttatttggcaaaatagttagtaattacatggaaaaataatattttttagtagaaaatgtttaatatgaaaagtttttagtaattacacagtgtaattacatccaagtctgatgagggtcatgaaaattgaagagtgtaattagaaccctcaattacttctaattacataattagagtgtaattacatagtcagacaaacatgtgtaattacctccaattatattgtggctttccaaacgcggcctaaaaaataatagtaattttatataaattaatctccaaaattgtgggggagaaaaatagtattacaagattcacgcaaacaaaacctttttattttaaaaaaacaaaagaagaaaaacttaatatattattataaacccttttttttaccaacaaattatgaaaaacttttattactattattattattattattataaaaaaaaatatataatcaaaatagagaagaaaacatgtattgaaattagaacgagagagtgagagagattacgatcaaatccggagttggcgcagtagagaaagaaacggtcggaatccgtaccaagaacggggagtcgtccctctcgagcataagatttaagagcatattcaatcactgaaccaacgagatcatcctcactcaccacaaacctcatgggtcctgcacttcccagaacattcaccgttatcagcaacctcttcttgtgagactcaccatgagaagactgacagtgagaatccatccccatcttcttcttcgtcatttttttttctcactctagctcctctatgtttttgacaaaaccctttcaacaaaagaagaagaaaaatatagagacaaggagagagagatatatggagatggaaatgattctgtctagtaataaggatcaaggccgaggcagcggtagaagcgggactttatagtagagaaaggcagcgcgtgaggagtacgcgcggcaaccctcagaggaggatggtgaaggagaagacgaaagtgcatgaagaaattatgtgtgagagaaaagagtagagattgatgggaattgctgagagcctttccttctctttccctgttttctttaaaagtgaaaaagtgccaatgagagtccaaatagaaacctttgccttttatgctttgttagttggtttatacttatattacaaacacaaaccaccaccgctctttcaataatttaatttaaatattaataaataaatccaacattattaaaaataaaaacattcttatttgttattataggcacgcttaaaaaaacagattttttttaa

SEQ ID NO: 186465 - DNA, 1087 bp, Cannabis indica
gaataatttataattaatcaattataacgtttcttcacaagcaagattatacaatatatattgtaatataattgaattgaggactaagtttatgcagaactatagttgtgattaataatgaagcttcttaaaaggtcatgtaataagattgatttggttattattgtattcagatcagatactccacaagcttttccaaacagacttgcttggtttctgccataattgaagcaactaattatagtatatacaatcatgatcctaactaacactaactaaaactcaaactcataattggagagtcatcaatttttgagtttaaaacttgatgaaataaaatggacattgcttttgctcttaaaaaaacttaaaccaaacctagtgcaatcctactcttacaacagggttattacatgcagaccaaagaaagcttggaaaacaattgaatagaattagtatgtactaccattacaacaaaccaaaccagaagcaaaagtataaacacaaacagcgccatgtaattcatgctagtaaatcaaatagttaacaagattatatctaaacacaaaagtatacacttaatcacattgtatccattatgaattaatagatagaatgatatgttgttgaggctgattacgaattctgcattgtagagaattacttctctatatggcagttatatgcaaagcaagcttggactggagtggcttatatattattaggaaataaaaacaagtgatggataaagcaaattctcaagtcaagtgaatgaatttgatttagttacatgtaattaattcacagtaaatacaaaaccaagtaccaatataatatgtggaaaaatggggtgggagggatgcaagcatcatcgcagccttgagcagatctcaactatgttggcacctactcaaaccaccaatcatgtgcataaggcatagcccaacctgaaacttacaattattgttcattaagtagcagacatagtttaaatacaagcaagagtcaatcaaaaaaacaatgtaatgtaatattgtattctaaattctgatgaggaggttgaattggcttggcttaaagattcatc

SEQ ID NO: 186466 - DNA, 3203 bp, Cannabis indica
cccttatatatgcgcaataatatatacatatacagtgctgtaaattcgtgtgtagcgcatattttattttaagactttttcatttttaaattttaaaataattttttttgtatttttatggaattaggtatagaaactcctattacaactagcgctggaacctaaattgcaataaaaaattgtacagaaacccctattgcaactagcgctgcaagcactttagaaactcaaatcgtaaatttgaaaaaaaaaaaaagttaaaaaatagtatatggggtaattcacctattttttttttgtgctttttataatatgggtcgtgtcgtatcgtaccttaaaacaatatggattgtatcgtattgtgctaacaatatttttaaatagtaggcctaatatttttgtgtcgtgcttgctttacttgtacttacctctttttcttaaacaagccaagccgtttttatatttcggcttgaatttgtactttacttttctttatttttttttttacaattaataagttaactactaaattatatgtatattgttgaaagttataaaaatataattaaaattattacaatatttatttataaatataaaaatttgtatatcacactctacaaataaattaatatataattttagttttataaattttaataattttaattataaattataatatctaattttatattcaaactttattattattttaacttatttataattgttaaatatatatgttataattataaatattaaattatagggttttttaatgtttggcgtgtttttcgagttagtcgcgtgacgtgccttacagactattctattggtgcttttcatgtcgtgtcgtggttaatcatatatttttcgtgtcgtgtcgcacaaagttataatatcatgtcgtgtcgtgctcaaaactatatttttttgtgtctaatcgtaccggtgccttccgagctcgtgtcatatcataaagtccagcccatatttaaagcactaacaatatacattaaaagtatgtataatgtattgtatgtaagacatttcactataaatatatataaaagaattaattaagattatatgttgtttgtaaaatagatcaatagtgtttatctcaagaattaatattggtaggactatgaatgtcctcgattctagttggtattgaaaaagattggtggctgtaaaaataaaatcaagctcaaattgagtcttgataacttgtttctcaaaagtatagcatccaacttgggcataaactactatttgaacaaaaagataaagtcaccttggctaaatgtgattgggagagaatgatcactcaaaactataagtttgttatgtggcttataatgtagagaaggctccaaacaaaggaaaagcctgagaagatagtagtgaatatggatatgacatgttattagattgatcattatttatgtagatatatagtcaactccccacaaatccttataagcgattggaattttatcgtctagtcacaacctgtatagggcagggtcatgacaaggagatcataagcaatagtgctactctctccaattgcaagggccatgagatgagttactgtctaaaatttgccggatgaatcatgagactttctccagaatgtgccaccatctagacaaggactcttctaggataggtccaagcagagtagcatttcatagttcataccaacacaacaatttttataccacttttcaaataacacatatatatataatacgtgttttgcaatatttataattttgatttttttttccttctgaattaactcttctcctatcacgtcaataaatatatatacctacgtatgtatgtataatctacgttattatatattataataataagtaagctagctttaaaatataagtttcttcactttgaatacactgttgctctttctcaaacgtaaaagagtcattaaaatatgtatatgagttgtcaaatacgtgtgattattctagtacaatggtaaactatttttttttttttatatatatatatagaagtgtatcatattgaaaattaggaatatatatgatatatcatgtcaggtgtatcctattaattatttcaattaataaaataaaccaaattaaaacagcaataataaaaaattatatatggggagtccgactgggttttaatttgtgactttaatccccaaaactacgcctacaaataggccataatctttgctagctacgcttgaagaaatacagggagatctgaatctctctctgccactgcctcatctctcacaccttcgccggagtctttcctttctccactgtcgtttcaaccctttcgttgtcgtttcatcatcatgttgtgttaatctttgttctcttctgccggccggtatgtacgtatctttcttaattttttcaatgtttcataatattattatattaattcatcttcgtcttatttttctttttcatggttaattactcctaaatgtttatgtattatatatatatatatatgataattattcagcaatatatgcccttcatttgtttattatcctttataattaaaaaaattatatagaatgaaaacatttagtagtactcgatcggcataagcctcagagggtagctgatcgtgtttggtttctaattcagccatgcaaagaaaatccgtacacgctaacttcaatcaataaaaaattgaacgtttaatcattttaactttatcactaattattattatatttttggtccagtcaaaattaatcaaagagttcatcctacaattctggccttgtatatattatatattcgtttttactcttattatcatagcaatttttatttcttaactattaatattttcttttaaaataaagtacatgaatgattgaagtagaagtgtactcatcatgcactccccaataattattatctgcagtataattaaattgagggtgaaatctttttatattttaattttatacattaatttattatatttttttttaataaaatctcctaattttatttttctttataaatttgaggtgctaataaaatctcaccattaaataacaactaagactgccatgtatacatttatatataggctgcatacatttattagcttcaaggtacacatctatacacaatgacaatcaaagttaacatttgatagtaaaa

SEQ ID NO: 186467 - DNA, 3277 bp, Cannabis indica
atcaacttaattgggtgataataatagaagttatgagattccatggaataaagttttccaaatgaacatgtttttcactttgcactgtttccattataatttgatttgacaggctacagtgctgagacatccttctggctgtgctgagattgtggatattcatgggagaggatggggctggtttagcttcttcttattaatgtatgagctttacttttacaactatccagcttacctctttatcgagctgtttgcatgaactaatgttttttttgtctggtctcagttctgcatgtctttttggagggtatctgctggttggtacagtataccgctacttccaaggcattcgtggcatagatgtatgttgatacacagtattaaatatatgctaagttttgaagattttttgttatataccacataaaattttgaaaggggaatgctttttctcgagagttatgcattttctcacattattctggaaaatgaaagtatgtcctaatatttactagccatgttgcacccagtaacttcccaccttttcatcttcctctacttctaacaatgtttgacgttctgttcctttttcttttttctttttttttttttgtagataattccaaacttagagttttggagtagtataccacaaagaacacaggtaatttgcggtgtttttcaataatcctatactttctttttttataaattatttttattctctataataattagtgactggaacatttctatttgtttcccattgcagagtctttttgcatctctggtgcgaaaattcaggggaccttctcaaggtcaccgtagctcatattcccccgtcaacttctgagcatcattcatatggtgagttcattttgttaatttcttctctgacatgaacatttcagcaatgaagtacaagttgagcatttttttttccattccgaagcagtctactctttcgaattcccattgtttgttacattgaaaccagtctctagaatagtaacagaactaggacttggatcatgcaccacagctatatttaggacactcagtagctgcagtccctggattctttattgtaactactgctagcattgttcttattttgaatatactgaaatctatttagtcttgtttagactattttctggtctaatacatggcatacaccgttcgtgaattttttttttcccttaaaaagtaaaaaaaataaaaaatagaagcaaacacaagtattttctcaagtatctggattcacttgtattttattgtattgtttcttattaaacaatcatattctaaacctgtatagaggatttgtatgtaataactcaaaccacttctggctcagatatggttcttcagatgatctttcttttcttttggatccaaactgggtcatttataaattatctgggtctttttctttgttggtaccagtgattttgaatcttaaatctcaatattgaaagtggagtatgtactatgtggttggttactggacaatcaggttgatgcattaaattggcatatgttagaaattagcatgactgaatttgatgcacctattgtaaattttcatatggtgtggtagatggaaggattagattgctaattttggttgaaataaaccaaaaactattgaacaattatactacttttttttaactacaacaattataatacttaagagtcaacatattgcgtaaggaaatccttgagaaatatatctgtggaggttatttttattttttttttattgttgggtcacatggtagttggtgatagtcctattctaaccttttttataaaagaaaaatttcaaaagaaacgttactatgatttttcaagaaatttgaagattttataatcagtgaaacaggacaaaaacatacctgaaccacttggggctagctcaagtggccataggtgggtgtgtgagtgttggaggtcctgggttcgagtctcaggtaaaatatgttgtaatatataaacgcttaaataaaaaaaaagacaaaaacattactgatacaacattgcaaagccacctggatagcatagcacctgctaaaactcaataaccaaatatatgttaacccatgaagaaggctatttagaagtaattcaatgacaaaagatgaatgatgtatataactatttcactcttcatttctgaatcttcacattcggtttctttcttcaaataaaatatccatttttaagcagattaatattatgtaaaaaagattgctaaaatagctttgagtgcaaactacttttgttttcctttccctttaatacgttcggtcctcacatcctatccaaatgagcacatataatttttcttttccactaaacaatcagtaatactactattcgccggttgttaaataaattaagaggcactaatcactaatttgtagttagcatttaaaattatatttgttaacacatcaccattatcagtttctggttgtctgtgagtgaacagactagagctaattggtgttttggttaagaaataagaaaggaagcaggtgagactgccaactacttgaaagctgaaatttcaccagtttaccctattgcactctaccgcagcctatctataaatttaattgaactatggtcattcatcaattattattattattatttttaaaaaataaattataatgttatggtgatgtattagttaagaaaaagaaattcattcttccattaagacacttggcttaaaaggcaagcaaaatcataacctccatttttccaagtacaaaatcatgtaccccccactactactgcacttccttatcactcccttccgatcttttaatttttttctaattaagaaaaaaaaaattgatagttgactgactcagactctacataaaattgaaattaaacaataaaacaaaatctcaacaatactattaacaataaaacaatttgaatgtaattagtactagtagataataacattattgcgcattaattaagctaattataaaaaaaattaagaacaatgatctgttttattatttttttctaagcattggatgtcaccaactcaatgagcacatgaaataaataattaaataaataaaagcttgcacataactcggtttaactcaactcagacgcaataaataaataaggaaggagaataataggcagcagagagagaggttggtttgaaacaatgaaacctcctctgtcttcgtcttcatcttcttcctctgttctcagaaagcctcgccatctctct

SEQ ID NO: 186468 - DNA, 3288 bp, Cannabis indica
ctctctaatagactcattgaattgtattccaaatgcagtaatatggcttatgctcaccaagtgttcgataaaattcctaagaagatttgtattcttggaatgcccttctgggtgctcagtgcaaagctggaaatatgcaagaagcttatgagttgtttgtgagaatgcctgagaggaatgtagtttcgtggaatagtgttattagtgctttggtccgtaatgggttggaacagagagcattggatgtttatgataccatgattttggaaggatttttgcctacccgtttcacattggcaagtgttttcagtgcatatggaggattgttagatgttaagcatggtcaaagatgtcatggccttgttattaagattggtcttgagaacaatgtgtatgtgagcaatgctttgctgtccatgtatgctaagtgtgggcttatcagggatgcagttcaagttttcgattacatgattgagcctaatgaggtcacttttacagctttgatgagtgggttagcgcagacagatcgagtcttggaggcgctgcagttgtttagactgatgttgagaaaaggtattgatttagattccgtttctttgtcaagcattatgggtgtatgtgctagaggaggattcaaagaatttgatgactttaaccagggcagtggcttatgtggtatgagtgggaaacaagtacattgtttaacacttaagcttggatttgatgaggatcttcatttgaataattcattgcttgatatgtacgcaaagaatggagacatgagttccgctgagaaggtttttgatagcttgccagaagtgaatgttgtttcttggaacattatgatatctggttacggccaaaaatatcaaactgagaaagtaatagaatgcctccaaaggatgtgtcagctagattttgaaccagatgaggtcacatatattaacatgcttgctgcatgtgtaaagtcaggggatatagaaactgggcgccaaatgtttgatagtatgtcattcccgagtgttgtttcatggaatgccatgctgtctggctattttcaaactggtaaccacaaagagacagtaaagctttttagagaaatgcagtttcgaaatgtgcagccagatcgaacaactctagccattactttaagctcgtgtgcaggaatgggatatctggaagccggaaagcaaatccatgtcgcttcacttaaagctgcatataatactgacatatatgttgcaagtggacttattggtttgtatgcaaagtgtgggaagacaggattggcaaagaacatattctataaaatgcctgtattggatattgtttgttggaattctatgatagcaggtttttcattgaattctctagataaggaagctttcacatgttttaggcagatgaggcaatatgagatgtttcccacccaattttcttatgctactgtactaagttgttgtgcaaagctttcttctccatttcaaggaaaacaagttcatgcactcataacaaaagatggatacataaatgatgtctttgtagggagttctctcattgatatgtactgcaaatgtggtgacgtagatgggggtcaacagttcttcaatacaatggctactacaaatactgttacttggaatgaaatgatacatggatatgcacaaaatggctatggagatgaggctgtttctctttacaagcaaatgattgcatcaggtgagaaacctgatggcataacctttattgctgttttaactgcttgtagccattcaggtttggctgatgtaggtattgaaatattcaattcaatggagcaagaacatggagtggaaccaattttggatcattatacttgcatcattgattctttggctcgtgcgggtcggtttgaggaagtagaagtactaatagacaggatgccatataaagatgatacagtcatatgggaggttttgcttagttcttgtaggtatcatactaatgtaactttagcaaaaaaagcagcagatgagcttttccgcttagacccgcataacgctactccatacgtgcttttaggcaatatctattcttctttaggaagatgggatgatgctagggctgtgagggatctgatgagtgataatcaggttatgaagagtccaggttatagctggattgaatataaaagtcaagatgctggcactcttggagggtgataatattttcattttacaaagtgaagctattctctgatgcacagaaaatccttttgtgtttgactgtttattaccattcagattggtgtagtctggaactgttgaggtattaatcaaacttgaagacacattgcttttttcattttctctctctgtatatacatatatacaatataaaaaaaagtattgatgtgtatctttacataacatttctttttttcatacatatatttttataaatgtcatgatagatggttttatctttctcatggattctttagagatttaaggagatgtgttttaagggtcaaccatcaattgaaaggttcgggagactttataaggtaattagtttcatcaattaaatttacttttatataaaaaaagttacaaagatgctcagctaaatcattaagttaaaactcggaaatgaaggtttttccccacaaaaatttcaaggatattgaaacatgacttgatattataaagagatctctattttaatcctggcttaagcttgaaacaagcaaacattatattcccaataataaaggattaagtgacataattgcttagctatatcaggaacaatacttgagctgagttcatgctgttccacaatatgaactttttggttattttatatagatttctaatattgattatgtatagatttataatttttttttggttttttggtggcaaggctgcaatctcagaagaatagattctctgtttttggtttggaggaattatcttggatagcaataattgaagtgttacaagaactatttcatattttaggaatcaaaacctctcaggatgataaatatacaagtacaataataatagcaatagactctaaaatagtgatacagtatttaacttttttaggaaatgaatctttgcagagcatagaaaggccaaagttgttctgggtctcagcaggagccccactggcgtgtgtgatagtatgtctccacagtccacactcattgttttagcattcaaagctcaacaccatggcatcagtgtggtgagtaagcttttaggtacccacatagagttattattggattagctaagt

SEQ ID NO: 186469 - DNA, 956 bp, Cannabis indica
ataaataattaattagctataaagttattatattcttagaaatatgaaagaaagagttttcactaattaatatattatcttacaaacattgaattgttttgattaaattattaaatacttttagtattgaaaaactaaactaatcacaagttcataactaaaattaagatgcttaaaacctatttataactatattaattataggtaaatattatctcatctagattaatttaagcattttgcatataaaatattaatatatgtattttctatttattaaatacaaaataatatatttttttaaaaaaattcattcttttatataaataaattaatttttaaattttgaagtgctaacacaaaaatttgtaaagagttatttttatagaatgaataagccaagatgatttttacgtaattttgtagttaaatctacataattcacgaattcatattatttctgagttataaacttttataaaatacaagatattcaatatcaatataaactatatatatatatattttttttgttaagtatatcaatataaactacatgaaatactgagtttctactcctgttcttttggaatgatttcttcgaaccaaattgactgtccctattatcataggtcttgtccacatttacatagtttttaagaatgagagttatttctttttagtcttatctagataaccgtttgtgaaacgtgaaaaagtttcacgtttcatatttacaacatgtgaaataaatgaattaactgatagtaactgttttttgtccttatctgaaagtggttattttaacgagttgttcttctaattatctttttaaggctcctcacaaatcatatttgttaaacatgtgtcctcattcctcaaatgcttctcatggaacaaacaatttattattttattaaccacaatttattattttgctcatatcccttagtctt

SEQ ID NO: 186470 - DNA, 2851 bp, Cannabis indica
tctttcaataataataataataataataataataataataataataataataataataataataatcgatacacacaacatttcatgttttaatttcctctatatataaaattaattttgattaagaaaaagtgttataatttgattataaagtttctctatatgcaccataaattttattttaacatcatttattaatataaattaaacatatatagcaaggttttgggggtaaaatatttacatgtatgcgtgctaagtgctctggaatagaaaattaaaaggccatcatgcttcacgtacatatccctattccctcaccagaagtataagagaataattcttttatatattctcgaatattattatatttttggagcataaactttgtactataaataaaatatgatggtatgtctacttttatattatatttatcacttaactaattatatataatgatcgacttgactaaacacattgctaatgcatagcactggtgtagtttttagtttttgctcatcaccgcttatttaaattatgtgttcatataacacatatatactatgttgattgtatatacataatgattcgatcctcttcatctaattgctcaatttgagaaatcttgattattaatgcataaattaataccaaaattaaaaaagaatttaacattttgacattctctcaaaaatgtccacatttttgcttaatcctaaaataccccctcataatcatatactatctcttctcttttcctcttctcaaatcttaccaatttttctcttcaccatacccaaaaacttttccatttgagtactttttggagtcattcttagtgaaagatgaacacatttctataaattaagagccttaccataagtctattgtaaaaataggaggcaaatgtcaacattttcaaggttttaaacatggccggtatgtgattttatattaaatctgttgttaatgttattggagtatattgttattttgttccttgtatatacatttagttatgtgttttgtcgatgtgttggttaaaaaataaaatctgagcttttaggggttctctcattttttttttcgtaaaattcgatgaatttgatacgtgttcgatgcttactcgattattagtattttcagaagttagtaatgatatttcaatagtatttgatagtttctcatcatagattagttatactacttgttttgttagacgatgcatattcgatacagggtaagttgtgtggtttgttcgagtgcttcatgatgcatgttcgatggtactcaatatgtgttcaatgatctgtgtttagtttatatattttgtagatatttttttttgtggtatttattttattttgttttaaattgatagggtcaactctatttggctatttgatgtacgatggtgtttgaaagtgcaagggtaaagattggatattcttggtgcagaaagtaaaatattcaagttggagtcagacataagtgttatgatcttgaagctaaatagattgtacaggggattcaagaaggattttgtggagaccaaggtccgagcctctttaagaaagtcttaagacaaggttacttctaacctactatgaagaaagattgcataggctacgtccttacctatcccaaaggtttgcgcacatcttaagggccccaccaaatgaaatcacgttaatgacaagccattgacccttcatagtatgaggcattgaccttataggatctctcccaattggaaaaggtggagtcaaatatgtgatagttactgtggattatttcacgaagtggatagaagaagagccaatgaaatctataatggccaaaaaagccttagatttcgtaattaaaagcattgtgtgctggtacgaactacctcataagatagtctcggccaacggcatgcagtttgattgtgatgaattcacagagttttgagagaattatggagtcatcaagagtttatacgtagttgcaatatctcaatcgaatggccaagcagaagtcgtacgttaataaaatattaaaggtcaccctaaagaaaaaacttttagcttgtaaaaataactagctagaggagtttccatgcatgttatatgggcatacaagaccactacaagaacaaccaccggacattcccattttcaatggtatacaaatgtgaagtgatggtccctatagaaagtataatcacctcccatagaagaactacatatgatctagccacgaatcaagtcctgctgcaggaggcactggatctcgtagaagagcactgggaggagtcacaaatacgcatggcaacataccagaaaaaagtggcaaaatatttcaactcaaaattcaaagattagaaatttgcaattgggaatctgctcttaagcaaagtatttcctgcttctatagaactgggagtggggtactagagacatatatacaaagacaagcaaaaatagtaaagtacggttaagtatatatacttataaacgcttaaaaagcatgtctaaaaaagaaaaacactacaacaattatgattattagaggcggaccactccgctggtaataatctccttttccgccgctaaagagtaataccgacggggtgcgccggtaataatctgctggtaatacccggtcgctaataactattattagtggtggactgacatacccgccgctaataatagtatcagatcattaaactcacactattattagcagcggatcaatcccccggtaaatacttttaaaactataaatttataatttttttttttaaaataataaatataaaattaatattaaatatatttaactttttaccattttacttatc

SEQ ID NO: 186471 - DNA, 1190 bp, Cannabis indica
gctactctcacgtcccaaagtttgacggtgtggtcgtatgagcctgtgacgaacatctccgagttcacaggcgagcaatcgccgcaccttacgtagtccttgtggcctcgcatttcagaaattggggtttctccggcaacatcccagtacttaacgagagcgtcgtcaccgcccgatacaaggtggagcttatcggcgaatgggtattgaacgaatcgaactgggcgagagtgtgagcgaagcttacgaagcggagttctccccttgatgtcaaagacttggacgagacccgaaagatcagaggcggcgatgaggagaccatcgcagcgaaacgaggctgacgtgacgacatcagagaaggaggtaatcgtggtggtggtagagaaggtttgagagctgaagatggtgagagaggcggagtgggtagcggcgaaagggcgagagggagtgtttgagaaggtgagagatgtaatggaggagatgaggtttgggatttgttgagacttaaaggaagaccagtacttggattccggagtctgtttctgggttctgggcttaggtttaagcttgggttttacagggaaggttttggagagttgatgttccgccattgaagttggtaagagttgtgattgagaaagaaagagaagagaggctctgtggttttagtccttactagggttttggacttttgacgcaaagggtttttgatgttaaaactaaaataagggaaaggcgcgcaattaaaataatacaaaaaaaaaaataatcctatcaataaataaataaagctaattaagaatttttcttctccaattttaacatgtaccaaattatattttctaaattttttttgtcgttaaaaattttcattgaactattgagtttgttagatttaaagaattttgtctaattttaataaaaaaaatttaaaataaatgaaagttcatgaaacatgatttagtacatatcaaagtttagttttaagggcataatttggtagatatcaaagtttgggagcatggtttagtacgtaaacataaacaatcaccgaaacagtaaaattgaatgaaattagacaaaaatccttaaatctaacaatctcaatagttcagaggaaatttttaacggccaaaaaattcagtagacataatttggtacacatcaaaattcgaagaaaaaaaattact

SEQ ID NO: 186472 - DNA, 3584 bp, Cannabis indica
aaaagaaaagaaaaatagatatactgctacttagaatcatacatctcataaacttatgtacaaactccccagataaagaaaatgatataacatggtaataaaatttatactcctcaacacaattggggttcatattcaaagacttaatttagttaaaaatttgtacagaaccggtagatgtcaaatctctgactattcattcatgaattaagatactaagcaacaacaacaacaacaaaagctagaataggctttcattgacattatgtattatatgtaattagttattaccactttcaccgtcagatgcatcttcaagtttagctattgcatcaattagagcttgttcatggtcctacaatataaaatttaccaacattacatataatactacaatgaagaaaaagataaaagagggtagagaagttgttgatttgttcttactttcaagactttctttgccttttcgatttccatcgggtcgggatggttagcaccaaaaactttttcaacctgtcgaaaaacacaagtcaagtagctaactcagaaaaagtgttttaaaataaagaaatgaagggattagctttgtttgtgttatacctccttaatcaaagtgtctgtatgaagtatttcaatatcacccatactcttcttcccaatgccattctgttgtaatgggaaatctttctttggttgaccctttggagttcctctacccctacctatgccaggaactgcaccgccacgagtcatggacttcttactacctcggccaggtccagggcgaccacctttacgagtaacaccaggatcatcaccttcccatcgaatatcttcgggagaaatctatcattggaagaagacaaaatcattatcaagaaatttcctgaccattcgaaccatttcaatatagtttatcatctctaaatatacaatcatatcccggtgtttagaaactatgaagggcagctaaaaaatcagaggtgtacatacatgaggacaatgaatccagacaggaatggtatgatgatttaagagacaagaagaaaacacttagcatgctgatccgggaagttgcaggaagaaatgcccgaaacatttaacccggtgacagtgatgtaaaaccatgcaatcaaatataacttttcacatagaaaagaagtaaataaagagtaacagatactgtgccggccagcgtcaaaaccagtgagcaccaatgagaagcaagtcataatttctctattattaaatacctcaagaaacatattaattgctcaataaatcaatatggatgacagatatggagcaaaaatatttaattgaacacacttaattcacaactatacaagttccattcattaaattaattgttgattaataaagatatggtggtccagaataataaatgttcaaagctcaataataatttactaccagtcaattgacattttgcctaataaataaattcctaaaaactcaatcaattaaggaatgtcattgcatgaatgtccttaagattcccatgaaacatcaaatgccaaagtcactaggaattttttactaaaactccaaaagataaccagttttacctctttgagattaacccattcccatgtctcgtttgtggtactaatatcataaaccaaagcatgtcggccctgtgaaggcaacgagaaatagcaacaataaaggctcaatatttattactatataactcctaaaccaaaagagttagcattgaatagttcattttattatataaatatcaaattatataatgtataaactacagaaattacctcaagagcattgtagtcagttataacagcctcgtagaagtggttgtcttcaggccaccttgtccaaacttttcttcctatcaatggatcgtatgcagctgctccttcggcagcttcagttgttggaaagccacctgagggacctcggttagtggcttgagctcttccggtaagacctgcagaagggtactgcatggaattggatgcagcgaagaaaatactccatcaagagaaatggggaaaaagaaaatcataacagctttttactttcaacattttgtttatatattcgaaaaccgtacttgaacagtagaacttacagattttggttttttggtccgagcacctggaggaggcccttgtctcatagctgacgaggaaggctgcatagatggaggcagcgctggcgagggagcaccaatagacatcgaagctacagattgcgatggtttctgttttttacgagatgctgagacagtaggactaggtaacgggtcatgaacaggttgaggagtactgagcatgcccggttgaagcccactaacctttctccattccctaaaaagcatttctttgttacagtttcggcgaaaatatggaattgaacagaccaaaagaaatctcctcaatacaacatgttattgtgacagtagtcaaaccttatcctccggatgatgtcatcggcattgacccttgatagaagctctctgtgttcctcgtcagatactctcaactcctttcttaattcagtaattaaactttccttatcctgaagatacaaaaagacaaagtactaaacattcatacctattgtcaagaaaacatcataaataggaaaatgaaaagtcaaacaactacccaagtgatggcatctgattgagctttaaaggcacgaagaactgaacaatacgcttcttgctcaatgaggtggatctgagtttccatgtcattatggatcctattaggtaatggagcggaaccaacttgtgcagatcgtccattgccagaagcacgacctgctcgttgaaatctattttgatgagaaggaggaagatcatcatctgtacctgcatttgtttttcatacagctgcgggttttaaaagtaattttttccaatttcacagcatatcaagtagcttccattccattccattcaaagagaaaaaaatgtgaacaatatgccaacttcaatattctgagtctagaacttgaataccttctaatatctccacactaaactgtgaacttaaaacctatactaacattctaaactctgaaaacaagtggcatgaacagaactattaaaggcaacagatctatgctaacaaaaccattcatgtcaaactaatatacaatggtcacactaaaagtcaacagaaagaagcaaaacaacataaatcacagcaaattaccaaactttctttgcaacatctctaatatcagcaaatttccaaactacagagctgagttgagtaaaattgattagcaaattgcactaaaatggaaaaacaggatattttacataccaagtcaatctaatataaatttcaaggcttgtaaaaacataaactcagaacttttccaaacttaatctaacactcaacacaaacacaatcttaaatccatcaaactatcacagtcactgaaaaacggtacaaaacaaaaccttggcctcaaaaattcacacttttgatctaaagtcaatcaacaatacaatgagatcaatcaagttacaaaatttgaagcattcccatcaaaattaactactacaaaaaaaaaaaaaa

SEQ ID NO: 186473 - DNA, 1220 bp, Cannabis indica
ttttgaaagaaggttatttagcttaatattccaaataggctcctcgaagttgaaagaagttatgtagcctcatccatccacagagatactctgctgctactctgtaccactgaactctactaaaaccccattctcagttcaatccgaaggaaaaaatgataatccaaacggcattctctgctccatccctttggtcctcttgctctgcctacaggttcaatctcaaccctctcctcttctccaaaactcgtcgtcgctctccttggcatttcacccgtctcagttcccgcctcttcgctggtatttctttttcttcactttcagttccacttccgttaagttttcctagaaattttctcaagaaaattcaatcagttatcttaaactatactgtccccattcagttttaatttcttgcattttctattttaaatgaattctgcttggctaattgcagttgctagatgtttcttatcaaattagacattttttttttgtgtttctaaggagtttcagagaataaggtcgaagtcgaacaatactaaattttttactttcctctgtattcaaaagtacaatggagaaactgctataagctgtgagataaaacattattgtttggctgcgtgattgttgaactattctaaatacttggattggtaggatcaaactaattcaaatgatatctttttagattggctgcgtttgtttttctttttaaaaagaatggtagtgtatattaaaaaatttcttccatttttcaacacccaagttgagcatttgtttcaactttagctcttcaaatcttcttctctccttttgaatataacatttatttagtaggcaagctgaaatcaaattctgttgtttttccttactaagtcattctatgttctatttcagttgctgcatctgcaaatggcacgtttacttccccagagatagcaaagtcattcgactttacatcagaggaacgcatttacaattggtattttgtcatggacttagtcctcgacttatgttgattcttgcattgtttgaatttctggttggtggtttttctttgcttaggtctagttacagcaagttttatctgtactatcatgtgggttttgggaatctcgttacatattacagtagaaagaatctttttccttctcaaattgtggaaatgtcagcatcaataacagttttttttttttggtttaatttacgaaggg

SEQ ID NO: 186474 - DNA, 933 bp, Cannabis indica
tattgatttcttccatacctgcaacttgtttgaatttgttaagaagatcaatcagatgttgagtactctctgcattgtgtcctttctctttgatgaggttccttacagctattgtttcgagcttaaggtcctcaacggtatgcaactcaatctttttcccaagtctttctactatggctctatcagcatttcggtcatcctttctacgaaaataccaccatcatatccattgccaattctatatcctgtgtatccgttcgcttctttgcccgtttgagttgcaaactcatcagctcaacctgaatatccaaaacaaaaacttactacaaaacaaacataacaatgggctaatcagctctaatcttcattcctcatttcaactacccagtactaaatctcctacaattgacctactaaatatgatacaaagtaataaggtaaaaatttctcaagaaaatggtcttttcaacaaactcatcagctacaacctgaatataccaaacaagaaacttactacaaaaaaaaaaaaaaagcatgacaattggctaatcatctctaactaatcttcctcgtttcaacacctaaaaccaattttccccaattggcataataatgtatatctacgcacatacatatagacatgaatgccatctcacactgtaaggttgggaactgataaaacaatcaaaatcaataataatgcaaatcattcaaagctataaatatatatatatacatacctgttctctaacttcttctgagattggaagatcgtcataatgcaaatcatccaaagcctgcgatagtttatcaaagatggtgtgaaaccttaccatgattgcctcactttcaagcgcctggaaaaggaaacaagttaatgcaaattcaaaaagtagaaacctccattattttattttcttcttcttgttctta

SEQ ID NO: 186475 - DNA, 1260 bp, Cannabis indica
tttttttcttgagtgaaacattcataaattatgagatacgatgatgatcgaaagtgatggaagtgaagcatactatatgatctatatctaactatatatattaacaaaatcaaagtgaataacgtagtacttacagagagctagaatttataggtatatgggtcttcttcttggtcttcctctaagttcattcccatggaaacagaaggaaaaacaagagaaaactagtatgagaaacaaaactcgtcactagccatatatttttttacatatataaaattaattagcttggcaatataataggtttgtataaataaatagctagtacagcaaacagcgcacataataaagtttcgaaagtttgatttatatattatgatgaacttttataggagcatgtgtatatgtatacatatgttttgtagtacaacatatgcaagcttttcaagtacattgttatttgaagtagtacaaatgttgtttcatcgatcgtatgtagtccaccacaacattgttagagaatataatgcgttttaattttatgtacgtaccttttttctagaactatataatattttcttcattcatttcaaggatcactagtacgtggcacggcacgtgactaataaaactagttataattaattatcccttcaaacaacttatcttcttgatttcaggaaaaaaaaaaacagtaacttatcttcttgcagaaaaaacaatcacttatcttcgttgttacgtttttttttattatattctaattaaagtatagtaacctatcctttttatgtgaacaccattaaatatataagaaattacaaatttaccatgatgtcatttgttaaggttgaatagatcattacaatgacccttatacctttattatgaagctacattaggattaaatattcttaaagagtaaaatatacatatttacatataaaaataattactaatattatcttaaagaaccaagatgcaccactagcttgttttgttttgccaaaagaaaatgcaccacttgttttgttagaaaaaaaaaaaaaaaagacacggagagtgttgtttaataatcaaaataaaatattaacggcaaaattaaactttatatatatttttttaatacttaactataaaaattaaaattttgacaattaaacttactgaacttaaattttgttttgctcattacactttcatttaaaaattttagttaagtgacacaataaaccattcgcatgataaatttttaatggc

SEQ ID NO: 186476 - DNA, 2961 bp, Cannabis indica
atatttaggttttatttatatttcttaagagttcacgatagagtgtacttaaatttaatataattttttttttttaaaaaaagtcactcaataatttctaataaatcaagaattttgtcatatagccacattttatatagaatagatatatgtaataggcctcaaatgaacatttacttaaaatgtgatcttgcaacgtattgacaaaattcttaatttattcagtatttacttaatgagatttattttattatatataaataaaaagtgacctataaatttttcataaaccaaaaattttgttatatagacacactttatatagaatagatatattgtgagctgaaatgtatggattccctatatatatatatatatataaatgttctggtgtacatctagatctagtgatctagatacatgtatacagttcaaccgttagataactttgtacatatccttcattgaaaaccaaattaagaatgattaccaattgaaatcctaatatattaaaaatgaaattatcaatcaaactaattaatataacttttatcaatatctccatcaattaatttcgctataaatacgacatgatacatgcattgtattagagagtttaatagtacaattatgatataatgattaatagttaacatatcaattattacaagtaagcaaagttaatttaatagaaaagccctcatttgaacatgcaattgtaatccattttatttgtgggcgtgccgactaacatatatttgaatacgtaccgacatacatatatacatgcatatatatgatttatcgatcagcgactaacatctgattatgaaaagtaattaattaaaaaaagaacataaactttcctatcatcaaagagcactgcgccacaaagtgatctataaatatatataaatagattcatatatgtatagatactcatcattctaaacacaataaacatataagattaagtcaaagattttctcttttcagagggagctaatatatataaatgtgggtctttcttttctgcttctttttctcttttaaattgtcacttgcatttggtttgttttctaataaaagaaaattcaggtaaacaataatgagaaagaagtagtagagattgcaggtccccttaattaactaagggtattgaaaaactcaaaagtttctgaccccaaaattatattatatatatatatatatatataccttaatatatataaaatactttcaatctgaatcatttgaatatgaactttgccaaattattaactaacgtcaactactcattgattacataacatggaatatataaagtgtttaatattagtgtcatctatgataacagatgatcagtaaatcaatcacatttcgcacacagttaaaccaaacatcacagaaattattaactattaataagggaaggcataataagattaatcagcagttatagctacggaagtagtgatttatatagtttgtttgtctactaaatgattgacacaattaaagaaatatatatatatatatatagggatatgatttgtcccgcgatgtactttcacggaatgtattcccggggtatattagatgggtctcagggtacattaaatgagtgttagggtacgtttttactttttaaccctaattatccctacatcaatctcagccgtcagatcaaataactccctcatttaacgactatcgtacatcaaggattaccatccgtgaaagtacaataatgggacaaaatcatatccctatatatatatttatagtgtatatagaatgcttcaatgcattaattctctaaaattcaaaggttacaccgatataaaatttttatttattttggtatcttagaaaaatttttaatataatttttttaatagtcgtatatattttaattatttaaaacatgtaataaattttttaaaacattcaaaaaatttaatattgcaaaaataaagttgaaacagtttgttgcatacctaccttctttgttttatatagacttgtttttaaattttttttaagtttcttaaaattttgcatgatttcttaaagggtaaatagcagcataagtacccaaagttttatatttgtaagcggtataaactcaatgtttatttttagcggcaaaactataatttttctctaattttatcagtacagattctgttagtgtcttaaacagggcacatataactatataaggcgtaaattcttgatcataggatctaaatacaaatatgtagtattatttacttccaaatgttcttttaacaaattcaaaacagagtctatactgacgaaactagaagaaaattatagttttacaaattatggatacttatgccgctaaaaataaacatcaggtttatgccgcttacaaacataaaactttaagtacttatgccgctatttatatcctttcttaaataactacaatatgaacgatgataaaataaattaaattaaaagattttcctgaatgccgaaacaaagatgcatcggtacactatttttgggatgtttccaaaattattttgtgggtttactccacctatatgtacatatatatattaattcttaatttattatcttctgtacatatatcttttcatatactttcagtgattgtagtgagtctggtagttgttgttgagccatagctaggccagtccattccttatttttgccataaatatgtaaatatataggaccccctaacctattagttgcacacggattcctcctataacttttttttctctttgtaccttcgttgcagactatactagagttttgccccccatcctcccctctcatcgatctacttttattacttcatacatacatacataatcacatgatatacatataaaataatatatatatatatatagtacttaacaaaagtttgaggcatatatatataacgatatagtt

SEQ ID NO: 186477 - DNA, 2598 bp, Cannabis indica
aagagataactatttactatgtttgacttaacacagagaactacctttcaaagctggaaatgataccctcaaaccagtagatgaagagatctttactcatgcgccttttgtagttgtgagtgagacagcaaaaagcagcattcctgtagaatagtccctatgttacttaaacatgcttttgtagtattatcaccaggagttactaagcaaatttttttttttaaaaccaccgctttcttactccatccctctacttacatctgtacattaccaagttttttatggactccttcctaccctttccacacatcaaaaaccctgctaatacattaattcctgcagccaactctgaacatacaactctgaacatatgaagcaaaaatacttccaaacctacataaagaagggccttgttccagcagatgaatatcaagatagataagacaataataactgttctaaccaaagcttcctcactaagaagcctaacctccaaatccaaagtgaacaaaattttgctacagcttgtctaaaaccgttaatcagggtagttatttatatatttagtttccctcaaatatattttacaatgttcacaaatacagctcaacaattacaagactcctaatatatagaatggaagaatttttgtattttctttatacacaaagatatctaaatatatatttagatatatcaattacagaaaaggaaactagatatttccaaatcaatcagattaggacttaccatagccactttcctttcgtgagctcttctctcaaacgtgcatcagcatgctctctcttcacccgcttctctgatgatgatggtttagctctgttaacacaagcctaagatgcaagatcacattagatacctcttacatgaatctttatctcagtaaagcacataaattacatcttttataaagtgaatggaaataattacccgatagaacaaagcagctgcaaggtccacaaggccatattgtgacctacttaaagctccaaatttatcatctttagttgcctcagccctaagtcagtatagatttaacattataaatgttttttgagacaaatcacatgtccataagtaacctcatgggtaaattatttttctattgataaaaacagatcgtattaataaaacatcaatagtcatcttttgtattacaaactaggtattagcaaaaatactcctaaaacgtagtgaaagacaaaacagagacagagaaacctttccataaacctctaagattacagccataaatgccaatcaaaaaagagagtggagaatgagaaagagaaagagaatgccttaaactccttattgttgaatattaatatagttatagattcaatgcctgatcagaagtataaactgagaggggggaaagaaaaatggagaaaaccaaaaacaaaacactaaccagggcacactgcaactagataaggtttgatctagttccttacaaactatatcaagaagttgctctaccagaagactactatcagtagcatctctagtacaatttagctgtaatcttgcatataatataagtgcatcctgcaaaaaaaaaaaaaacaaagtagaaaagtcttaatatagttacttgcaaattcatcatgaaagtatgaaagtaattttatttttattcatataataaaaataaaaaaaaaaaaaattgctttgaagcttgacttggaaaccttaagagctcggtcatgtgttgtcaaccaacagcgaaacacaaattgttgtacagcattatggatctccatagaatggcaccccaaattaggaccatctttcaacaagtatttattaacacactcaataagtttgcgtgaaagcttgtcctcatccctgagcaaaaattaccatttacgtttccattattgaagacaattggaattacaattacaaacaatcatatatgcataacagtgtagaaagtgacaaataatactacttatgactaaccttatatgagagaaaatccctacaaaccccttaacaatgtcttctcttagactgtttggtaaatctccagggggattctccagaattgattggagagtcagaatgcaacgaaagatctcctccctgggattatactgactgttatttttcccacccaagcttgattccaccttttccatgtacagaagcacaagacctagcaaaaagataacatatgcagaggaaatgtgatcagtgttcgcaccagcttacaatgaagaaaagtactttgctcaaaaacctaaataagtgaaaatcttacaggaatagatacgcttcctcatgtgaaaacgataatctttaacagccaaaagatgccggagaatactttcgtattctgattgaaagcttggaacactgctcaagacatcccatatgtgattaaaaagcaatttaaccacagatagcaagggtgtcatcttccctgaaattgtagaaagcaaacttgtcatatttcctgaattgagcctatccacttccttactaagttctatttgttttcaaaggtccatttcacacatcaaacattatgaacataatcttccttgtctcaatcaaacactaaaagct

SEQ ID NO: 186478 - DNA, 1109 bp, Cannabis indica
tttgtacaattgaattcctcagaattaatgagtgtaggcctttggcaataggaatcataccaatcacactccaatattagattatcctcatctgttctttggtgaaggtaaagaggatgctcatgataatcgaacttcacaccatgtggaattgtagaggcacaattcacacataaaatacaatcacatttaccacattcataagtgaagataagattatcttttttgcatgacttgcaagaacgaaatgcacgattagaagtgtgaaaacataaagggtgttcattatgaaaagaagaaccataaatttgaggtggtaattgtgcacacgactcatgcaaaaaataatcacaacgtttgcatccataacaaacttcacctgagcatttcaaacggcatacaaagcaactgacatcatcatcaattgatccgtcttttataagtggcattcgatgttgatgtgttggatgttgaatgagctttccactttcaaaatcatcatactcagtttgttggggcatgcgcatgcaattcacgtccatgaagaaatcacattgattgcatgtaaaatacatatcaacattttcatgcattttatggcaagagttgcatataaaggtctgagaattatcggtgcaaagtttgagtgggtggaaagaatgaaaggggcgcttgattgaacggcgttgtaggttttggcgcaagttattgcagaatttgcatccagataaagaaccaccttcttcagaaatatcattatcacatgtacgacatttgatcttttttttgtgttctggcaccaatttatcagagaactcaaacgtaaaagtttcttcgggctccttcgacacatttcgtcccagttttggcaatctccatcttcgctgtgacccctgttctggcaccaatatatcttcttctgttgattgttttcgaaaagatgggaagaaacttttacgtttattgtcagacttgagtacagggttgagtaatgtatatctgaccattgtagaatcttcaaaagcttaattaggaggtgggacaacaaatattattcaatctatgtcttcaataataataaagaggtaagagtaaagagagtaacgaga

SEQ ID NO: 186479 - DNA, 665 bp, Cannabis indica
tatactaatagattccataattgcagttatacaagataagaatattttaaaacgaatctatagtagttgggtgcaataagttattagaatattggaatcatgcatgtatatgatattttgatcaaatataaaaaaatgataaaagtaatatttttgtacatacatacatatataatctttggtagctagcaaagataaaaagtaatattgattcagaccttagcaataaactatataatgccgtgatctaattaatcgttattctcttggtgtcattaaagtattgccttatattaacgtttatgtcatctctctctctatatatattgtaatattaatattcgtatatttttatatattaataaatatacaaaacagcgtcaagcatgacgataaagaaagcatcactaattatatttaaattcttttatgtgatcaaaatattggatgagggaacctataaaaaaattcaaaaagggtctttctttcttttgttcatattgttgtgtattttagctatattttggctttcagaaaataagtgattgatctgtgagtctactgattgccagcctaacctccaacactaagatggacccatgccctacttagtaactagttattttagggttaattaaaaaaaaaagaaaaaaactagtatttta

SEQ ID NO: 186480 - DNA, 7396 bp, Cannabis indica
ttactataaatacgaaactcataaaaaaaaaaacacagagaaaaaaaaaaatgggttcagaagaagaggaagaagaacgagacatgtccagtagcgaagaagacgaagacgacgatgctttcgatgaagatatggaagccctaaaacgtgcttgtatgatcaccggtactaatcctgacgatcttaataattcctctgctactcccactgccggagaatcaatatctaaagttgaagacgaagaagacgaagacgatgatgatgaagatgacctagagttggttcggaacataaagaaccggttctctacttttgaacctctctcgctgaaacctctttgtgttttgccaccggctattatgtctgatgatgacgagggtgatgattttgaaactcttcgtgctatacagaagcggtttgcggcttatgattgtggtaatttgtattcgtatattcattttgttttggactaatgtgagtatgcgatagtgttgtgatattttttttttgactgtttatgtgagtaatttcaatgtctgaactttcttttaacttcaattcgaaatggtttgagttgagttgagctgaattgaattgagctgtttgtataattgtgtaatttgcatttggatatttttgtgtgaactagtaaagatatttaggaatttgaaaataattcgttttgttatgaatgttgttattgctgacgagctcttgaatcaaaattttgttttgatgtgattaatcagatattgattctgcaaattgtatttctccagacgttttggttttcttttattacttacaaatgctcaatttttgttcttgatacgtttttgtgtatgtgtagtttgatggatgaatctcgaatggtttcctgcttcatttcatttttgaaaatttatagtcttaaattaatctttcagtttcttgatttttcttgtgaaaatttcagatgctttcaaaagtagcagagagacttcttttgagacacaagagcaggttcatgatcctcgtgtatccttagagaaaggctcttcaactgatttgattgttcatggaaatgatgcctgcagcatttcagattctgagtatactggaggcactgcctctcagtcgggtggtcatttggaaatgcagccttctgctgacattacatggcatcacagaaataactcgaacacatcaacatcgcagtccaactactcaagcttcccgaaatccgcaagggtttttatggatgccattaaaaaaaataggtcttttcaaaagattttaaggagtaagctgattcagattgaaaaaaaaattgaggagaacaagaagttgaaggaacgctttaaaatcctcagagactttcaggttaattgcaaaagaagaactggacgtgctctatcccaattgaaagattctcgtgttcagttgatttcacggaagaagccatggccttgtaaggattcaaaggttggttgcccattctttgttttacaaaggtctttgaagtgcctataaagtcaagcttttaatacatatctgaaatcattggcattgactaataagattccaatgtgctacatgggatgatttaaagactacaggacaaatgttaatgtagtatatctaattgcaggtgattttgtttcatgtgcatcagttattgcatgaactggttttctttatctatagatttctttcatataagtttcttgatctagtttctgccttcctagtgggcttctttatcaacatatcctatagctgttgtttttttcagtcttttggcattttactatcttcatgtatttctgtttgtctcccatttcttataatcagtaatgtctgtcttttatgtgttcatcgctgttccttctctcgtccagcatatggtcattgcaaggcataaaataaaattgtgtcagtattccacaaagttattagactaattatcaaagtgcaagtttttattgtcaaattcaactccactttatcatttggtggatttattgtaatcttgagaaacattattttttgcaggttcatgataaaaggatccctgctatgtattatggtccggaagagaattctcacgtttcaaattacaaaatggctttaacaaagttcccattgtcattagaacgtaaaaaatggtcagagaatgagacacaaaatcttgaaaagggaattcagcaacaatttcaagaaaagatggttcaagttatggtggatcgatttaggtatttcatcctttttttttactgattctattgcattatagtcaatcctttttgcttgagacttacttgatctatttcacttttcctttaatagtggcgggaatggagaatatcatgatgtctccaatgatcttgataacattttagcatcaataaagaatctcgacatcacttcagaaaatattagagcttttctgcccaaggttaattgggagtatttggcttctatgcatgtagtaggacggtctggtgcagaatgtgaagcaaggtatgcactcttattatgtgagatttcaacattgttctgttatgtgcattgagatttgaaaatgttgacttaaagacagtaattgctcaccactaaaagaccaatcctaattctgcagtcaaagaatttaattttactattgagtttatcaaatttagctatggtaaattggtttatgctttccctttctctagtgctcttgataagtgctaaggtaattaatagtatgactgagcaatgaaatgtttggggttctcccatcgactggacattatggattttgttggaaggtttctttactgtttgatttacctttctgtgtttgataatttggggatgtgttcgtattatattctgtcccagactcccaaacaattgttagctatggttacggactttggtccttgtggctcacacttgtttgtgccgtttgttgtactttttttcatcacacaatccgagttgtttacacttacaacccacaaattcaaaaacagtactagatttctagagaacctttacaaatttgttattctgaaaaaacttggagactcttggcaaaactaaatagtactgatccccgaaaaataaaatttcaatgactagtaatatagaacatcagtaagacttaaagatccatggactaattcgaggaccatcttttgagatttagaccaactttttttgcttctaaattgaactcttaaactaaaattactaaaacatctttagccaattagacataggactagccgagcagcatacgttggtttgtgtgctatatcaattaccatttagatccattttcatattgctgttgtctcaaatatttgcggtccttgactagtgtttttgtgttggtttctccccaaagcatctgtccttccacgaagcaagctttgcagacgtctatgacgataccatcacaaacaagtttacaattgttggatttgattaaaaatgctacagcagcctaggttatacaggtgggactgataatgacctgtactttactcaaaacatctgtgatgagtacgtctgtgatgttatcatcacagacgtctgtgatgctttcattctattatttgcactaaaaaatcatgcaatgtggatcattgtgtaaatttcttcagcttaattctttaattgaaatctgcaggtggttgaactttgaagatcctttgatcaatcgtaatccatggactgccgaagaggataaatatcttttgttatttgtccaggagaaggggatcagtaactggattgacattgctgcatcattaagaacaaacaggactccttttcaatgcttggcacgttatcagaggagtttgaatgtttccatattgaaaagagattggaccaaggatgatgatgctaaacttcgttctgctgttgaaatatttggtgagagtgattggcaatctgtagcttctgttttagaaggatggactggtacccaatgctccaataggtaagttagctttgctcttttataaattaattatcatatttggtttccatgaagcgaaactaattgaaaattaattatcatattcctttgattttgacccatcgacattgtacatctaggtggaaaaagtctcttcatccaaccagggaaaaagtaggtaggtggactgcagatgaagacaaacgacttgtagtggctcagttgttgtttggacctagaaattggaagaaaacagctctatttgtgccaggtcgaacagaggtgcaatgtagagaaaggtactattaaactttttaagttggacaatttttttttactaatcatgcatgtatattttactgattgtaaaatgttgaattttgatgtcagatttgtgaattctttagacccttctttgaactgggataagtggaccgcagaagaggatgccaagttgagagcagctattgctgaatacggatattgctgggctaaggttgctgcggcagtgccaagacgaactgataatatgtgccggaggtaggcattttcgatagtgaagttaactctccttgaatatttcacactaatttgattctgatatttgctccctggtttcgttttaactttctgttactgctgctttttttatctgtatccaggagatggaagaagttgcttccggatgaggttcctttgcttcaagcagctagaagaatacaaaaagccgcttttataggaaattttgtagatagagagtcagaacgtcctgctctttgccctggtgatttcggtccattgcgtttgatggctaatagtgagaacactaatcaaactaacaaacaagctggaaaactaaggtaaattttaaggaacgattggtctctcggatacctttttttttttcggtatatatatccttctgtttctaatatttacttgttccaagcagagaagtaaagaagaggaatgtgaagaaatccatagaaaacagccaaacagatcaaaaagaagtcttgggtaataagtaatgtaagtaaccatggtgaggccgaaacacaaggtacacaaaagagtaaaccagaagctaaaaagagaaaacgatgcattaaacaacagtctaaggcaacagacctcaccgaaccaaatgaagagagggaatgtcttctgttacaacctgaaaaattgaatccaacaaatgatggtgattggaatgagcctcttggtcaggctgatagatttgatccgaatagccattacaaggcaaggttcacgaaagagtaacccagaaactaaaaagagaagacggtcttataaacaacattctaagatgacagacctcactgaaccaaatgaagagctgttacaacctgaaaaattgaatccaacaagcgaaggcgattggactgagccttttgatgcaaatgaagccattacaaggcgaaattcacaaaagagtaaaccagaaactaaaaagagaaaagagtctggtaaacaacgttctaagtcgaaagacctccctaaaccaaatgaagaaggggtatgtcctctgttacagcctgaaaagtcgaatctaacaagtgatggtgatcggactgagtctgttggtcagggtgatacagttgatgtacatgaagccattactagacaaggttcgggaaagaagagtaaatcagttgctaagaagagaaaacgatcttctgaaatgagccctaagatgacagagcttgctgaaccaaatgaagagagggagtgtattccgtcacagacagaaaaattgaattcatcaagtgatggtattacgccacaaagtaccgaatcgagtttgaagcagaaaagtggaaaaagtactctggattcatgcgaacatcaacattccggtttatcttctgataattcgtcgccagcaggaattgctactgatgtttcggttcagaattcatgcctggattcaacagaaataatggcagttgacaccgttggtggaaatgataaaatcgcctcagagaaaaataaaggcactaaacagtacaaaagacgggcaaaaaaagctgtatcggttccttcccaacaaaacggaatgaaagagttaactgaaaccacagtttgttctgatcagaatgaagtcactgcagatttcgatcttccacttattagcttcctaaaaaataaaccaaagaagagaaaactcgaagccaacggttgtgatagtaaccattcacaccctccattgataacgcagaaggaagcagatgcatccaatgctggaagtctaatacctattacgaacgatgatagcgatttcaacaagtttggatcgtgcaatttgacctccgattttgcaatggacaactctgcagctttcggtagtgaaattgaggctggtacaccttatctcgatttggaaatggagagcatcaatgtggaaagcagtgatgatactaacaacacttttgttatcaccgagcagcaaactcgcgaaagtgaatctaaaattcttgcaaccgttacatccagcgaacgaaagcctagcaaacaagatcttggtaccggacatgaagttgctcccgaggaaccaaagaaggaaaaaggcgaaaatggtacgattttagcttatgttcgtcgaaatagattgaaaataaaaatttagtttctcaattgacctagtaaagtagtagttttcgggtagaaaaatgtgttcgatttcgattctaaagagtgccaaatgatgctgaacgtctgaagttttttaagtgatcacagtcgtttagttgaaggaaatattttgaattggtaatggtgagttttctctttataatatattcttttggaccagtctaaatagttttaattatttatttatgattgttatattagaaagaaagaaaaaaaatggattaatagggagataaaaatgtgatttgataatagaatacagcattttaatgaattaaatttgtatagtggcctttattgtattttatattttaagacataattgtagggttgatttattctttttttttttccttctttttgtagtctaatatttatttatttatttactttgtgacaaacaaatgtggaagatgaaatttttgcttctatttatttatttatttcgtattttttgttaataaaatatgcttgctcccgtctattgagtttgattgtttagctttggtctctggctatcgtgatttagattctttgttagagaatattgatagtttacttcttgtatatagtaaactgttaatcaaatttaaccatatgtatatgtttctaattttttcaaggtatatttgaaagaaaaataaaatgaaatcatttcttgattatttttctatctaactataagttgaaaaaaaaaaagtaaaagtaatttcttgatcataatgttcttatggagtagtgctccaaccttatattgttcatatc

SEQ ID NO: 186481 - DNA, 1633 bp, Cannabis indica
ttctcctaattttctcaatctcttttctctcggttctttctactcctctcatctccttctattccaaacccataccaaatcaccttagacggtactcgactttgaccaccacccactcttgtcaccattttatcatttttggatgcttggagggaagctttcatgggattgtgactttctctaacatttattcattggtgttggcttttacatgtttgatggagctttcgaataaatctgggcctttgttcgtttgttgtattgaattttttgcaaaaaatttgatatttttttttttttgtcattttttgcgctttctgctcgtaaagactcgataggttcaatggttactctatataagcatgttcttgtggttagagatgaatttgcaatataaacttgatagtacttgttttttatttaatagaaaaaatgaaaaaacaatagtactatcatatgccatcgaacactatcgagtatatattgcaaattcaatggtattgttaagctatgttatttgattaaaacatcggttgtactggatagtactcaatggttctagagagttatggtttcaattgaaaataaacaaacaacataactagagttatagtcatgttattactcgatggtgttgttaagttatgttatttaagttaaagcatacagagagttaaagtttcgattgaagataaacaagcatcttaactactgagtattatcgagtacaacagatgctttagtcaaataacataacttaacaccatcgagtactatcaataatggcaacaaaggggaaaacccccaaaataggagaacactctcaaccttactactcaataatcaataatgtcaacaaaggggaaaacccccaaagtgggagagcactctcacccttactactcaataatcaataatgtcctcgttacatctattcattaatggggaaccatgaggcaaattttatggctctagaagattcagataaggagatccactttcactgttcttgttcacattggaggctgatgtgttgatggttgataaagctttaagttcctttaaccttagaggttttaatggtgaggagagaaaagattcaagttagtcacttgcagttcactgatgatacaatgttctttgtcaatgatcaaagctcacttatagtattaatggatatagttaatgtattttctgctatttcagtgctaaaaattaatgtacccaaaagatagttgttgggactaggcatggtagaaaaggtagtgatagcgtgtgctgcctttattgggtgtggagtaggaagtttacttatgaagtatcttggtatgcttttaggccgatcccctagaaaagggggaattttaagaaccaattctagctatgtgtgcaaaatgtctcgacggttagaagagtgcatttttatcaagtggtgtggtagactaagactcatacaatctgtgttattgtcattaccaattaattatcttttagtgttcaaaaccccaaaggcagttaccaatcaattggaaaaagttaatgcgaaaccgttttatgggaaggcgaagatctttcaagaggtgatcgttggtagcatgggagatggtttgtaaaccgtatatttgtaaggtgg

SEQ ID NO: 186482 - DNA, 2618 bp, Cannabis indica
ctaatgaaaatgtaaataagtgatgtatatatataaaataaaatttaccttatcaaaaatatacttcgattaaattgtgatacaaatatctcacataataaaaagtgatccaaatttaaatcataatatacaacatgatgtaaatgtatcatgattttatgtttaaatttagagtactcttaaatttatatatttatttttgtgtaattatattttatatttttaataaattattagattagcattaaaattcacattaaaatttacagttatacattaaaatataataataattttttttaacaaaaatatcataaaagtattatttatactatataaaaatcaatttttgtatctctatatacatatgtataatgtaatatgtatatatggcttccacctttattaaaatatattcttaaatagaaaaatatcatgaatttttgagtcttcacttaactaatttgtataatgatggtggtatttgctaatgggggagtaatatgttaaagagggcattttatggtaaccaacacactatatataacatgtcatacatttattgataaatcttatgtatttcaatctaaaataaatatgtgagaggtactatatatatgtatatgttatattataaagtgtttggacttaaaatataatagtgtaaattaatatgtttggtttcagcttggagctcttttttagtcttaggagtgtggattaatttttttttttttaatttgaaagtctttttctttttttctgaatttttttaatttaaaagtccttatagtaacttttctcagaagataaaaagaagagtaaaacttttacttagttttaagtataattaagggaaagtagaaacttacataggaaaattgaaagagcggttgctgttgtaactctcatcagaacggtaagagaggtgactaatagaattgtttcgtcgagtgcccatatgatttcttcggttaatattggaattgatcttattataatctctactaccataataaagctcaacattattattattcgattcacatgactccatctccgtatgaagcgacctaaatatttgatcagcggcagtgatttgggacgaagatgaagatgatgcctccactacttgattatgattattattataagaactacgagtaggaaagaatggtggaagattcatgacttcatcaagcttgttcaactctcccgatttgtacaacataagaaactggtctttggagaagctcgtattccccaagtgaagactaaacaacgattcatttgaggttgaactccactctgttgggttcgatggcttgctcgaaaaaatcgaagctggaatccgatttggatcgtacccattagccttcttagtagtagtagttgtagtagttggggttagagataatagagaagaatgcatgggtgacaagctttgagggctccataaaggaatattttggtggtgaggactaatatctggtgaaaatattgaggagtactcatcacaataagagattctttgtttaggttgaagagagaattccaaatctttattattattattagtaactggtgatgaaagatcagaattgatgatctcatcatcatcatcatctttttcttgtttaccatcatcagataatggtgaataattagaagaagaagatgatcttgaattttgcctagagatgttaaattcttcttgtttattattattaatattattattgatctttggcacatcgaaatcaaaacgtaccttcacatttttactactttcgtttccattttcattattcatgatctcaacaatattattcattgttgtattgatgatgatgaactaaaaatgatggtaactactgcatataaacaaaacataacaatatattagaactcaaaattgcataaagtaagaatatatataaatacttattataaagaaaacttactatataattaatgaaaatctcagctttaattagtgcctctcctcctgctattaattgatgaaatgagttcataattacaaattaagcagggaggagaggcttagagagataatatcatatataatggttaataatgacgaatatcacaacaaaggttggttagtttaagagcttattaggacccgtaataagggaaatgagaaaaacgaataatcatattattaagatatgaattaaagaatgggaggcatggagacaatgtcggggatttagtaatgtagtatgttattaactaatcaactcatatttaagataataataattcataagtaaatgtaactaaacactgttaaaattctgttgccgccagtttctaacgtacattcagtttctcttttattaccataggtttggagctcggaaattctagttctaacaagcataattattttaggatcgaatgtataaatatatagggaaatttgtcttataaatacttattttgtgtattttattgttaataagtacctaattttaaaaaattgtggcccaaatacacaaatcatcaatcatcattcttctaaagtttttttttagcatccactaactttcgttaatttaataacatgtggacaagttttttttttttttttt

SEQ ID NO: 186483 - DNA, 1787 bp, Cannabis indica
ctataacaattagtatatgtaatttcaaatatatacatgataatatctattttaattataaagaattaattttttctttttctatggaatcccccaaacatatgtacaatatattaaaataattaaattataaattttgtattaatattattttttaattgttttacttattatgtttgaattttaatagtgaaatgtttctcttaaattaaaaatgaataatttttttaaaagacggtagtgaaatgataattgtataaaaaaaaatacattaacaatattagaaattgattgttaagatattaatgtaattaaagtgtatacggtattacaattaagtttttctttaattttatatatttagtcagtaagaaaactccctagcttaggattgcagttgatggtaggtattattcagcgaaccacataaacttcttatgtaatctcagattaataagtttgtgttcttgcttgtttgcttaggagtttcaagtttgtctacaacgatcaaatccattgcaaaactttcttatctacaagttttgactttgtgacttgttcctacatacatacaattatcaattaaaataaagaacagtttcctatacacatgtatctgtttcaaaattcaatctcaatctgtaacccttttgttcttttcagctcttaaacacgcataagaactaatgaatagctaatgaaaacctcacactaataaattttcccaacaaaaatggcatatacatatgaactgcatattatatttcaagaaataatttcaaatcactacctcccatctaccattgtaactgtcaactcgtttaaggatgcgtactcggggccatccgagcaaaaatctgaatcaacagtagagcccctcatcgaagtaaatgttggttgtcttggcaatggaagatttgcattttcactctccaacattaacaacaccgatgacatggtcggtctatgaagtggagaatcttgcacgcataacactcctacttgtatgcatcttagcacttcatgatttcgggaacatgtatctgcaatagagggatcaagcaattccattgctcttctttcattccacagatgccatgcctgaaaacattgcacatatattttattcaataattcaattttagcctgcttgtactttgcaagtaaaactagacaacatagttagtgatatacttacatatccaataaggctcaagtattcagtattacgatagctaacattccttctgccactcacaatctctaacagcagaaccccaaaactatatacatctgatttgactgaaaagagaccctccattgcgtattcaggagacatataaccactgcaatttgaacaattatggatcattagaatttaattcagagaattagtcttgttaaagtgagtacagatcgatgctacacttactatgtgccaacaactcggtttgtgttcgcttcattttggttccctccaaatattcttgccatgccaaaatctgaaatcttggggatcatttcttcatccagcaaaatgttgctagcttttaagtctctatgaattattcgaagtcttgaatctctatgtagataaaggagtccccttgcaatcccttcaattatgttaaagcgagtatcccaatttagtagagcttgcttctctgaatctgcaatttttacaaaagaaaatatataaatttacagccaaaagaaaaagaatcttttattgcaaaaattcgtactagtgtttttttctaagtaacaaaacaaagataaggggcaaa

SEQ ID NO: 186484 - DNA, 894 bp, Cannabis indica
agttctttcaagctttatggttgatattgggcccactagagaccaactggtggaaatcccacatgaggaaatgtgtaagtcaaggactccatatcagcatccagaagccacctttgtttcctagtccaagaattcaaatcttctaggagtagtggaagagctcttggaccaggcccaaatgaataagaatgaggcccaaagaagaatctctcatgacaatattgaaatctccaaaagttgacaaggtttggtgggcccaaaaaagagaaaattaagtatctgtgtgttattttagtgattcaactaaatgctgatgagcaaggctctggaggtattagtggaggaacccttaatttctttccttctctagaagtaactaaatttgttgctgaaagatcagaccacgaggctgggagctcttccacaaagaaaagattttacaagagacgaaaaggaggttcaatagcttaaaggaactatcaaaaaaatcaatcaataattaggtaattccatttcaattaaagagcaatgatcataagaaaaatgacatgcaaaaggatgcttatgtggataatactctggttgatattgtagcaagaagttaaaaaatctcaattgggcaaggaggcatcccttatcaagtcccctccctcccccatgtggttcttatcttggaattcttggggtgaagttagaactcaggcaacccaagctctccaagcttggctagaagatacaaattggagtatatttttttatggaaagaaagacaaaaaaggaggggattagaaatattgaaaatgctattggttttcaaaatttgcatactatcccagcgatcgaacttgctggaggtttcactttactttaaaattaggatataagcgtgaaggt

SEQ ID NO: 186485 - DNA, 5528 bp, Cannabis indica
ctctctacacagtttccgagctttccaaacaggtcaaggattccaatcccaaactcattatcaccgttcctcaactcttggaaaaagtaaagggtttcaatctccccacgattctaattggtcctgattctgaacaagaatcttctagtgataaagtaatgacctttaacgatttggtcaacttaggtgggtcgtctggctcagaatttccaattgttgatgattttaagcagagtgacactgctgcgctattgtactcatctggcacaacgggaatgagtaaaggtgtggttttgactcacaaaaacttcattgcctcttctttaatggtgacaatggagcaagacctagttggagagatggataatgtgtttctatgctttttgccaatgtttcatgtatttggtttggctatcatcacctatgctcagttgcagagaggaaacactgttatttcaatggcgagatttgaccttgagaagatgttaaaagatgtggaaaagtataaagttacccatttgtgggttgtgcctcctgtgatactggctctgagtaagaacagtttggtgaagaagtttaatctttcttctataaagtatattggctctggtgcagctcctttgggcaaagatttaatggaggagtgctctaaggttgttccttatggtattgttgctcaggtacatatacacatatacattacatacatacaatcaactcctctagtcctcttggctatcaggtctttaacattactagtcaaaacttgtttggaatcttattggctatgttggttagtacttgctaattgagaatgaaatgtgtgaataattgttcaagtgtgtccatgtgtataattgtttttcatcgttatagttacaacatcattgaaatttcgaataatttacagtgttcgaaaataagtttgatattgtaactatagcgaatactattatgaaaaaaaaattccgacatgattgtaataggaggctgcaattagcacctctctcgatgtgtgaatatttgttcaagtgtgtctatgtatgtaattgttttttctttggttgttttagggatatggtatgacagaaacttgtgggattgtatccatggaggatataagaggaggtaaacgaaatagtggttcagctggaatgctggcatctggagtagaagcccagatagttagtgtagatacactgaagcccttacctcctaatcaattgggggagatatgggtgaaggggcctaatatgatgcaaggtatgaaactatgaatttggttcttcctgttggattatcacactttttttcattaaactatatctggttcttgagttatttttcactcatgttttatgtgagtttgtaactctgacatattttaaaaactacatttttttaggttacttcaataacccacaggcaaccaagttgactatagataagaaaggttgggtacatactggtgatcttggatattttgatgaagatggacatctttatgttgttgaccgtataaaagagctcatcaaatataaaggatttcaggtaaaaattcaccttttcttttttcaacactataagccagctttagtctatagaatcctttcaactatacgaattagtttcgagagtgcttgttcctccaataagtgattcgtcgaaaagactaccaacattttcctcgaatacaatggaacaaatctttcactctacctcctattaacaccatagaatattactacgaattatgatctttgctcagaatttgagcaaatatatcatgtcaattgcttaactatactttgcattagaggatttttcggtgtttttgttgatatcgtactgttattagtgtaattaagtattttaatttaatatttattatgaaaaattattagtcattcgtaaaatgctaccttatggcagtgttaggcaccactgacagtgttaggcaccactgagcataatagcaatgctctttttaggtatgagcaatcctattaggcacttgcagccgtacctaacactattacgagatgtagcacattgtgaatggtcattgatattttataataattattaaattaaaatatgtaagattggatatctaattacactaatagagttttcagagttttagacccttttagcatttctcatttaggtacatgtacacagagataagacaaagttatcctattcaaatgagtagactttaactgttgatttattattttaaacctcttgacattttcaaaattgcaccttgactaaatcttttgtgtcatatcatattatttaataaaaaacttatacattcacaactgtaacttgactaaggttgctcctgctgagcttgaaggattgcttgtttctcaccctgaaatactcgatgctgttgtgataccgtgagtcttgtaaactcgaaacagctctgttaccatcttatctcgactttctgaatttatgtcattcttaaccgatttctcgattctaaacagatttcctgacgctgaagcgggtgaagtcccagttgcttatgttgtgcgctctcccaacagttcattaaccgaaaatgatgtgaagaaatttatcgcgggccaggtaacaagaatgaagtaatttgtgaaaacttcaaagttcttgatagtttcttttccagtagttttatgctcttactcaatgccttcattgttttgtttctgtcataggttgcatctttcaaaagattgagaaaagtaacatttataaacagtgtcccgaaatctgcttcggggaaaatcctcagaagagaactcattcagaaagtacgctccaacatgtgatagatactatcattgatataagaaactatctctaaagagatccaactgttaaaaaataaagttagtttagaattttatggtatatttttcattacaaagtatctcagagaggcatactagtttcctgcctatgtagaagaaagtagcaaacaaagacatggttttagaattattatttttttttttaaatttagtgatttgattccttactacaaaaaaatcccaaatgttttagaaactattgttgatattgtattataaactatatatgaatggttcctaaataaaaactatatgtgaaaaaatcttgtattatgaagtataatcttgtattatatgtgacattatctcatattagatttaattagtcttctccacctaatttaatcattacttaggatttgcaatattcaaagtcacattatccacactttaaaagataattaattttaaattagattatactaataataattaataattatagtaatgataatttactattttaaatataatttaattagttccttcaacactattttaaaaattaatgcaatattttaaagcactttatgtttgtacgagaattttcgcaacaaaaaaattgtaatatttagtataatttatatttatcttcagagatccaatttttttttaaaaaatgttcaatgattagcccattcatataccgaaacattaaaattacgatcaatataaaaaagtcatgatgtttcaaaagaacactagacaataaaacattatgatacacaaaattatctgacaaaactaaaatagaagacaaagaaactttgactagaagtccaaacaaacagtactattttaatgaaaaaataaattacacttttttttttgcatactcttggaattatctcatactagttttctatttactcaacaaaaaagaaccttagaattattattatttagaataaacttggaaattatttttgaagtcatggcaagagatttgttcgatttgatttttacttaactagattaaaagatatcttctcaaaaaaaaaatttatgtttgacattaaaagaccactatcatgcttcggggtggccaaagttggtaggaaagtgtaatccaagttgcaactcatacgactttgattggtaagtacagtctcatctagggcggcaaaatagatcagacataataacctttagtcatttggggttgacatgacacgaacatgaacacaacccatgagcacgaattgccggctcatcaaaaatattttggggatgaactagatgtcatctccacttccaacaaaaacttagattctggtattgtaaataaaaacttacattattacattaaaaaacattataagaaaaaaaaagaagctcaactgagaaggaaagaacttgcaaggtcttcaaaaagaaagaggtagaaaaataaaattatgaggcatataacataatataactaagattgactaatttaatatatcatagccaacaaaaaacaattcacaatcaccattccaatttcatgttcaacatctttagcatatgtacacctaaaaagatacagtactataattttattatctattctgttttgagttttcatattatttcacaagctttctgacttatcaccaaccgtatcgccatttgtaatagagcttaaggacgtttcagactcatcaccaaccatatagcgattcgtagtagaacttaagcctgataagtgaagctgttttcgcctttttacaaggtttgatgcggtacgcatgtcctcttgaacctcctcgcaatcaggctgcagcataaggaactttcgagttaaagctcagaaccttttcaaattggaagatgcatctcttgtgatgaactctatacatttaaaagatataaaagtgaactttgagaatgaatgaaatactaaaagcagtaccttgattgctaatgctttatcaaagctttgcatagccccatcaggttctccaaagttcaaatgcgctctgccaagggttatccatgcctgaaatatcaaatttcggatgtaaacaatgaatatcattgagatatgtctataacaggaatagttcagcacctgaacaagagaaggcatcgaaattgcatatagttacaaatatgcagtcatcttggatatcctattcgaaagactatctataatggataacaggctgaatcattgacctctattctcaataacaaacgaacaatactaaggtaaagccctggccaatgaagctctcccagagcaattaacatcgacacatttgatttgttatgctctgataataaatttacaggatgaaatgaagagtttccctgaaaagctactcaatcttactgactgaactatgctctaaatggttctttcgatagcgttgcttaggcgataatccttatagattcaatgagcacaacttcactagcgagataactaaatttgtaatttaaaggtgtaatgtacctcagcccatgaaggctccaattcagttgctcctgccaatttgcaacacacgtcttattaccataactttacagttgaagcacataagaaatatgtaacagaaaaactgcttttgaaatcgaaactaaacctccaccccgaaaaagaaaaagtaagcttgaaagaatatcaaaaagattaactcagaagtatctgttcaatgatgcccaatagag

SEQ ID NO: 186486 - DNA, 3068 bp, Cannabis indica
aataaataaatcaacagaacaagacagatgtttttactttttcatttttcctcaggtagcttctgtacttcattggaacataaccttcatataattttcgatggtgcttaagctgaaaaagaaaaaagtttaaggcaaacagcaactcatacagtgagaagaatataaaattagaattattccgaatctctttggagatataataaaaaaaaaaatacatgcacaaattgcatatccactctacggtaatgaccagtatatattacatcaaaatagatcggctgcagtcacagacgttcattatctaaacaatactactcaaccaaactaacaacattgtttctaacaaaaagaaacaggatgtaaattgaaactagaatagcattgggaaaaataaaacaggtatgacgaagcccaaaaaaataaaataaataatgaagttgttggctgttataaaataagaatgcactcaaaataacttctattccagcaattcattatcatccctggcatcaatactcataatgtggtcataagcatcccaagaaattcgtcagtgacatacctgctttacaacttgctttctaacatgcttatggtaatctggactacgaaacagttgatctgctaatgctcgaaactgcaacaagtcaaacaaataatttaaaactaaaccagcagaaaatgaaagagaaattgcaattggcctatcccatgggtaaaagaacaaaggcattgttttttttttgctagacataaacaaaggcatgcagttaatgtatctgggaaacaagaaagtataaactacaaagtgttattcctaagccaaacctggcaattcccatcaccctccatttgcagttcagctaaatcgtaggtggccaatctgcaagaaaggactactattattacttgaaaaaaaaatagaaatgaattattcttgggtttggtagaagttccaaatttgaatacattcacactggcttagggggattctcctctcaaactaattataagtgacataattttgctcatatctaaagtggattgtaatatttttttaaccaagtcagtgaatcttctagcattggcccccctcagaacatcaaatacaaatgcatgaacaaacaaaacatcgtggatatctcagtttttattttattttaataaaaatatttagtcagagttacatgtttcctccttcaaaagaatcctatgagcaacttggtcagataagtcccaataaaagatagtcactgctttgtaaatgatcgcattacatagacaacactcagcatggaaagcttcatgtaaaatgtgcaaatagatcaaataatataactgtcaaatgatagtaacctttctgatagccgctcatggtctaaggaagcatcattaacatcaggtatgtccccatttatccgaggagtatgctgcaagcacagtgatggatgagaacttaggtagctaatctacacaacttactcaatagtagaagaaatatagaaacgatttccccaagcatcttagatattgttaaatacagtagccagccaacagccaagtaagtaggaaattcatcctaatcgtcattgtaataaagtatgatcaacagacaagaaattataggatatactagataattcagattttaacaaacatatgtttggcatgtcactcggatttaagtgtggtgactttatcacggacaagagcataggcatgataattgtaaatgtcaaatcatccactttggtatcttattgaataaaatatggtgatattgttcctccattgatcaagaattttgatttttgaaaagtatcatgatcatccaataaatagaaccaggtaaaactgaatcctggttggtctaacaaatgcctggagatgtaacatcttaataacaaatattacgtcaaattttataatgcagatgccatttgaaggggtcaactgtcgaaagccatatactatgagggacaatatttctcatagagcatgctttgatagtggatacaaacactagtagcattttaacagcagtttgtaccacaatataacacatacatttatgtaatatcagcagattggcataaacataccaatcgaattcatccctggctgtttaaattgtgttctctaagttaccaaaaatagttccctaatggtttaactaggtgaaatgaagaaagagttaagttataactcttaattcttaaagcctctgattcttaacaaaactctctcccatgcagaattctcagttctgttcttgccaaacctttttcattatctttcatagaactcaagataacatatatggagcattttccaacaaactagatttaattgacttgttcaatatctttcacaataatcaatattgaattttaaaaattattgtcaatctttagacattccaaagaattggcctacatagatatcacaatttaacagtgatttatagttctcatcatgtttccctagtagtaaaactttattaatatttaattttatacaacaaaaatcatgcacatatcatatactgacttcattcaaataagtaaaacaaaattacggatataggaagggacatactggaatagaatctaaatgagaaagcctcttcccgagcctccgattatttttgagttgttcctcctccgctaagatacttgcaatggtttgatcatcctctgtatcgtgggaactgctatttaaactcgaggtggagctagcacttacattgctatagctttcactcatgctaactgatcaaagttatttgggtaaactacaaatataatctataaattctctttaaatccctgcaaaacaagttaaattgctatcacaaaacaaaatagccagcataacccaaaaatcacatcaataaaatcggaacaaacccatctaaaaagtggacgctaagcaggttttgatgaataactaccatacccattatatttggaacaattaaaaatacccatacgataaaatccaatcaaaacattacagaaagaaacgctgaatctagcacttgttctttttttctttcttctagt

SEQ ID NO: 186487 - DNA, 9665 bp, Cannabis indica
aaaaaataaaaatattttttaaggaaaaaacattttaaataaataatactgaaatttctaattttttatttagtttttaaaaatattttatatttatatttatattattaacaaacaatattaacttaagtttaaactacaattttttttataagtgataaaaatacaatttaaagttattaaaaattatttttatcaaatgcatataaatttatactataaaaaaaataattaaaaatatataaaaaaaaatcacataacatatttttatacacatatttgtgatcagggaccgacacacttatatacttgtggggcctatagcccacaataaaaaaattacattaaaaaattaaatatttttttatttgatattatagcacaaaacattaaaaaaaaaaacataaaaataaataaaataaataaagtaaacataaaaaaaaattaataacaattaagcccccacataataaaaattctgggtccgtcgcttagctcccattatccattctaccaaacaattattatccattctaccaaacaattaatttgtttctccttccacccttctcaatccatctttccttcccgtctaccaaacatagggttagactttgaagagaaaaaacaacacataagtatttatgcatattaactattttcaatgtggtccactctccatcatatacatatttactattacctatattaactattcatgcattcattcattcattcattcaaatagtggcagagagccattgtttcataccaccaagattcaaaataacaaaaacaaaggcaatcacacttatttaatacttattattattattattattattattattattattaggtaagtttatagtacaccatttaaaaggttgtttcaatagatgttttatctgtgtggatacccaaaaaaattttaagttcaattttttaataattttgtaaattataagtatttatgatgatttataaatttttaatatgatgatttataaatttttaaaaaattttaaataatttataatactaaaaataaaatttatataatttattttttgtacaagccaatatttttttaaaataactatttaaattttatttttgtcaatctaaattatttagaaataacaaaaaggattattatttattcctttatttaagcctccctattctttactgaagaaccaatggaattgagtggaaaacaaaaaaataaataaaaaaaatgggtaataacgtacgtaggtggtggtgagcgcagaagatgaggccaactgaaattcggacacgttacaacaacggtacaaagaaatagaattgactttgtgtgtgtgggattgccaaagcaacaagcaattgcagcaaaatcattttaaattactaaaataccccctaaaaggtctaaaccccgttttggacttttttaccaagttcaaactccctcctcctcccgctcttcctcctccttcttcttctccccaaccacaaccatagtcacgcgctcactcactccttctctctctttcgttttcatctctgtttaagttagagaaacacaatctctctctctctccctctttttcctagttctatacagctctttggtccgccattgaagcgctctccctaaaacagagtaaggtcggctcccatttttggttttttttttttttattttattgccggtcgtagatcgacgctgagcagtggattctaatggaaacttcgacgttttcgagtttcgctacatagatctgcaatgctgttaattttaatgtttattctgtttcttcttcttcttttttggtctgttagtaatgaataaaatttagattgaaatttttgttctgattttgaaattgttgcgtttaaaggcgcattccggtctgttttttcatattaatttatatatatatacatatatgtagattttatttttgggtgaaagtttatggtagccgacttttcagaaataaaaagaacatgtttttttttcctcctttatttgtgattttaggtgttttgttattgcattttttttcctaaaaaattaatcaaagttatgttagtatttctcctaattttttttttttttcttattttttcaatcaattggtgttcatatttttctaggtagcttctagatcattacaatgtttacactattacttgattttattaagctaacaagcgttgtgcaatgcaaagtgtaaaagctaaaatgagctcactaaaatttaaccttcaagttttgaagatgagtttttaacattttagtttatgggttaaacgaaaatttaggagtatgtccccttctcagttttttttttcctattcattgcaaatgaaaatcgagtataatattatgaagacataaatattgggttattacataagcctcttttctttgctacattcagattttacactgttttgacaaagaaacgttattaacagtgcaggtccaatgaaaaggaattgagttttaaaaaattcatgatttgctctcggcaagggcatgcaactatgagtgacgaaaacacaaatgttgcaaattttgaagagcttggtgttcgggttacacgagcgcgggctagagccttgggaacatctggtggggtgctctcacaattgaaaccttcacaagaccagaggcgtgctcttagagcaaagtctaaaagagagaatctggatgagaacaaaccttcaacggttgcccctgctagcttcaagcataaaagaagagctgtacttaaggatgctaccaacatttcttgtgaaaatcccaatttcaacaatgtcaacaatgcatctagcgttaaggtatatatatgtgtgtgatgtgatcatgtagtagttcacaaatgtgaatatcttttcactcggtttctaatggtattgcattgctccttgacagactagaaatgtagatgagaaaaatgacaagttggctgcaaatgactctggagacttgctgcctgttcatgaggatgcaaaaacaaagttagctgaggaactatccaaaataaaggtggcagagtcggaagatttcactaagcaagtaaagttggagaaagatgagcaaggtcccaacttcaaacaattcggtgttctcaaaaaatgtgcaagtaaagatgagaaagatgatgctcttcgattctcccaaagagaaaaaggtcattaattgttctgttactgttctacatacataatagtacgtgtcttggtttgtcaataaacttgttgaattggtggttttaagtaagtcggtagtatatagttaatcaattacttgttcttgtgtttgtaatatgatgttgtatcgacttgatatgtaatgttagagcttggagttcttttaccttttgcaactatgggttgattgttaacagtttttttctggtaatgtgcagaagaagatgaggttttggagataacacctgcttcaaaagaatcagacattgttgacattgactcagacgtaaaggatcctcaagcttgtagcttgtatgctccctatatagatgataccagacgcattacagaggtttgttatgatgccatttgtttaggaaatgagggttaggatacttgctgtgacattttattttttctgatttgagttttcaaagttattcacttgcaactgatgtccttgcattagttttccattttatgtcaatatttgaaatgaaatgatgctttttcacaaaaaggaactgccaacacttcctttaaccaatcatcaagaagaaaaattatgattacatttcattttaggactcctgattgaattgaattgaatacccttttcctcctcagctagagcgaaggccatctgttaattacatggaggagttgcagaaggatatcactccaaatatgcgagcaattttgattgattggcttgtcgaggtcagtatctttttttacctgcaaaatttaaattggtattaccacatcaaggcagtttgagctaataaaatatagctcatttttcaggtttctgaagagtataacctggttccggatactcttttcctcacaataaatctgatcgatcggtttctctctcacaattatattgaaaaacagagactgcagctacttggtgtttcttgcatgatgattgcatcgtaagttctgtaatatgtcactaccatatgggaatgtgcatttttctctatttttttttacgaattatcaaaacctctaatctttttcaagtcttttgggttcagattatagttttattatgaaatatctgtaactttatattatattctcattttggtcaagtgaatgggatgacatttggtagaaacaagaacctttatttgctgcccatgtggttatttattatgttatatttttaaaattaacaggttgagttttcaatttcaaacattttgatcgcatttagtagtagtacttcaacgccaatttttgtctttctaatgtttgcttctttttccaattatgacttgaagaaagtacgaagaaatctgtccgccacgagcagaagaattttgcctcatcacagaccacacttacacaagaagagaggtaatctgattgattctcattatcattaacaaagatttatataagatttgaaaataattttacaaattcataaagttgaaacatgtggacaactacagtgctttgttgattatctgaaaaacacatgctaattaaaaaaattcggaattttctttattttacccagaaaatatataaccaatcaatttttaatcttttatttttaaaaaattagtttacaaatatataaccaatcaatttttaatgtagctatgctaagatcctactgaaattcgcaggtattgaagatggagagtgaagttttgaacttattgcactttcaattatctgtaccaacgacaaaaacatttctaaggtagtgtattttgctgtcgtagagtgtacgtatatatatacgcatttcttgtcaaactaccacccaatgtgtaatgactgaactagttttgttttccaggagattcattcaagcagcacaatcttcgtacgaggtagtatattaatgagctagtttaaccgctaaaagattagtttcaatgtagaacaagttgtaattccacgtaaattaatctactctcttatgcaggttccttgtgttgaattggagtttatggcaaattacttagcggagttaactattgttgattacagcttcctaaagtttttaccttcgctcatagctgcttctgctgtgttcctcgctagatggacactcaatcagtcagaccacccatgggtacgctagcttcctttttcttttttcctttcaaaatacatatatagaaatgtatctgaaacatttccatgctcatttgcagaattctactttagagcactataccagttacaagacaccagagctgaaatatgcagttcttgctatggaagacttgcaactaaacaccagaggctgtcctcttaatgcaataagagaaaaatacagacaacatagggtaaggttgctattatatcaaaatgaagtgaatccagattagaactgtttgcaattgcatagtcaagtgttgcccaaaaacatatatcctatccttaatattgtgttgtattaattatgcagttcaattgtgtggcgactttgagttcaaaagaatcggtgggatcacttttttcaagttctgagaatgactgaagaacatatacactactgatttggaactgggtatggaacttggaaggtgatcatctagatctcctaaacgggaaaaaatcttaacttaattctaacgtaattgttgttccttttgtcgtattaacgtaatctttttaggtgcataacacattgaaaagacactaaactatataattggcttgtgccttgataattccttcaagcttagttgtacatgggaattttggtaccaactgagattttgtgtgcacacagttctgaggtgttggccacaggaatgtagctactactttaatatcattcttgtaccccagattattacaatagtaagtaacaaaagaaaaagaaaactgaaaacaatatcatttatttcttgtgtcaacatgatctatgttcatcgaaacccttgtacctaatagacacatggctcacacatgtcaaagagggtgcttattcatattcaactcacctccctgttttgtgttttatgggcttttgttttttatttgtacttagtagtggtccctaaacttttcgagtgtgttactgacctctttctggatttggattttaggaatgaaaaagaaaatgggtattctagatgttttgttttttctaatttggattcagaggagagaatctttttcttttaaaaaaaatgactggtaaatttaatttaagtttttaacatatatattttagtctgttctcacaaatatttttgaatatttgagctccaaataaaaccttataaatttcaacaccatgtaattgtatacatagatccatgtgtaggcagtttccccagtttctcttttcaactttatctgtcactctctttttactttccctaataagtgaaataaaaggtgttgagcatgtgttgggttttaaaattttaaatgattagaacatactcacattatacatgtatatatttacgatccactataaaagagtgtattaatgcatttcttcgtagttttaataattaaatagttagtatgtgttatagttatttaagatattttataaagttttagatatattaaaattatttacaatataaaaaataagaattaaatagtttatttacatacctataaaataaaagaagcatgaatgtaataaattgtttaaactttaattttttatgcattaaacctttttaaatttttcaaaaatttgtagaatgacttagataattatgttgtacactatcatataagaataattaagatcaaaactatctagatataaaaaaatacaaaaaagatgggtctaaggttacaccacaaaatttccctataattagttatgattcattaaaaatgatagaaaaattctacaatacacccttatctatttcgacattcgagagaatttttcagtttatttttttcatagttgtgtacattgtagttatttaagatatcttacaaaattttgagaaattcgaaaaaatttaacatgccaaaaaatagggttcaaacattatgttgcatgcacgactcttttatttgatatgcgtatgaaataaattgtttggacattactttctatattgtaaattattctgaatttctcgaaatttcacaagatgaataactataacgtacacgactatgaataaaaatagactaaagaattttcttagatgctgaaacagataagggtagaggtgtatgtcggtcggtttggttgagttatagcatatttttactaagccaatataaatatcggtttgcacgtatttaattgtaacccacctaaatcaaaaaaattagaaaaagtttaacctggccaaaaaatttggaggtttggtcggattaacccgtcccaactgatcttcacttagatttttatgttttttataattattatttttagtttctagtattcaaataattagatttaaaaaaataaaaatatattaataatatttcaaactaaaaaattctatagtataagcaaagtagaccagggagactaataacagatgtacaataaccatcatgagaaaaacagaatacatgataaacaagacaagaatataaacgaaatgcgcgagacagtatgaatgttctcaacacgaggaagagatacgatctcaacatgcttgcttacaggcttattatccaaaacttcattgtggatgaccataacggaggtccaaacacatacatcgcgagaaatgcctcatcgatgctatgcgaggtgcgcaaatgaaatagtggttcagtgaaataactgttttagataagttgaaatagcggttttgagcatttaatatattttttctacatgtagtaaatcaaatgaaacatgggaattgtccacgtttcatgaacagttatgaaaataagaacgagaggaataatcgtcgccctctaagcattataaataggagaagagtttccttccaaaaggggaggaccaattttgagaatacaaaaatctttatgatcaatacttgtatgagactggcactctgtataaataaaaaaactcaaaaataagatagattcgtgaactatgaaaatttaactttaaaattacgtaaaacttctttgtctatttgcagtcattttctagttttatttaattgtcaaataaggttcatttactagttaacgtaaataatacaattaatgacagcctaataccagatttccaaaaagcaatgtcccaatacggagaaataaaagaaataaatggagaagttaccttatgctacagctgttggctacaattatgtgcctaatggtgtgctcaagaccaaatttaacacatagcattagttgattcagtatgtacatgtcgaatccggggaaagaccattagtttgtaataaaatggttgctgagatatttgattggaacaattgaaaaggggctggtttaaaagaaaaatgaagaatatgtgagcttggaaaggtatagtgactcaaattatgctggtgagaaggatacaaggagttctaccttagcctttcaattcagggtgtgtgggaactgtgttagtggcttactcgttttagatttaatctctttagttgtaggtttttttttaattgctaattattaatggccattcccccatttggtgaggatatatggaggtatgttagggagctaacagattctcagaaaagcatgctagatgattgatttaaatggaaggttagtatatctttgagctttgaatttcttttcaattatgttatgggtttaacttttaaatgctttgtttaggttaatttgaaaggtggacaaaaaataaaaggaagccatagctgatttgagtttgagatttttcaagatatggataatgatactctaattttgaaaaattcaggtttaatttataattcaacaaaacagaaagtcaatcaataacatttgtagaacatagagtctaaaatgatatttatccatttctaattcatattttagtggggtttaataggtatgtattgtagggtttggtttttgaccagtattgaactagaattttactagggtaacttgttaaggcaaaatcatagataaaaatagaacaggaatgataattgatcctttctttagagaatgttatggtgtggtggccaagaagaactccctattatttttaagtttatagctctttgatacatacacatctgccatttaatgacattttttttaagaacaaatatcacagtataaattaaaggagagacaaatcagccattacagcttcaaatgccataggaggaacactcccttcccattctgcagaatccttatgcaacaaggcatatttttttttaattggtagacattttgaaattagtaggtgaataatgattattatgtttgatatataatgtattttatattattttgtttggcatattactataattataattaattaatgaatctcaaaaaaaaaaaaa

SEQ ID NO: 186488 - DNA, 1341 bp, Cannabis indica
ttttcacatctgcaaatcaaagatcaactttgtaagaagccatagaggaagaaagaaacatcaattccctaatgttctagctaaatctattatatatttatgaagtattaagctttgctgggcttggaaagctttagcaaagcaaagaaagataaaagaaaaagcaccaaatgcaatatcaacaacacaaagattcttggattgttatatatggtgtatttagttattattgtgtgtgacttgtaaagcgactttcatatacatccaaaccaaagccagtggttggccatttaccttatataattaagttcatgatacatgatgtttagccaatttgtgggcctttttcccttttgggtgtagtggtgggagaacctatctatgtaaggactgaaatcaatcacaccatgcaccatgcatttggaattgcaatgagagaaaagggtgtggggtttggggcctaccacacgcgtcaaggcctcagctaaaataagacaaaagattacccaaatcaaaacctcttttttgttatatatttattatatggtagagatggattaaggatgattaggttattgtctaacactttgcttactcaccctttcctggaaagaccagggaaccttcattcctttgtctttgcttggtgaaaatggaaataaaaattataaactattttgcattaaaaatacatatttttatatatacgtgtatagtgttatatgtatacaatgtttttgaattgtacctaaaatttagttacatgtagtcatcatcaatctatagtataattaaagctatttttcttgaacttatggtaagaatgacaaaattggctcacgaaaattaagaatgtatcatatcatttgatcagaaaatcaaatgatatgaaatttgatcacaaagtaaatttatatattccattgaatgtaatagaaagaaagcataaattgagcaatcacccaatcctagataataaaataaaactacgttatatattcttgtagagattgatgctccttcactattgaatagtggagtattgttctaatttttattttacaaataaactaagtattaaacttcatggaatcttttctttattgatgtacataattttaaaaatcaaccaatataagaaaaatatggtttcaaacctacgtacagatatttgattttggggtttagattgtagttttgccattattagctaaagtttttctttgctcttagtagaattttgcatgtaaccttcctatagcgcgtagtagaattttgctaaagtattagtaaaattacccactttaatgttaagtttttggagtatttttgtaaagttct

SEQ ID NO: 186489 - DNA, 2985 bp, Cannabis indica
aaaaaaaaaaaaaaaatcagccacactggtaaaatagtcgggttcacaccagaataagaggtttttataaaagtaagacattatttttataatattagtactcaaatattaacatagagttataataataggaaataagataagataagatatatattcttttcaatattgaaatttcttacttttccaatgaggaatacagggatggcattacagaatatcgtttttctcaaacccaaaataaggaattctgtgtgaaggcagttaggaccccatggtcatggatttgagatgagaacccctcaagacaactaaggtagctcaattattattaccccatcgatcatagtacccttctatgccctccaaatgcccatatctgcaagcgcgtagattgaaacaaaaaccaattaacgaaaatatgttaccttcttcaattgcaaaataaaatcacaatacatgacaacatagcagaatgacaaaaacagagaataattaatagactttattgataatattttctcagattttactaagataatataataatgcactcaatacgtaattgtgtactcttcagaagaaaacgacaaaatatgcagaaattaacttcatttccagaatgatctagtgcactgtgaaccgatttccacatcaaatcgtgtcaccataaccaaaagtttcagctccactcaggggtagttctattaattaatactattaataatctacctagctttacgaattatcacgtccagacatactaacctttagattcgtatcccaacttcctgtacacaaggcactcccatcagctgacaaacccaagcagctaattctgccctcgtgtgagttctggagagatcctaagttcaaaaccacctaccacaaagtgaaagataaatcaatccattaacaatgatataggacatcaatcacagcatgaacacaaagaatagcagaatgagtaggaatgtctatacagaatttacaagcatttttatgacttgaacactgctaatgctttccctttttcctgaaaaagggtgaagacattttcccatgtaaggtttgtttaggatgcttgcgcccataatggcattgattattgtaaaaatactattccaaaggttgtctttcatttgaatgaaaaacatttggaaatgacatcaaattggcctctggataacgtaggagaaagagcgacctaaaatgactctcccaatcgccataacaaacatcaaaaattttgaaaattttgagcacaattctcaatgtcaacctgaaatgacccccttccttaacctacctcaatattagaaaactagaaaactttactgattcctaggcatgttcttaatagggatttgaacctcacaccttctgtactaaagaaagataaacagataagatcgttgtgagaaacaagtggaaaatacctcagccaataaagtatcccatacatagcaatcaccatttgtgtatccaacaaagagaagccttcctgacgtggagaatgcaattgaagtcacatgtgggttatcattatcaccgtgccgctggtggtatacttgaagttgatgtcctgttctaatatcaaataacctgcaggttccatcatctgagccagttccaaatctattgccatctggaaagaattttacagaattaacatctccctcgtggccatgaaatgtccgcactgctcgactagcaacacgagtgtcccataatcgtgctgttgtatcacatgaaccagatacaaacattcttgggttggatccattaatggagacactgaaagaacgcaaagcaatcttatagtaaagatcttttaattttcgtcatctcttagtcataataagttgaaagtgcaatgctcctattaataactgaccactttgatagtcagtcaaccataaagataaacatagaaatagatggcattatggctatacatatatacaaatttatattccaagatacatgaatacagatagttataggcacaatactcaagtaatagatggagatttgccactgtgatgttagaaattttatgctcgaattatgtgtttatcattacaaatgtccatgcattttttaatacagcttgttaaaaagtttacacacatggaaccacttttgttcatgtttataattaaaaggtaactcatttcaacatcatttaaggcagatgtctgaacattcaaagcataataaatattttttttgtgtgaataatttgcataaaatgcacattttatgcacatcagcatgcatgactcccatcccacttatatataatacttttgtgtgttcacgtgggaaggcaagttagctaaatacctcagcacatctgcagtatgtccagattgaaattcacctccaaaaactgaagttctaaggcctgtagtaatgtcccacaagacacatgtctgatctccagaactcgtaattaagtgtgcatcctcctctggaacgtattggcaggaagaaacgtaacccttgtgcccactaagcatttttgccacaggaagattcccatctttatccgtttgtgaactaagattaaagatagagcaaacactgtcaagaccaccacatgcaacggactgaccagttggtgaaaaagcacaagtcatgacccacgcacaaggtaactttatagcatgggttttttggcttgttagtgcattccagacaattaatcttccatcctgagatgcactcacaattcggttcttttcaggagtccaatctaatgaatacacctgaaaatttctcagtaagaattgatgttatatagcacccattatttaggagaatatatagattaagaacacgtgaaatttctcactattggacaaaataatttagatagtaaaaaaaatgtctaaaatctaataccaaatcaacagtaaagaaaagctagaattgacaacaaataattagcattacagattgttcaggacagttcaaaaa

SEQ ID NO: 186490 - DNA, 2077 bp, Cannabis indica
tttgaaatttactatagtaaaaacaaaattaaaatttgaaagaaataaaacacaaactgcgattctccattctcttttctcatcgttcaagattactgacattatgtgttcactctttgctcctgacaatccgtggtattccaaaatgtactttcttcaaattcaaacttttgtgtgttcaaatttgaaaaatgtaattcttttggtgtctgtatctagctttgcttagtctacagcatttctacagttcttattatcatatgttgcattaactttttcttttccattttgggcagcctttggggaggatctgttattaatttaggaaccaagaagcacagggataagtactttgatggtattgacaatttggaatatgtaggctgttttgctatgactgagctccatcatggtaagtcttctactactctttgagaaactttttctctgcatttttctaaacatgtcagtgtcaagaattgaatgtttatacttcattggcctggcatctctagtatcatttgttctgtttccttgagttggttaaattttaggtcaagcgcttgataaagaagatctaacctgtattggtatagctgaagtcgaaacttcatacaaatagtctcattagtcattaggaaatacactgcattcagaaagtatgcaacttgctataacacaatggcttgaaatgttatgacattgacaaagggagggttatcctgttgggcctgaagttagttcttttcatgtgcttgagtaggcacctacctaagtcctcaaaataaagtgacaattatagtaaagcagttataataatttgattatatttttaaggctaaaggttgaatagttgagaacagtttatggattactttgcttttgtttttaatttgttaggtcatttatgatgttgcttcagattttcttccttttgtatgttatatttctcctgtgtcttgcacactgttgttaagcataaaacttgatgccgagaatttgaaatagaatgcccaaattccacgaaattgtgcgccaataataagaactaaataatctgcattcatgctagaaataacacccttttctttcctatggcatggataaaaggttcaaatgttcaaggcctccaaacaacagcaacatttgatccaataacagatgaatttataattaacaccccaaatgatggggccatcaaatggtggattggtaatgctgctgttcatggaaagtttgcttctgtttttgctaagctgttgttgccaactcacgattcgaaaggagttgctgatatgggtgtccatgccttcattgtgccaataagggatttgaagacccaccaaactcttccaggcattgaaatacatgattgtggtcacaaggttggtcttaatggtgtagataatggagcactgagattccgctcagtcaggatacctcgtgacaatcttcttaaccgttttggagatgtctctagggatggtaaatacacaagtagcctccccacgataaacagaagatttgctgcaacattaggtgaacttgttggtggaagagttggtctggcatattcttcagtaagtgtcctcaagctttcctccacaattgcaatacggtattcattacttcggcagcagtttggtcctcccaagcagcctgaagtcagtatacttgattatcaatctcaccagcataagcttatgccaatgctcgcttcgacttatgcattccatttctcaacagtatatttagtggaaaagtatgccgagatgaaaaagtcccatgatgaacaattgattgctgatgttcatgcactttcagcaggcctcaaggcttatgtgacatcatacacggcaaagtcattgagcgttgtagggaagcttgtggaggccatgggtatgctgctgttaatcgctttggtatgctgaggaatgatcatgcattttccagcagtttgaagggggacaaatcaagtgctaactcaaacaggtttgctaactgtttttttctatatcattcttctaatttttgctgtataaatgcgtgtctacaatgctcacactagagtagggaa

SEQ ID NO: 186491 - DNA, 2395 bp, Cannabis indica
aaaaaatatggaagtacaataataaacagatactcatacacacacattaagaaaaattattgaaaatatatattgagaaaaaatcattaatattttttaaaaaaaaaaatcattaatagaaattatggaattgctttagaactcaatggagaataacaaagtaaaccggaaaaaataataaattataataataaacagatatacaagcgtatataaattatatcattaccctagaaataaaatcagaaaccaatgctccagctgtacttccatcctctgagccacaaatgcgcactagtgtccagatagcataaacaatgtcattgtcaatgtgccaccgtccacctttcatcagatcttcagtgttcttctcacattgaaatgagtcctcagaaagtaacttcttgtgcagtgcttgtagactacaagaatataacagtgtaatagtgtataatgaaaagttgaatcatttaaattacagcaaacaattgctcattcttaacggtgaccctatattacttcccacctataacttcaagcttgttaacgaccgacggaagagacataaaaaggacaaactaccttgacaaaagtaaccttggcggaagttggcaagatctcttcaccaactaaattagagaaatagtatagcagaaaattcattagagaaaattttaaaatagcacctgaattaccccaaaggaaaaaactaataataaaaaaattcaacaacatcaatataacataccttcaacaagtgatcttttggagagtaattttggcttatttccttaagaaaccttctaaccttatcaaagatatctatttcaggaaacggttccaattcctgccaaaaaaataaaaacaacaaagattaaggagcatgattcttctgatgtacataagattgattgcaggaattatatatgtatcaaatagagctacactgatgtaatcatgaagagatggatcagaatccacagtcagctggaggagcagaggtaaaacttgagatgatttagctccagattgctctccattagctttagagggaatgcaacaagccaccaactttgatactaaaaactgtaacaaatggcataatcagatgagagcaaatgacaagttgggaggaggtcagtccatgaattgacctttgtctctttttcaaaaagaaaaatgagaccaaatgatgctagagaagaacagcagaaccaaaaaaaaacttattgaatggataggagatacttgcctgaagttgctcgcccaacacagttatcatttctttggatgggttatagttgattgtatttagcaatgcagatatgatgtgaaagcactgatcttgtaaggcatcacaaccaatgaattgcccaaccaaatttaaaagataactgcatgaacaatcatttcacaagaatcaaatatagcaatgagcatagtaggaaaattcaacttgacattaataaagaaaataacacaactgccgataaagttgaggctaaaatagcacatggattaatatgattaataagtaaaatcaaatcactaaacattagtaaaaaaagtttgagcatgcattttgctaaataaaaaatgaaaatattgtacactcacttgaaagtacttgacaaagcaactctgtgaccaagtatatcgataagcacctgaatgcctgccaatcgatggcatttatgcctataatgcactgcggcagtaattttatagtgcagctctagaataaactgcacaattaagaaagtaattcatttcacatacagcatttgctgcaagaactgaaagagagaagtgaactgagaaggatctcaaacaaacaatataaatgcattatcaccatgaaaactctatccccgcgaaaaatgttaatcttgtctataacaccagcgcgtgtaggataatcatccctgcacacggccaaaccaaacatttcaacagaatttatagatagatgagaaagaaatactaaaagagttaaaaataaataaataaataaaataaaatactgacatctccaggaaaccatcaacaatagttcgaattgctcgttccactatatccagagaaaagaatgggacagcaggttctgaagcacttgatgcaagggacaagatatggctgacgatggatacctgacaaagaagcagaaatgttgaaaaaaaatcaagagtaattttgacaacacctacttagttatgaagaacaattcctgacagatcaaagaagactgcattttgtagaccattagtcaggcatattatcagctggtttaagagagaaaacaaatcttttattccatgataatcaaactctgattacatcaaaacctgctttacagggattgtccacctcatataatatgataaataaattcaaa

SEQ ID NO: 186492 - DNA, 696 bp, Cannabis indica
ttatatttaatcctatatacccatttacaaccaatggtgtgttggtcaggggctaggggatgacaatccatgtttcatttgcctcgaaggcatctgtttctgtgtttacggccttaagccattttgagtttttgcaagcttgtttgaaggatctaagctctttaatgagacaagcatttagtattgctgctcgaagtgtaggagagattttgtgatatgacatgtcgttggtaatgggataagcagtagaggtgactgtcatgtcatagatgtagttttccaagtgagttggttttgtgatgtttcggccagatctggtgtttagaggttttgtgccggtgggagggatctcagttgtaggtattggttctgtggggttgattgttgctagttttatatgttggggatgtgaatcatggccgatataagtggcttgctcggggaaaacagatcaatattagtaaaaatagagaaagtaaattgtatatttgattgaattgaattgtatctatacaagtggtagctcgtttacatacacaaataaaggattaactaatttaactgaataactaacaataactaactttctataacactattttaactaacttaatacattgcatttcaaaaatatgataaatatatatatcaatgttatattaagtgtgattattataatagaaaatattgttcttt

SEQ ID NO: 186493 - DNA, 2696 bp, Cannabis indica
agagaaaaatgaaaacattaaggtgaaacgacatcatttggaggagtttcagcctttctgaacccaaaagtaaacctattttccgtgccattttctcagtccaacaagtcagttaatatctcaaaagcctaaaaaaatggagatgagcttggcctacgcaggctcaccttcgagctctctctgccccaaccatggcgtcttgcgaacccttttacccatttcaaccttggaaaaaagcttcggccccagtagtagctgtaacctcggcagtcttacaagtggtcatacagaaagaagaagaggcgctccggcgattagggccttgaaatcggcgccgtcttcaagacgaactctgtcgagtaattgggatattagtcaagattgcttttctgcaacttcagctccttcgtggatgcctagattggaagagctcgacaccactaacatgcttcttcgtcagagaattatcttcttgggttctcaggtgattagctgaattatgacttgaattatttttggtttgtttgtgcggtgaagaaatgaactatgcgagatgagttttagccacttgttgttaattgtataggcctcggtatcaattttttgattttaatgtatgacatgaaaaattttcaatctttatcaatgatttgagtaactgctatggttagaaaatgagttctttttttccctagttatcagatatttaaggtaatttagtgcaattttaatttttattattaggccttgctgaactctacattcgattttgtataatttgaatgttaaattgacccttggtcacgagtactcgacctaaactttcatatgcaaatgcaagtatagtatattagttggaaattgggaattattatcttcataaattttttagccattttgcttattaatatgatttgcaggttgatgatgtgacagcagattttatcataagccaacttttgtttctggatgctgaagattctaccaaagatataacgttgtttatcaattctcctggtggttctgttactgctggtatgttttataacaagtcaattaactttggatatggtgatttgttttcttcacttgttgtggttatgccatgttggtgtacttggaaattacaatgcactcaatgattctgtttcgagttttattttcggaggtaacaacgcactcaatgaattgtgtgttaaaaaaacataaatatgtgaaaaagggaaatactttctcttctttgtcttcttgttttggttgattattgattagtagacacagcctaaagcacttgttcagacaccataagctcataaactacattgagaactcatcttgatatgtttgtaattagtctacattcaattcatttgggttaggattaaagacgtgtttcatgcagaacttataattgcttaaatgcatttcatgttaggaaggaattaaagtccagcattgtacattgaaacctttctgtggtgaatagttatatttttgtccaatagtattccttaaattatctttgttaaagtccccttcaatttcaaatggttggtaagtacagaacaaaaatctacatgcatatattttttctgaaaatggattcgtgaaagtgtgacttaatttaataagatttttgaccatgaatggactaatggagttccttagatggtcccttgggaatgaaatgataaatgtgatatgcatgggtaaagtaattgagtgtatatcattgtcaatctagtaatcttaaaagttttcttgatccattttgtttgttattcttcatccgtcatttctactgatgtgtaggaatggggatatatgatgcaatgaaactgtgcaaagcagatgtttcaactgtttgcctagggcttgcagcatcaatgggtgcatttctccttgcttctggtaccaaaggaaagaggttttgtatgcccaattctagagtgatgatccatcaaccacttggaacagctggaggcaaagtaagtagtggttttctgcctgttctttaagatttcagttaaggttctttgctttgtgattccattgttaattccgatatagtacggaaacattggtgtggaagaactgtggaagttagtataactttgcattccatttttaatatgagatataatgctacttcagtgctaggtcctcaaagaaaacagaaaaagataaagaattgtcagaggttgtaaacaataaactgcaatgcaagaagtgaaactattgaaaatatgccagcataaatttgggcatctatacatttgcatttgtcatggttagacttttgaattttgatgggtgtgaatttcatttgcatttgtcatgtcgatttcattgcattatttcatgaaccgctctcatcctgtctgagatttttactcggcttttaattttacatagctcaacggtttattagattgtttttgttacaatatgtgctatgcataaatttatgtgtagcttggtcacatacttgataatcagcaggacagttccaagcacatccactcaaggaattattttattttattttttggaagcacactcaaggaattattattattattacattaatcgttgaaaatagtatattttatattgtcgtgactttctattaataatttttttgcacaacgacatcggtctagaatccagaaaggatgttgagaattttcaacaag

SEQ ID NO: 186494 - DNA, 1984 bp, Cannabis indica
tttaggtactgaaatttctacctttgttgatttttctatgttttttcaggctaatcaaacttgtaccaactgtggggtcaacatgggggagtatttctgtgatatatgcaagttttatgatgatgatgtaattatacaatcccagcttcaactactaaaaaacattggaattgtgattattagccaagtttgtagctttagatttattgaaaaacttgttctgtaatattctgttctatgtttctttagcagtttattctttttatgagactgtttgaattatctgcttgcagactgataaggctcaatttcattgtgatgattgtggaatctgcaggtttgtatgctaagtttagaaaatttgttttctgtttctttttgctttggtttttttttttttttttgtcaaattgctaattcggtgttgtttgtggcatttgaaaacagagttggtggccgtgagaatttctttcactgcaaaaagtgtggtatgcaatttgtaccattaccactctactactactactactcaacctttaaaactcactataaggatgttgaaatgaaatcttaagcttcggtttattgcttttctactttttcatttttttattatatttctatcaacacaagaaagaaccctcttggcttggtaccctgctaaacatttgttttgcctgttcttgccatctcttttaagcatttcagcttagtagagcttgtctctttttaaagaggtattttgcaatttttcagggtcttgctattctattggtctgctcgataatcaccggtgcgtggagaattccatgaggcaccattgccccatatgctatgaggttttagttctgttatgatcatgtttactgtttctcttttctactttggaaagctcttctttccttacacaacgatattataaactgcagtatctttttgattccctgaaagacacaaccgtaatgaaatgtggccacacaatgcattgtgaatgttacagtgaattggtaaagcgcggaaagtaaggagcaagccatgaatttttcttcacatttgctttctcatgttacatcttcaaaagtgtaactgctttgtttctcgtttactaaaactgtttcggaaatacacagatactgttgccccatatgcttcaagtccatcgttgacatgaccaaaacttggaagagaatagatgaagaggtacacactgaattcgagctcttaacgttttagacaagttaccttaccttgcaatgtttggtgctaatttcttgtcatcaacagattgaagagaccatcatgcctgaagattatcgctctagaaaggtttatactttcaactttgctcatgagattgttctaacataaatttttctgatttggcataaaataaaaataaacctttctataaggagcacttacacaccttttctacataaattgtgagtattggtcaaaaagatgattccccaatagaaattgacctatttttcttgttactattcaggtttggatcttatgtaatgactgcaatgacactactgaagtttacttccacatagttggccagaaatgcagccactgcaaatcatataatacccgaacaatcgctcctccggttcttccacaatgatcttgctgattggattacctgtaaaatggaagggtgattttgaaggcattcttatcttttcaaacctcaacctcaacctcagctgaatctgtactattatttgcattgcattttatacaaacactattgaaaacattaattccctcaaacctggctcctttcttttttttttactcaatctttcttcctccaatttatggggtgaaaaacccaagtaaaagtatcttgggttgatgtaaacataatcatatacatgttgaaattaaaggggaaaaagttcttccctgctatggaccaaaggaaaaaaaaaagtaattgtgttgattggttcagccatttatctgagatttg

SEQ ID NO: 186495 - DNA, 1572 bp, Cannabis indica
atactgcgattgtctgaactgtttcagcacagtgcacctggggaattccttctgtggggccattgccttcagaagactttggttcttgatgctgtacgcccagtttatctgcattgctagtagaggttgttttaagctcactaagttttggatcatactcattttcatctttcctcccacattttttagggtaagcattcgtgacaccattttcaacattgaacttcttgaatgtctcaccattgttgacaatgacatccccaagatattcttcttgtgggagagcagaaatctcagcaaggctcaaattatcaagggctgcagtcgatttctccatcatatcagtggtttccaacgctgtgccgttaaagtgagcacctgttggacgttgttgtctcttcttaggttgagaatgaggagtcccatgcttacgctttcgcttcctatgcttcccggattgcaagcttaaaatggaagaaaaaacaataatttatataaaaggaatgttgacccttttagttttaacagcgcgcagcttattctggaaaataacagataatacctctcttcaaataactcaataacatcagaacatgactggagattctccaaaggctcccatgtgttagctgtctctggccaaccacgccttacaaagcaaagaacgttaagataacagtttagaattgatacataaatgtaaaagaacaagaaatgcaaagtttaagtaaaagggtcgacatacgcaccatttgatgagatactgaagctgaccctatagttttggttttggttttgcaaaacaaaggaaactacttttagggataatcaagaaagtaaagcaaacccacgaaagtactgaagagaaagggtaagagaaaaagaaccttgcggacccttttacggcgaatggcttctatttcatagaagccgtcgtcaagcttgggacgctcagtgttttcattagcatcatcattatcagcgtcatcttcgtcttcatcgtcgtcctcttcgttgttttcagcatcatgaacatctgggtggggctggggctgggcatcgtggagctttagatgggtatcttgttgttgaagagaaagagggaaaagagaagggtcgagctgagacgacaaggagccattgggtggtgggttagtgtcggaatctccgcctaaatttgtgtcacagctcccctttttcttccctcctcccttcactttcattcttcttcttttttctcttctctcctcaaaaatgtctaaaccccaaaacccacaaaccaaacacctgaaatcaaacgatgaaatgttgtgagggccttcattctctcttctcctcttttatctttatctcttcttctctctctacgcaaaaactaaaaatttaaactttataaaggtgctcccttttcaacttctgtcctttttgctcttttctcttttctcttcttttctcttgtcttctccttttctggatatatcaagataaatgaaaggaataaatcatatgcttcttattacatattaatttgctttgagagagttttttcttcttctgatcttttttttaatg

SEQ ID NO: 186496 - DNA, 2571 bp, Cannabis indica
catagaagccaggctctagtggatctaacaataatggaggtcagagaagattcaatcccaaccagaatcatggtagaggtcagcagcaaactggaggaaacactagaggtggaatctatagaggttgaggtcgtggagctagaggaaatgggtcaaaacccacttgtcaagtgtgtggaaaatatagccactctgtagcaatctgttacaacagatatgatgagagttatatgggatagcaacctaatactgatgggaatcaagacaagcagttctcagcacttatagccacaccagaaatgcttaatgatgattcatggtatgttgatagtggtgtgagtaaccacctgacctcagaccctaacaagatctaaactaaagctgaatatgaggatagtgagttgattataattggtgatggcagtcaactgccaatctctcacattggtgcaagttctcttcaaaccaatacctcaaaacctttgctgttgaataatatgctacatgttcccaatatttcaaaaaatcttattagtgtttcataacttacacctgataataatgtttgtatggaatttttctctggtttttattgtgtgaaggatcaaagcacagggaaggtggttctgcaatggactcttaaagatggcttgtatcaactaaaccctcttccacagtcacaacatatccattctcctttctttgctgttgccatgaacaaaccactagtagccttagctagtcatcattccctaaaagacatttggcatagatgtttaggacacccttctgtaaatgttttcaatcaagttctaaaaatgtcaaatgtaaagtttcctattaatgaagttcaacatttctgtgatgcttgtcagtatagtaaaatctcatgctctaccatttcaaaattctcaagccaaagctgctaacatacttgacttaatccatacaaatctatggggacctgctcccatagcttcacacactaacttcacatactacatccactttcttgatgatcatagcagatatacgtggctgtatttacttaagagtaaatatgatgcccttgttgcctttgttcaattcaagaacatggttgaaactcagtttggtaggaagattaaaaagttaagaagtgattcaggtggggagtaccaagcttcttatgacttggttgctcaaaatggcattctctttaattgctcatgttctaacacatcgactcaaaacggtcaagcagagcgtaaacatcgacatattatcgagacatgtctgacacttttagcacaggctgtaatgcctcaaaagtaatggtctaatgcatttcagactgccatgtacttaattaatcatctacctactcctatactcaatcaccaaactccctataagatcatacattcaaagaaatcagactacaagcagctaaaagtattcaagtcaacctattttccttgtttaaaaatctaccaaactcataaattttagtaccactccacaaaatgtgtgaacctaggatttagtgacgtgcataaaggctataaatgtcttagctctcatgggagaatctatatttctagacatgtcatatttaatgaaaaagaatacccatgccaacatggtttcttcaataattatcaaccagaaaaggaagtcattgtcacagctccacactcttgggtcaatcttcctttcaacacaatgccatctcagtctcctgcagaatcatcatctcagactccttcctcacaaaaccaggtacatttgcatcctgactatggctctcccatatctgttatgcctaatattgactcaaattcagatttgactccaatgcaatctcctagttttacttctgccagttctgcatctagtcaacacacactaaaccttgaagaacctgaaacagctcaagcttcagttgaagtaactgttgctaatcctcaaccaactcagcagcaacagccacaacatcccaagattactcgtggaaaagctgggatattcaagccacgaattctgctgtcaaaagttactgctacaggtgatctttgtgagcctcgcactgttcaagaggtacttagtcacaaggggtggaattcagcaatgagtactgagatggtagccctctagaagaacaaaacctggtacttagtacctccttcaccttactacaatgttgttggaaataagtgggtctataagattaagttgaatgcagatggatcagttcaatgactcaaagcttgccttgttgccaagggctttcatcagagacctggagtggattttaaagagacatttaatccagtaatcaaaccttcaacaattagagttatcttgactattgttgtagctaaaaattgggacataagacaacttgacataaacaatgtctttttaaatggcaccttggatgaagatgtctatatggtttagccttaaggttttgaagatcccaataagcctcattatgtatgcaagctacaaaagtctatctacgggttgaaataagctcatatggcctggtatgagcaactcaaaacaatgttgctgcagtggaacttt

SEQ ID NO: 186497 - DNA, 2616 bp, Cannabis indica
gagagagagagacagagagaaaagagtagaaaatcaaaccaagaagacttcatctccagttgcatatcttccagcatagttttttagcagaccctcaagtgctggacattcaaaaagaagtcaaattaagccttgaaatcctgacaatcatattactatcattgctcgtaattggtacatgtttatattttccatgcagataaataaaagaaacaaaaccactttacatgacaatacacacatcaccgcatcctatactcaagaatgtagcctttcttttagtagacactaacctgcaaagccatttccaagatgatatttaacccaaggtgttatctcttctggaccgaatttttctttgatgtaactctacaaatagaaaagcagcaacactgatttatcattttaatataactttaataaaaaaataacttaactctcacaaacgagggataaataaagcaataacaaccagataactaaaacttaccagtagtaccagattttgaagaggctgtatgcttgctgaaacaatatttgcaacctacatttaaggttgaaaaggacaagatcagtccaaaacccacaaaaaaactgatagagtgacaaatgtaggtgcaagtgttatgagggaaaacaaaataaaggagccattaggcaagagtttatgcaaaacccaatgggaagtgagttataacaacctcaaaccaaaatcttccatcatttttgttttttctgtgaacaactaaggcaaactagttttatcaggtcatgtggcaattcattaatctacaaagactcagcttaataactttttctattaccttacttatgtaggcctatatagtgaagagaaaatattctacaaatgggggagttacatttcactttaccttccagcttgtagtttagaaagagcaactttgactccgttggcttgacatgacacttaacaatgtagggcatgtatggaaaattagtttaaactcaacagtatgaaaatggaaaagaaaaaaaatatatagaaataaataaatcttttaagtaattaattaataaagtttctcttctttttctatttttattaaactaaagctgattagtgattcggcgaatagagacttattaaattgtaaagaatcatgataaggatactcataaggaatagttaaaattacctgcaaattaatagcttttcttttgagatcagttggcaagagcgggtgttgagggtacttctcatccaaatactaaacaaatttcaacaagagagaaaaaattagtttgttattcatgaagaacagtagaattctaaaactgtgtcagatacaggcacacaacacacagcagcagcagtcgagcaactcaccaataagatagcaaaagaatcagacaaaactatgtccccatccaccagcacgggcacgtacccgatcgggttgagcttcaaaaactctatgggaaaacaaacacaacccaattcctaaattagaaccttttttattaaacatgaatttcagttaataaatggattgaatgaaagttgttgaatacaatgaaaaaacgagacctggatttcgttgctctcctttcacaaggttaactgcttcgtagtcgtagtctagccctggaattcaatacataattgttcagtttgggcatttcaaattttcattcaagagagaaatgaaagaggattgaatggtacctttcaaattgagggcgatcctaacccggaaggagcaagaactcctccagtaggaatagagcttgagcttgggttggtcatccccggttgcagtggcctaaaattacacatataataaaataaataaataatgattccaattttgttctgtgagagcagaattagggatttaccataagggatagggatgaagaacaagtgaggagtgagtgttgattaagtcggaagtcggaggagattgatggattaaacgatgcagttaaatttatgtttttgtcgttgggtttcgctactcagtagtgaaatctaggtgcaaatataagtatcacctccatataaatttaatttaataacattatatatagaataattctctagtagcgacattgactttatttcatagtataaagacatctaacatttttcattttcgaacataaacttgtgcttatacaaagtaaataagtttacaaagaaagtactcattatttaattttagatttaacttagcaattttatgagcttaacgcattagactctttatgaatgtagactatagttaggttagcactgaacaataacaagtttttaacacaaattaaaatgtcatttagaagactactattccaattataagaaacaagtttatcgacaataattttacaagtagttttgaaaacatccacagggaggtggagcagttgagcccattagatggcttgaagaatgaccttaacttttgtcacagcaagaggaacacatccaacaaagggtttggagaaccctgctttaacctgattgaattcatccataacaataactccaatattggttgttagcatatgctgaaactatttatcttgtacctcctaactcacaatggattgacatttctgaagatattcttg

SEQ ID NO: 186498 - DNA, 576 bp, Cannabis indica
taaaaaatagaaaaaaattgaataaatacaatttattgactaaattaacacaaattaaaaaattaattattatttcaaataataaaattttatcattttttttttggaattttcctcttttttttttcaaaaaaaatctactgccataaaaatctgctgctataggcaaaaatgacacgttgtttttcattaagagaggttgtataaaattggagaaaatgacatgttgtttgggtcttcttcaacctttagctggtcactttgacctgttcccttccacgtaggtcacagtggactcgacccaaatccgatcgaaaatgataattctgacgaccaaaataaacttaatcaatttcaaatgaatttaaatgtaaaaattaaggcattcatatagattttatgtatcgaaaacatgtgaagataagactttaatgttacaaaaaacttttgggtccgaaacactttttcaaaaaaaaagttcaaagtttttaaggctttcaaatcgttttcatatacaaaatcgatctataatattatatgaatgtattaatgcataaataaatcaaaataaataat

SEQ ID NO: 186499 - DNA, 2036 bp, Cannabis indica
ccaatggaattttattgcttatagtctttcaattattcaccatggttagagtgattcaacaactagtaaactttcctcagctctcaataaaagtaccaaaatatttaccgaaatttttagaaactaattaattaaagcttaaagaaaatataaaacgataaataatagacaagtacttttttatgtagttcgagcgttaataatcttgagtcaacaagttcgttgtattatccttatcagcgagtggttaactattacaagtgtttatagtatgaatattaactatgtattccttttgtttgtcttagagaagaagaaagctcagacgaatttttcggcagaggttctgtaagtaaaaaatcgttcaccatttctacatgaaaaatagggatatttataggcacatgtgtgggttagggcataccttccaccctccttgggtttcatactcagcatgttctaatggctggtatttacaacaaggcaatatgactgttgctaggtagggagcctcctgatcgtgtggtgttcggttgctgtaatccaatttcagggactaaagacacgtatttcctaaaaggtttcaccttgcaaagttggtgtctagataatttattagacaaaaaggagctacagagcacatacgcgcactaccaaggtctggtgcaatggacaaaatttgatttggtatcagaaggtatgcacctgtcgcagtcagctctagataggacacacccaaataggttctaggaacatctggctaaggctctcttagaccagacaaagcagcttccatcttggagcactcataccttctgatccttcttcatagtagtttcattaatgagaatccctgagtcctttctgcctttactatcaggaagagcctccgggtagcttccagtatataacaccttccgtgacgccgaggggcagagggtatatactaaccatgcataatctaacgttgcacccttccatgattgccaagtacacttcatctgggtgctttaaaaaataaaaatagttttttagttatgaaactaaacacctcctaacactaaataaaaaatgggcgctctagtgtcacttttcaacattagttctctcttggaactaacacttttgagtttcccttagtatttgtatctgtggaaattagattctatgatattatcaacaacgactgtcactatatatagttggtttttttttggtgatattgagttcacttaatttttataattttaccggaagatgtctgtgttagtgtgtaaccaatgctgataaagcaataatattggttatgtcttatattagaggtggtgattctcttacagaaattagacgtatacacttaatttttttcttatttacaatcattcatcatttgtctttctgttcgtgaaaccagagcaaacgaaaaacattttaaattttacattcgacccaacattttttcttcactgtattttcttcgcattattggtttataagttttttctcttgtattttctattcagtaacattatacatatttttcttttttatataatgtatatcaattgactattgaattaatatatacataaatataggtttaaatttgttatttttttgttggattggttacacttaatatttttatttatatatatattcaataacatggttcaaaattatgtatataaactaaaatgaaaattaatcaattatatgcatttggattttagttagtaccattcttataatatcatttcgtatagtaaatttaaatggatagagatagagttttattgaattgattatcactaatatataggaaaagtgtaaaaaaattcctagaagtgtaaaaaaattcctagagtaattttttttgaaagaagtattaaaaacctaaattttgtattctatccttctatgaaatatggaaagcaaaaaaataaataaataaacttcctacaataaaggaacacttgtttaggaatgagatagaaaagagttataagttttggttctttaatgaataaaaaaaa

SEQ ID NO: 186500 - DNA, 3513 bp, Cannabis indica
aagaaatatataactgattaaatacatgtcagcagataaaagcagatattgtgtaaaaaaaaaagattaaaacacagatattgtgttcaaatatataactgattaaatatatgtcagcagataaaagcagatcgttcactaattatttctacctaatgttaacaacattctgtattacaaataggttgagttcagtcaccaccagttccattctcttcatcattttcatcttgtttgctttcactaccttcatttttatccgataacggttcttccaactttcttttctttttcacatccttagtttgtgatgttcctttctttttctcagcgttcttctttctaaactctggaaaagagccagaaaaacaagattagtaaatctccaagtaattaaacaagacaaaaacattcaaaaatcagtcaattggtgtgcactattgtgaatgatcattggctaagggataaagccttagcaataggttgagtgatattccttggaaaatcagattttgggaactggtagttgcaaaagtggtcaaggaactagaccgggttgaaacggctttttctttttcaatgaggaaacccgactcttacttaatgggcactttccttatagcccccaaagtcggttactgtgatgtttagaacgaaataagagaaaacttttgtaggacagaggatatttattaggtggagatcacttagttcgctcgggagcggtgtgtaggccaaaagcaacaaatgtgaaatgtggacttggaattggcaaaaaaaaatacacagcactcctaatgaaattgttatggtgatttcctaatgaatacaattcactagggcgcaaagttgtaaagagaaaataaggtttgacaaaaaaaccagtgagcttcaaagaggggagaagccatttcagctagatgccattagaaagagaaaaggtaagattttggaagggtatatggatagcaaaggcattttcctaagtcaaacaggtgaccccaatttttttcttttgaaagatgacaaagatatgggagaaaggtgatattcaaaataaggatattcatttcattagacatttaaatgataatttccaattttgatagactttattgtctagagcggagaagagatgattttgcagcctaataaaagatagaagggtatgaatgggtgataatactaaaatgttttcgtgactatattcaggtgtcctctctttacaaacatcttatggaattgcccagttccgtcaaaagcaagttttcagttggctggtagcttttggacacttcaacttatattcaggttggtgtgtattgtgcaaacaaaatctaaaggccaggagatcatagatcacctcgctatacaccgtaacttaaagttttctgtacagttgtggtttaagttacttagtttaatttggaatggtgacaggtttttgaggttatgggaggtagtatgatatctgcaatggtgcttcatcaatcttaattattagtacttgttccattctactcttgcctctttgtaggatatgatctagaatgatttttaacttccctttatcatacccaaaatcaaacaagagaatgtaaaccagagattgcaacaaaacttaaagagcaacagagaaaaagattctaaaactaagacgagaaccaaatttaaaaaccaacacagggaaactgaagagaatattctagtagagaagttatcgacttgctagtctcctctagaaaatttgaaaaaagaaaaaaagttcatcctcaatgtcctttttccatcacttctgaaagaataaatctatatcctatacataaatttatgtgcataaaaatatcaaaggatgtttccttaacactttgttcatctgtgtttgcacagtatctcacttccttaaaaaactaaactagttcagtggtaaaagatgctaatatacaagtttaataaaatcttctttctccaacaaaaaaacaaagggtagacatttagtaatttttactgcacatcatgatgcagaagaaaaagaaatggtttgcataatcaaagcctatgaacaatgaaggagactaaaacatagaaattggttttaatcgaataagcactcattaatatagagaacagaaccaaaaaaaaagagtggttaaaacaacccacaacctccgaacaaacagaaggcaaaaaaaagaccataatgaagggactcgggaataggttaatgcacatacagacatacctaaatgcatactcaactcgagtaacttggccatataatttaaattcgtaactacatggagtcatctatatgcaatctgaaactcataacaataaactcacaaattctgctttaccactacaaaactacaaatatattaatcaaatcacctcaagatcaatcttggcttcatcaatatgttctcttgaattctcccaattttttttttacccttaattattttgcatcaattcatttttactttctgagaagcaagtaactctagcaaattgctatgtaggttttctcacataaccctggtggggaatattttactataacaaaatcatcatcttaccctctatttaatgattatgctataatacaacaaatgtaccattcattatcttattcctacttcattgaatcatatttctcatctctgctataccaggaattgaacccccaaaaaaaaaattaactttaccaatttattatgaacaaaatcacaagcaaaaaaagatagaagagataatgttctagaaaaattattcatactccttctaccatacaaatatagattgtcataatgatttcaacttcattatctaacagaccagaaaacccattaatataataaaaaaatatataatattgacgtatattgaaaaggactaaccaataagagaagaattgagagggtcgagaaactcagagaattcaatctcttccaatgctttcaatacatcatccccacttatagtctgcctctttgactccttgcatatatcatttgccctaaatcagaaccaaaaaaaaaaatcatatttagaaaatggaataatttaagtcaaaaaacgattaaatctttcttttccttaaaataaactgaaattacgtgaagaagaagagtacgttgcggaaaggtagtggatgaagatgcgagcgctttcggagaaagcaaggagagcatctttgtggacattaaagtcggtatcatcggcgcagtgagacaacttatccttcaccactcggcgcacgatagctttcggcagctcctccgtctccgccactgctttctccatctctctctctctctctcttctttctctctctagattctaacaaaattctcaagggactctcttctttggtttagcttcccgccatttctacggcttgggcctttaaagatccagtgcgcctcacacctcggctctatctttatagtttttacaaggattttgggttaaacttttcaattttaccgtcacacggcagaaattacattt

SEQ ID NO: 186501 - DNA, 2107 bp, Cannabis indica
acctcctcccaatgattctctcttccccaaagcaacgctaatttgacagcttacaactcagcagcaacagcactaattgcaacccatttatggtcctgacaaaccagttctggttgtcaaaatcagcagccaaaatagcaccgtcaaacttaccatctttgaaagaaccatcagccaggatcatttttggagcaaagggaggtttgttgctgtgagacaaagtgatgcctgttatgaggaagtctgaacattaagcatctcgagaaatccctttttaacttctgataatgcatgtttgttactatctatatatataaatatattataacaacaaatatgaaatgacgctgcaaaaaggaaaagaactaaaaagtacaatatgatgatgataacaaaaacacatctggatatctgattaaatggtacatctttaattgtaaactacctatatctgtccatacggtagatctctctccataaattgcatcgagaacatatatatatatatatatatagtacatggtaaattattattacgatataatagaattgtagctagctaggccacaacaacattgcgcgtagattggcaccatcggtcgtaaggaacctgaagattaggccaatcagaagcagagatggcgaagtcttgtatccaatttgtgaggatgacttcttgatccatcggtggcaagctccacagcgcttggtcgatcgctttctccacctccatcttctcgaagtaggtcaagacagggtaggcaaatccgttcccagcatggcaaaacaacggaagccacagaagaagcaatctgaacttcacttctgctgataccccaacctcttctcggtttaattcaccaaataacatggctggataatatatatgtataaaatatatgattagtacttaaatatataaacgtatctagatatgataaaaaaaagtcctaaagtcctaacgtatatataaacatttatatatatgagaaatattgtaagaaatatataattctaaataagtaatatattatttggtttaatttaatattaaattttaaatattttaatttaataaataatataataaaaaaaaaaaaaaacttaccgctcccaagcaccttaaagtaagtagcaatgctataatatacataactaatagggtgttttataattaatatcagtatcatataacataaaaatgtcgaccatcatcacatgcatgcaccacaaaatttctaattagcataattctcaagttaattaaatgttatagtacacatttttaaatgtcattactaccactacgatacttttagtaagcttatgcaaatctaatatggaaccagatgtttctaagtttactatattttatttttccatgttcgtgtactacaaccaatgagcaaaattatagtatccgaaaataattatatatgattaagattgaaactacgataaattaaagaaagagaaagtagtaactacctgatattttgacaacgaggccttgaagcctgggatcagtggtgagagaaatagaagccaatcctgaagcatagctccactgcaccagagcttcatccactgccccataagccctcagcttatggcttatccacaacagctcctccaccagcttctcagccaccacctctcctccttcctcttcctcccaaacaacccttcctccatctccaatgccaccaccaattcccgtcaaccgttttgtccccctcgagcggacccacgaacgcaccaccccaacacagatgctcattccattgatgtaaggcgccacgtaggaaccgaacggcagtgccctgaccgcgcgtgctgcccacgctccggatcccgagtactcatcgttttgtcgcggtggcgcttgtctagggagcggtggagaagggttgaggtgcgctcaaaggcggaggagagcgccattcggttgacctcgagcatttccgtgtgtcccgatgcagcgttgccgtccatcacacgctccgccatcgccatggcgaactggtacttccttgaggtggcggggatgtcgttgagcagggccaggatctgcgcatgaacaaagtgaccagtcagactaggacac

SEQ ID NO: 186502 - DNA, 6983 bp, Cannabis indica
gtaagcagagattagtagaactaactcgtttttctttgttttaaatctctggtctccaaaagcacgggatacagcaatatctccacaaattcttccattgacaatctttagacatcaaacataatttacagttagctttttctgtggtacataagcaccaaagacagatcacagtgatctcaacaggtttcttcaagaactacaagaaaaaagagaggctttgttgcaatgttcaatcaatgtttaatagagaaaaggaataataaataataagactgacaatacaataaataattcaagcatcaatgtcattttgaatatgatcaaactcatctccaaaatccttgcttaatgaaattatcacaacaatatctcttaccaacagtttttaactttggtttctataagagtgtcccacaattcgatgtatatatgatacacacttgtgcacaattcagttctcgaaagaaatatggaaagttagtttagtaataagagcaggagtagatacaaaatcccaaataatttgagaaacttggtatattccctgaataatagtttactctaaataatgtaaataaaattcaccaccttctcacaagactaactctcagaatttataggctagactgacaaataatcctaactagccaaccaaaaacagtcttaattattagacacaaacttaagaaacattgaacacatccactaaggacttgacatttcagcctccataattccaatgagatatactagtgagactaatattaaggcataacaatatacatctataactcattggcaattggttttaagtccatgaatctcaacaagatatcaaacctacactagagattacatcactcattacaacagtttccattaaagacataaataaagttgcaaagaaaattaagaacagaaaaacacacccatccacctgcttctctgatccgtttaatttcttgaagagagactttgttgcttccatatggtcgatgtggatcgcttaatacctctactttaccagaccgagatagaacctgtaacgatcaaagtcatctaaaatcaaatacaactcaccatacaaacacaattctttcacttgatctattagtatatggacagttagcattgtatacataccacacatgaatcaccaatgtgtgaaacgaacatcatatcatttcctactaatataacagtagctgttgagccagattcatcatcctctccattcaattcaagcctttacaaaaacacaccatctaatccttcaatccaataacatgaccaaaatacatacatacacaaaccatatatgttcagttccattaattgcttaccaattcaacaacttttgatcagctttttgaaaagcctcttgaagagcatcactaatggtgttgaaatgcttttcagtcaataaaagcccaccctgtaaagccgtacaacactctttgtaaagctcatccctgaaacaaatcaaccattattaaaatcaatcacagaaagacccaattccaattcaaattcaaacctaatcacttcacctgagaaatttaacagaggcggatccaccgtggccatcaaagacagcagcgaaagaaaacccatcaagcccatctgagcgtaaaacgacgtcgtcttccatctcctctcgcgggccctgcaaactggtcgaaccccatcttacgccggcgacgtcagccaacggagaagactgagcatcgatggctatggcgccggagcaagttctggttctgggtttcagagttggggggacactggttgttgatctggtggagttggacttgaaagaggggcagtcgaggaatttggtgaggaggaacctctgtaattgttggcttaacaaagccatggttaatggctgggtcgactgagtcggagacccgagtcggaacgagttggagattgggtgaatcagtgggggagtgagtgagtgaggaatgggttagtttggattttcaaagatgataagagagtgaagctctgcctctaactgatttaacggttgggattattgcaataaaattaaattatttcttaagctgtctccttaaaaaaatatatatataattaaaaaatacaaatggatagacacgtggcaggggaccattggtttgatttggacacgtggaattggaagaagcataaggtgacatggctttcgttttcttgtaagtaaaataagaaaggccactcactttttgatagtttctaactgtatagtacaatttcttatatttgctagtacaaaaactactatcaatatgggcatatttatagttgttaaaagtacttacattattttaaaatattattttttttattttcactctcatttaaataagatttaatatttttttttataaaaattacctcttataactccaaaaattatcgattatgatcctacatattatattttaaataataagttggtgtgataaagtaattattaaaaaaataataataataagtatatgtcacatggtagtgaccaaatataaacaatagtactcaccaagtaagtttgaaaatattaatcaactgtacatgtggcagagactactctacgagtaactctcgtaaaaaaaatatgagtcgtatcgtgcagtggcataaaaaaaatacaggatcgagtcatgtcgtactcaaattcgtgtcgtattttacttaaatcagtcaattttcttatacaggctcaaattcatactctacttttccacattttatttttacaattaatgatgtattttttataacttcaattatttttacataattttatcaacaatttttcacataaaactatataaaaaaaattattagaattattaaaacttaaatttttatcatccaaattattattattattattattaccaatttgttaaattaaaacgtaatcactctttgaaatgcttacgtgtcatacttttctagtttatcgtgtcgtacttaagtctatattttttatgtcatatcttgcttaagctcatattattcgtgcaatctcgtgtcaatttgtagtatcgagtcgtgtcgtacccaagcccatatatattaatgtctgttcgtgctcgtgctcgaacctttcgaactcgtgtcgattttgtgtcgtatcaaaaaatctgactcgtattaacaatactagtattgttactccaaacattacaggaaaggcatcccctcatgtctcgtcacatgtgtttcgtttgtgaaagtcttacaactaaattttctagatagatataaaaaactttagggagcatttagtataagatattcaaaataatttaattaattagaataataaaacaataaatatgattatttgaaaacttataactagatttcgttgtgtatagaaaaattaagttagattactgttaattgaattacattatttggttgagggcatgaatttgataaattattataacaagttacataaaaatattaatatagtaaatctatgtattaacattgaaagtaatttttgaagtttgaactcacttttttgaaatgatttatgattcataaaagattaatcagctttagccaaggcagttaggggcttgtggttggaagcctgtattttttattttttattttattattatttattttataagtgttgaatgcccaaagttgaggggatccacttagtgagagcttcaaatatatatattttctatagaaaaaaataataataataaatataaacatcactataataatttatagaagaattgatcaaaacaagtaatacagcttgtttgtttgtttagtattatttttcaaattttatcttcttatgttttttttttagtgaggcttggtatcctaaatattagtagtcttattccacttattgtgaagagattccatatactctttattttaagattatgttgaagattaaaacatacataaaaatgactaaagaacaaatatatataaccttttcttttattaaaagaaaataattacagggattgttgtgtctattggtgcctgtgtaaatagaagtattatctatggagtttctaatctaaaacaccaaatacaatacaaatcatacttaactagctattttcttacaaatcaaaacttgctttatagcatttctcataccaaatcgatattattttgacaaatttcccacttaaaacattatatttatcatcaagaaaaaaaaaaaagacaccaaacttgattggaaagattgataaaattatatttggttgtatagatctttcatgtattttgattgaaaaattagaggatacattgaagcactgtaagttcattggtgagatcatatcagccacaattcctgtttaaaaacctgtattgcaactcagcagaataattctaacaattaaaatataaaaaatgccgaaaaaattctcaacactcaaagattttacaccaaaagcataaaatctgtttaggtaaattcttctttcaaataagaaggtcctggcttataagggtctgattctgcataggcctctggtctgtaaaaaccagcatcgttcactcggttacttatcacatgaaggattgctttcctgtgacctccatacgaatcactgtcgttgacaacatactcggtggcctcggctgctatctcattaacaaaatcaaaccgattatcttctgataaaagtagcctttcgatatccattgtcaggagctttcctccttcctgtatcttcctaacttgctcctctagaaaaggtactctttccagattgtactgcaacttctcatctttctttgtctgaaaaacatagaatggtctttgaaatgagaagtgaaaactataatgattgttatacttaatctaccaagcctaatccatttatttgatataagtagtgtattttattgggtttctctccaactagtttttgccttctgtacccataaatctctatatatagacagaaaaatacacgatttgttggtcactcatttgtgtaagtttcctaattctaacactcatttcactaatgttcccaattctgatacaaataatattattaccaaaaaaaagcactaagcaattctaagtttcatgctccaaaagtgtacatttagctagctcaatacattatttggtcactaatttggttatacatacaagcaattaagtacaaagaacaccaaactacagttcttagtttcaagctccaactagtcttgaacacatccattaatcaacagataataattcccctcatattactaaaattcatactataaaatcatataaaaggtatagttgaattgagtttagtctaaagacaaaagaacacaatggactcatcacttgttataaagaattaattaattatgagcttgaagctaaactatactactctcaaatatatccaaacagaaaattaataaaaataggcttagtattaattcttgctataccaattttcttcgcctccatactcgtcgacctttattatcctttttcattacagatacaatctgaaatcgaaaacaaatagccatataaacaaactaaatcgaaaaacccctaattttgaaattcaaaaaaaaaaatacaaactttaatcacacctgtgttctgactgagaaattactcgaaggcattgaaaaattccccaccctgagctccgtcctctgcaacatttgaggagaaaacaaattcgaataactcaaaagtaatttctttaaaaaaaaaattaagggttttactttactcatactatttcgcattctgagaagaagatgaggaagaattacctgtgagagagtgaagggtagggttaaggaagccatagctgtgaaaagctggagctttttgtgtgagctactgaaacttgtagtactgtttaatcttgctctgttctttttttttttttttttggattgaaagggtttagtgtaattacgtaattgcccaagatgttttgagtaattacgtaattgccatcctttggtgacgtgttggaaacaaacagatgacggtcaatgatttaaggatggcgtatatcaaacggttaggaaattacatcgtcctagaaatatgcgaaaaataagtaaataaagttatgctttattcgttaattaattttttttttttttaaaaattgatatttaattatttcaaagagaaatgatttatcattaaaaagaaaagaaaaaagtttattattcttaatttaggttgtcgccttgtcggtttaaagagttcttgaatcttgagtaaaaatcatgaattttaaaaaaacataaaaatatatttggtatagtttggtagtttttttttttaattagtaagatgagaatattttttaaaaatatatttaataaaattgtttttatttttaaattttttaaacgagagtcaaaattttaaaaataaaaaaaaaaattcaatctaagctactgagactcgaaccacgatctcgatttagacttgaacctcatcccaatttaaataaaataaaaataaaagttatagaatacactcttgttttttatttttaaaattaaaaaaataaaagaaattataaaacacatttttatttttaaaaacataatttttactttattttgtgattaaaaaatttaaagataaaagtgttaccaaactctcacataatttataaaaaagagtgaaagaaagaggaatatataagacaatcttggggtgtttatcaaactggttataccgtacaaactgctcgtaccacaccacactgtataaaaaaatacaatttaaaatattttgtagtgcaatctatggtttagaatttaataatcgtagttcaaaccgcacgacataatatattacaaaaatactaatttttacaatataatatttttttcatgtataaaaaactcatacgattaaatttaagaaacatccaaataaactaaatctcattcttatttattattacttc

SEQ ID NO: 186503 - DNA, 2001 bp, Cannabis indica
aatatatatttataaaattttgagataagtaggtttgaatagttgaagtagcaagaccttgctaaaacacgtggtataacatatatacagaaatcgatcccaccaaataaataaacaaatcctcaaaattctactttattatgattttaaaagagaagtgtaacaatagaagaatagagagagttgtacaaaatacatataaggataataattaagctattaagatattaggaagaaaaaaaaaaagaaacaaatattattatgtgcccaacaaccacaaggtggtggtacacgtcagctttccggtggccggagttcgacttctctttgtcatcttcagttttccggtggccggagggatttgacctctcttacttgacaagtgggtggagtttagagagctttcggtggtttgacttgtccatagttgatgatttggtttggactttcatctcactggttgagtctttggctttgttatccatgctttgcttcttttttgtgttttgtggctgtaccctttgatcaggtataaacatatttatatgtatatattaatttgtatatgttttttattagcttataattgatgatatctgaattgggttaggcttgttttggagagttgaccaataaaattgaatcaaattagtccatgaaaattcttgatttttaatttgttataaagggtttttgtgtttgtgtgctgatcaaattattttactaatgtttgttcaagtctcttcaaaattggggaaagtataatattttatgatatgactaaaatgctacccaaaagttatgtaagtttaattctatttagatttatctggaattggagtagtttggttgaaaattgagaccatcttattattatcttgcttgattggcctgttaatcagtctttgacaaagctaattttgtttatctaaagcttaatacataataatcaacagttatcagctattgatggattgtgtcggttcattattaaatattggtgccatttattttatgtgtatatgccatttgtcttaagtgtacataataatatcatacattaaagttatagagcccaccatattgtaacttattgtgataatacagtaatgtgtgtccccagtgatagaaaggaacatttaaaacaactctttttgtttatcaatcatcattttctcacatcatatcaatagtcatattattttcttccccttttttgatcaatttttacaggttgttaaatatttgtttattgtaactggtttgtgtatttaatttttgttttagttatttgagtaagtagtttatgtgagttaattttaatttagttgttttagttatatttttgctaaattgtttaatgtaattaatttttgtgatttaatttataaattgttgttaaaaattattctacatatacatattaagtatttgattttttcgtatttgatttatctttttatcattttaggttatatatttgttcacttatttatttgattgtattacaaaattagtttctgtatgtaattattgtttttgttattttatgtgattggttctaagatttagtttttgatttgactaatctacataatttgtttctcagtgttaatatttttaattggttgataaatataattggtttctcagtctcagattttagggtccaatttcggcaacaaccctaacgtccagcactaatgacaatttcaatgtctaactccgaaaacttttcggtaacgacgataattccatacaataaactagaatacaaagcatgtgaaattcatatgagttttgatattcataattagtttctttattaataaactagttttgatatttgtttattattgctttaacaaaattatttttaactcgtttttcgttaaaaaattaatttttatggtatatattcttatttatgatgatttatctcatatttttaagtgttttttttttaaatgttatattttgaacaattaaatttatatacca

SEQ ID NO: 186504 - DNA, 1172 bp, Cannabis indica
ttcatgtcttcattttgtttgtttcctttttatttgtttttggatttatcatgcccaggtgagcgagctatccgttaatgttgttcgttttctcttgcattttcttggaaagtcaaatgaaaagcatatgaatttttgtttttaatattgttatccgtgaattattcagtgatggcgattgttttatatttctatattgtttagaactttcttttttgaaggatttttaagcatcttttcaatcatattttgaaattaccaaaattccttttaattcacttcttgtttttccaaaccaagttactagtccataatgtgtttttatattaaagttattcgtgtgtaaacttgcaattagataatatgtatctgtgagacctcacataatgaaactcaacacaactttattgtttgccattacggattttgtaaaacaaattgaaagtttgaagtacaatacctatggttaaattcctatgactcttatatcacatactgagttatagagagacattattttgatatctttacggatgtaacattttgctcattgtttacaaaatctgaatggtgactcttttttaaactgggaattgttttctgcatttttagcaataagtcttaactgtcatatgacatgtatgatgaaagttgcttctgaattctgatacattaaaatttgactatcaaacttagctagtcattttattctttactgatatcaacagagtgctgtttctaattttgtaggaattggctcagcaaagaagatctttggagagatattaccataataatttttaagttattgagggtggcagctgattgattaacgtgttagtgcttcgacacttgcatcaggtgaaatcgcacttgaatttttctggctaaagaaaattttcaaaattcagcgaccaggttcagggggtgacttgccccaaagtggcgagtacaacccttttcctgtagctagaagggcaaattcagcccatacaatgatcatgggtgaggatttggagggtggcaatctagggtcttaccaagacaagccaagaacatttcccagtatgcgtagcaaagcttacaccccatgggtagtgatcttacaacatttttgtttcacgtattcctactttgccagaaacttatatctatctttctttctttttttt

SEQ ID NO: 186505 - DNA, 2385 bp, Cannabis indica
ctctctctctctctcatgtgtgttcattattcatagcatttaggaataatgttgtagttgtttctacattgacattgttatctgtagagaatatggagaacagcttagttcattgttttcaagtataaattcaaaatatatcatatggataacagctcagtttcattattttcaagtcaaaattcaaaaaaggatacttttccttccaaagtcaacaaaataatgctttttgacagttgtctttctgccttggttaataatagaaactacttaaaccattgaacatgactcattgatatatcaaccatatgatggaagaaagtatttcaaatagatgcattggtcaccattaatactggtgtctgtttttgatgcatagataatacaattgtttagattgactgaattgtaaactgttctataacgagaaaatcaagttttatttcattgaaattaatgtacaaaacataggaatctatattggataacttgtacaattgggaaactagaattaagattaattatatacttaatatacaactaacacccccctcaagttggagcatagatattgatagtgtccaacttgttacatacataatcaaccataaccccattcaaagctttggttgaagaaatcctctagttcttcaatcttcacatgtttggtagaaatcaagcatttttgaattttctctcaaacaaaatgacaattaattccaatgtgcctaactcactcgtcaaacacaagattagatgcaatatgattaaagaattaaaaaaaatgtaatttgtattgacaacttctaattatttagtgatagattttctttagttgtgacaaaaagtaatattcaatgacaaaacatttattaacagaaaaatagaaactcaagagcgattatgtcaacttacttttcaggatattcaaagcaagggtcttttgaagtcttaaaaagatcagaagtgtgtgcaagacatccaactggacagtagcttccactagctgaagcaacttccattgcttgaacgtgttagacaatcatatgcttgcagttacaagatgaagaaaacagctgctgtatgccgcaaaattgcacgcaattgtataattgcctgggaaaagaatatgaagagaatgcacaaaactaggtccctcttgctcttagcaccaacatttgagagtaatgatattaatttatcaagggttaccgaaaaaatcactcagccttgtgtactaatccaactgcaaccaggtattttcttaaccgatttctctttcattttgttcctcaccagggaaacatccaaccaacggtctgtggcagcatagatatttgaaaggagaacataattaccagcattttgaggttcaagctcaatcaacctactggcaactaactcacctagctccatatcacaatgtagcttacaggccccaagtagagcaccccaagaggtagcactaggctccatgggcattgaacataaaagctcataagcttcttttaaccttcctgaacggctgagaagatcaaccatacaagcataatgatctcgtgaaggaacaatggagtactcattttccattaaacgaaataagtgcctaccctcctcgaccagcccagatcggccacaagctgtcaggataactgtaaaagccacctcatcaggaattaaaccttcatttagcatcatattgaaaagggaaatggcctgttccccacaaccatgtacagatagcccctgcatcaatgaacaatacgagattaagtctcgcttaggcatctgttcaaacaagttttttgctctctctatgttcccacatttagcgttcatgtcaacgagagctgcaagaacatgagctcgagcaagatcaattgaactttgagtgacataattatcaacccattttgccaactccaaacttccttcctgagaacaagctgacatcaagctcaccattataaactcatccggtttaacattacaagaatccatttcaagaaaaatgtccacggcctctctggcctgaccattctgagcatacccagatatcaatgccgaccacgcaactatatctctatttggagcttggtcaaacaaaacccttgcagaagccatatcacctgattttgcatacccatcaattaaagtggtaaaggaaaccacattcttctcaggcatctcttcaaaaatcctcctagcactacccaagtcacccaatttcacaaaccctccaattatggcattccaagaaggcacatttttcaacggcatctcatcaaacagcttctttgcctccaccaagtctccataaataacatacccaacaaccatagccgtccaagtaaccacatttctctcagacaaacaatcaaacag

SEQ ID NO: 186506 - DNA, 1573 bp, Cannabis indica
atcaatgtaaaactctttaacaaataaataaaagccaatatcttgaggtgatttatgtaatgttatcttaacaagttggttgtgcaactttttctggtcttcgaggattttactagagtgccttctacttcaaacaaattatggattacattagaatcattttcaacatatctaagaaataattctatgtattttatcgagttcgaattttgcctttgagaatctcgctatagtatcttttacttcgaatatgtcatgaagattagaatcattttcaacatgtctaagaattaattctatgttatttatcgagttcgagttcatatcaaaagcctcaattggcttcaacttttctcaatctttgaagatctcactagagtatcttctactttgaataagtcatgaactagattagaatcatttttcacatatttataagaatagattcattttttttcatcgagaataacataaagaagtaatattatattgaccaccatgacaaagaaaattgctcttatgtgttgcttcctccataataatcatgtgtgggcttggcccaatagaaggtgggacccaatatgggccaagcccataagaaggtaggacccaaaaaatagtagtttgggcgttgattgaatgaatgcattcacctaccaacctaccctttcaaatcatgtttgaggcttttccaaccgtgtgaccccttttattgaatgtatattcataaattctatggtttccttgagacaaatcctaagatttaaaatgaaaaaccataaaaaacaaaaaacaaaacaataagacataagaaaaaatagaatcaactaatggtggtcccatttatcatttcaacaaagacaaaataaataaatatatttatatatttgtattaaaaataagaaagaaaagaaaaaaaaatgttcaatttgtactactttagacgtgtaaatcaagaatgttcctagaaaaattgtcccactcctaacttctagaaacttggtttttgtgttaacttttctttttttatctttctgtaatttgcacaaaaaaatgaaaaaatttcaagtttgtcaactttgctcattgtaaagaagaaaaagttgttaccttggaattatatggatgcatatttttctctatctcaatcttttttttttttttatattttttttcccttagtaagaaaaaagtacacttgaaaaatggtccccttatatttttagtaagtcattgggataactattttgaaaaatatctttttaagtgtttctttaataagttcttgaataatttacggcataaataattaaatttaatttcctgttgtatataaatatttaagtttaatttttaatagcaataattcataagttataattttaaaacttttgtaagtacctagttgttaagtgttaaataaattaccacgtgataatccttaattaatataggtaattaatttttttttaaatatagtttaaatatcaataagaaaatgatacgtggataatcacttgacatttaacgaccaagtacctacggagttctagaagtataacttagacattat

SEQ ID NO: 186507 - DNA, 3136 bp, Cannabis indica
aaaagcaaggcccaatccactaagtgtatggccggccacttttgtaggtattttaaattgattttttcattattttaatgccatataattcaaatctaaccctagtggaatgctataaatagatagtgaaggcttcaggaaaattacacttttcttctgactttttctattcagaaaaactgagccttctctctccctatctttagctgaccactctctctcttcttccttagaatttcgaaatccttagtgatttgagtagtgcccacacacatcaagtgatacctcaatcatagtgaggaagatcgtgaagaaagatcatcagcaaaggagtttcagcatcaaagattcagagaaagagatccaggttcagatattgataatgctctgctacagaaaggaatcaagggctagatatctgaacggaaggagtcattatattccgctgcacccaatgtaaggtttcttaaactttatatgtgtttattttatcgttttagaaagttcatatttaggatgttaataaacatacttgtgagtagatctaagatcctggtaaaataatttccaacacacgtatattaggagaaattaggggcaacaattagaattataagtaatattataaatacttaaaaaaattaattaagtcgcacgaaaagcggctatgttgcctagtttgtaatatttgatcgttgtgtatttattttcatgatgttttgttttgtttagtttatgttatccttattataaatttttagctacattaaacatataaggataatattttatatattttatagagtacaaaactaaaataaaagatgatatttagtttatataaatttttctatctttttaaattaatattaaaattatcttactaattgaattggatgaaataaaaattaaaattagattggatatacagtcattataacaatttaaaaataaaaattaaaaaccgaccggttcattttatctatagcttgaaattgctggttctcatgcaatcagtgacaaaactgagccagagtcaatggccactctagctttctcatccgctctgttcttctcctctccatccaccaccaacaagtttcttcatccaacttactccattgtttcctcatctccacgcctctctcactcctctcctctatcttcttctcttaccattttccccacttttctctcaaagcctctatcaacaacttccagaagctttagtgtatgttccttaagtgtcaaggctagcgccgccgagaagaaaaaggtcctcatagtgaacaccaacagtggtgggcatgccgtaattgggttctacttcgcaaaagagcttctgggttctggccatgaggtcacaatactcacagttggtgatgaaggttctgataagatgaagaagcccccatttaacagattctcagttagtattatatcagttttgatccatacttatgacttaaattgagtcagttattgaactttttaaaatgggatttgtgtatgtttactaggaaattgtaagtggtggagggaaaaccgtttggggagacccatcagatgttgggaaagttgtgggaggagcagcttttgatgtggtgttggataacaatggcaaggatttggacgcagtaaagtatgtctgatttttggttttttttttttttgttttattattctgatttaggaagtggataacatggagaacccaagtgaccattattctaatagcatcatttatgatcttcacgcttaggcctgtggcagattgggctaagagctctggtgtgaagcaattcttgttcatcagcagcgctgggatttacaagtcaaccgacgagcctcctcacgttgaaggggtttgttcattcatcactttattgtgttatgtccagactaatagtaatacccccagttctattataaaaacttaagcctgaatttcttatataggatgctgtgaaggctgatgcaagtcatgttggagtagagaagtacattgcagaagtttttgattcttgggcaatatttcgtccccagtatatgactggatctggaaacaacaaagactgcgaggagtggttctttgatagtaagtagattagataatcaacttttgcatagaattatgctcagtatgtgaacccttctatgttttcgaacaggataatacactaatttgtatcagttagtgttgctatgttcttttctatagtgatctaactatatatgagcaggaattgttagggatagaccacttccaatcccaggctcagggatgcaactcgccaacattacccacgtgagggacttgtcttccatgcttactctagctgtggagaacccagaggctgcaagtggcaacatattcaattgcgtaagcgatcgagctgtaactttggatggcatagccaaactctgtgctcaagctgctggccgccctgtcaacattgtgcattacgacccgaaaaccatagggaaggatgcaaagaaagcttttcctttccgtaacatggtaatgcaattaattttctttttatcttcatagaaaattaaaactacacttgggataagttttttagcaaaacacatcccaattaggaactaacaatctgattgatagctattccaactccatatatttgttgtactttgcagcacttttatgctgaaccaagagctgcaaaagaaattttgggatggcaggcatccacaaaccttcctgaagatttgaaagaacgattcgatgagtacataaagattgggagagacaagaaagaaatgaaattcgagttagatgacaagatattagagtcccttaaagttccagtagctgtatgaatgaccatcaaaattgcttcttttcatctcccagttgtttgtttacttgtataagcacttcgctgaagactacaattaacaatttttgtttctttattgtaataatcaaacatggatgatatgcaaatctttataaataaagaaaattaaactaataaagagacgcatcatgctgtaagtttattatagaacagttcacattctgtgaaacataaattgtaattgggaccaccatataataagcttttgacaccaagaaagatatgttccacaaatttaatgtcgagca

SEQ ID NO: 186508 - DNA, 2158 bp, Cannabis indica
gggaactgatgaaaactccaacaagatgatagaagatgatgaaaattattatactgaatcaaaaggaaacactgagggtattgttctaggtgatcagccaataaggtaaactactaattagttggtaacttttttttggaacttataatatgaacttgtgtctatagtatgagttaaataaggtttattgttttcagatttatttattggaaaattgtataaatggataagaaagattacaaagatggcagaagatcatctatagctacaaccaaatgcaccaatctcttatcaaataaaaaaaaaagacagatctttgagaactttagttgtagaaatcgaacatgcaacccaatgtttaatcctatcccacaaagaatcattatttggtaggcatttggtccaaggttcgaatctctgcagactcaaaaccttggggcctaaaacaaaagaacaaaacaaagggttcgaaatttatgttgtttctcgccaaggctgagtttcctcacctagccttccaagtttacataacattcaaggaaaaaagctaacagcccttttactttcctatgtcaggtagaccattgtttgctatctaagtgaacagtgtaagtagttgttgggtacattaagggacaatttcctttctactttattcctcatagcactgcttagaaactaagatcatatttggaactccattaactatgaattttacttttggtcgcccttatttttatttttctcagctataggtcggtagttggaagcctttattaaccctatttctatgtctatgcaggcaatctgatcttccagttgatccattgccttctgaagtggactgcagaagtaaggttacattaaagcggaaggagcggtcagctgacgtgtctattgatagtgacaagacacactgtgataatgtcctaaatgaagtcaaaatgcagccatgtgaggcaagtactgaagatggacaaatgcagatgatggcccatgttaagtaagttttctgctttccctactttagctacagacaggttgatatttagttcatgctcggaatttgttaaaagagattaagctaagacaaaattttgctgttatgtctggcattcttgatcagtcaaactgaatcgccaaatgtcttgacacttccttccactgaggtaggacatgaaaatgatcagaaacagaagaaaaagaagaaaaggaaagcgcagaagaatgagaataaattttctgatgttgatagcaacttaatgaatgatgtgaaagagaataatgacattcaagataattcaagagttgccagcgttgaagatcttacaaaaagtgaggaaatttgggaaccagccaatgatcagtgagttcttttcggcttttgctgataagatgatagccattttattagctttttcaattctttgtcttatgtcttgcatttaacacaaaataggtccttgccataataactaaatcatggttctctttacttttatttgctcttcatgtgattgataagtaataaaaatatttggacaacttgtgtatgagttttgatcgcaattcccacagatttgctgacgaagaccaatctgaaggtaagaaagttaagaagaagaagaagaaaaagagtaaagtaaaagagaatggggaggtggtcaacacagaagaaaataacacttttctgaagaataaagaagctaaaccaatacaggttcgatcccttcagaatggattgattattgaagagctagaattgggtgaaccagatgggaaagttgctgtttctgggaaaagggtaaacttcttctgttctattgttgattgatctaataatgactgtttcttctacgttagccttatcaggaagtattcacgtaaatgcggtggttgaaacaactttggcttgatttcagataagcgtacattatgttggaaagctgaagaatggagaagttgttgactcaaatgtcgacagtgatccttacaaatttcgcctaggtataatgaatgctacaatcaatctgctcttttaaatttgttttgtactctctctaacttctgttcccaatctcaggtgtaggaaaagtcatagagggttgggatattggtcttgaaggtattactcaactcaaatatacaacgttatatt

SEQ ID NO: 186509 - DNA, 1664 bp, Cannabis indica
gactagactagaacttgttttcagaggacctattactactcgagtggactattgcttatctagtataacttgttttcagagatgtttatttgtccaattcgaaatctctaatgcattgttactcgaatcaaatcgagttgaagttatttcataagaagtggagtagaactacaacttgtttataagaggtcttgtttgactattactactcgagtagactagactagaacttgttttcaaaggtcttgttagactattactactcgagtataacttgttttcaaagatcttgttcaacaattactacccgagtggctaaaacttgttttaagagatcttgttagactattactactctagaatttgttttcagaggtcttgttagaatattactactcatcttgaaaaggatattatctattgctatgctctttatttctcatgcttaactattaaagatgacgattttagattcgataagttgtttttcgtttatcttcttaatacatacatgaaaagaaacaaagcaagactgagacaatcttaaggtggcaattatagttatataggctctcctaatccttcttatcttttttttttgcttccatttaccttctatttttcccttttccaaacaaattacatttaccaccgccgctggcaacattatcgtgatattgaacggtgttttaccgttcgactacttgatcttgtaagtgttgttgttactagttaatggctagtgagtaaaacagtaaaatcgtaattatattgcaattccaagatttgaggtttatttcatttcatttcgttgatacttttgtaacaaacacttggttaaactcactcccgaaagatagtctaagaaactcgctgaagaaaggagggtgcacaagtagttatatattccaccaactaatattttacttagtcgatgtgggatcctaacaacttcatacattctttgttaacattcacatcacagagtgcaaagaccagtatatgattatctcattacaattctggccctttaattgaagtggtaactggttagttctgtaaaggaaataagaatgcagagaatcccaaatctgaattttgctggggtcaaccataaaaacttgaatatatatattggatcatgtcgagaataataaaaagcatcttaatttcgcctcttgagactagctcgagtggattggcgggcaaatgcgtgttattggtgaaaaaaattaaactaagagcatctgattttcatgtcttttcttcattacattgattattgtctagagagaaagaaaataggttcattgaagtgtgtaaatttttcatagattaatgaaggagagtgtgaaagagggtgcaatcgagagtttcccgattactccccattgctcgtagtcaaattttaacaagtgtagtctgttttgtggttttttttataggtatcgggccattactagcgcttactaccgtggggcggtgggagcactcctcgtgtatgatgtcactcgtcatgcaaccttcgagaatgttgatagatggttgaaagaattgaggaaccacacagattccaacatcgttgtaatgctcgtgggaaacaaatcagatcttcgccacctagtagccgtatcaacagaagatgggaaatcatacgccgagaa

SEQ ID NO: 186510 - DNA, 3531 bp, Cannabis indica
agaagagatggagatggagacagaggtggtgaaagttaaagacttaggaaaaaggtgaggtgggtttggaaggagaagagaaagtggttcatgataataatgttaataatggagaagagtttcagatttcaatgatgcagaggcttaatccaactaatcctttaagggttttggttcaaaatagtacaagagtagatactccttctccttctcaattttctcagcattcaactcagcctcgttttacaccaaccccacaagtaagtaattttcttttgaagctgagttagctaaacaagtgaattttgaaggttaaagcttttatcttctactaaacaaaaatttagtctgagtgaagtgtttcagagggtacccagaaaaagaaaaagggaaaaagatgaattctttacttggaaattttagtgggcaatttcatttctcaactttacttggttaatatgctttttatggggttttttttttttttttttagtgaatttgtgttaattgctgttttgggtagtactaatttaatctgaattttatggtttaagcttaacaatttgatgattttcttttttttgggtactgatcagccatctataacaacactaaattcaagagcatacaccaacaaaatctctctctttttattccttgtgcatatggttgctgcaattggattagttgggtttctcatatataaaggagttcaagggattttacaagcatcagatatcaaaagaaaagagatgaaaattctcaaattttacataccacaagttgaagcatcatcattattaagcataacacttgcatttgcttggcaaaaagcactaagagaatggcctaaaatcatggtaccattcatattatggagctcatttttgctgtcattatcagctggaattctcttaatttgcttccaaaaaccttccactgatggagttggagtttgcttcattgcctttgcaattggcaatggcttatatgcttgttgggtaacacaaagaatgggattttgtagccgagttttgatcaaagcgctcgagcctgtatcgaaatttcctgacattaaccatcctatttatttgatgcttggagttgcatttatttggatgtctttgtggattttagcagtgattggtgctcttaatttctacttaccaccattgattataattttattagtattgagtttagcttggactgctgaagtgatgagaaatgtggctaatataacagttagtagagtaattgctttgtattatcttagaggaatgcaatcaagtactcagttttgtttccaaagagcattgaccaagaatcttggaagtgcttgtcttggctctctctttgtgcctacaatcgaggcgttgaggattgttgctcgggcactgaatttgctcgagggtgaagatgaattcatgttctcttgtgctcattgctgcttaaatgttatgcaatccatcttcagatatggcaatggttgggcctttgtacaggtactcaaactaaataattggtttcaattttcattgttttgatcactataaaaaaaaaggcttttaccaaaagatgtgtttgtgttttcaaaaaggattaggattttttctttcttctgacatgtatcaaattgtgtcttgaactttttaaggcattaaagaactctttcgaactattgagattgttcgattcagtccaattctgttcaattttactaactgttaaatgtctaagtttggggaaagaaaattctaattagccattattttattttttaaatgaagtattaggtgaagctttcgtatgagattttttttttctttttacatattatcattctgaatatgatgtcaagtatctggaatgattcaagtcagtaaaagcatacttttctatgtaactaaccaatatacaccatttgactattttcccattcaaatctagtattttggtaggtaaatctagtctcactcttatcaaatttattgtctatctgtcattgtcattaacttttagctcttttagggtctgtttggtacaccgtattatatcttattgtattgtatagtgttatattaaattagtttatccgtcatatttttatataatactatgttcggtattgactgtatataaaaagtaaactaatttttccatttaaccataacaaccagatagctgcatatggaaaaggctttgtaagagcatcccaagacacatggggactattcgaaaggcaagaaatcgtgcctgttgttgacgccgacatgacaagctcgatttgtttcctcaccggggtatgcagcggctccatttgtgtcatcgtagcggctgcttggacagctagagttcaccaaagtttcacagcaacaatctcacttcttgttttcatcattggataccttatggttagtaatccccacttcttgaccagtcttttacaaagttattagctttattattattgtaataataaattaatattatcttgactcttttttgcattcaaatcacatgtttaactgagtcagcatttttcctttttctaatggcattattcagacaagaattgccatggcagtacctcatgcttgtgtaggctgttactatgtttgttatgctgagaatccagacaataggctatttgacaaaacaatcaaggatagggtccacatgattcaatcgggtcgcgatgtggttgtgcctacacctcgattaccccgtcggtatacaacttgagaaataccaaggtattttaaagtgtccaacataactccgctactttgtatgatgttgagcaccttaaggttaatcagcgagacagatcgactcgtagagcattgtaatcctttcaagattctatttttctttttgggttcttagtgatttgtaaatacattaggttgtttagatcatttgccatagatataacttgtaccatatatttggctaagtcttaattggggtttttgggcttaaccaaagtttgaagcttttgttggtggtgataatgacaattttgaagtgaaaaaaaaaagaagagcaaatatgaggtaaggaaaatggagagcctagttgttataccactcaacaaagctatgaagaagaagaagaaaaaaaagtattttaattagcactaatgtgaccccattagtacattattataattgcataaacttttagcatattccatgcagaaaagtcactgaattatttaattatttattattagtttctctatctcaataaattagcttagcacaccccaccaaatattttttatgtacctattcattatttaatactatgtgatcttgtatgaatctccatgagttttgtttcagactttatttcttcattttatacatgtataggtaattataatatgcttgtatattctcaagtgaaataatgcacataagtgatagttgagttaggtttggtggaataaaaaaaaaactgaataaataaagaaattggtagcctaacacatttatgtcattatgttattttcaaattcctcta

SEQ ID NO: 186511 - DNA, 4183 bp, Cannabis indica
gaagatgtttcttcagctggtcatctccaacattcttctgtgctgggttcccttccaagctgatggcttgcagggaactatagttggcagcaagttgaccaagacatttggctgtagagattttattgaaacgtaaatccagcacagttaattttaggagacggtgaagaccctccacttcactgattctgtttccagctaggtacaactccttcagggaggaacaagaagccaagccttcaaattcaaggattgattggagaagattagtgaaaaaaaaaaactaaacttggtttccaaagctactagattttgacaatttccaaaaggggaaaaaaaaactaaactaagaaaacaaatgaagtaaaaaaatgttcagcaactctcaaggttatgaatattatgatcaaactacatcataccatgtccgattctgaaaattcggttgtagctcaggtccaacacccgaagtctggtgagttcacgcaaaccctcaattgtggaaatattgttcttcgatagattcaacatatgaagtcctcgaggaagagcaccagcagttattctcactgaaccaggaggcaaacagaataataatcagaatgttaaaacggaaaaataaatcattttcacaaattaccatacagcataagcatgctgaatatttcagaaattaaatgaagaaatagatcaaacctattgagtttcctgacagattgagcaccctcaggcttaagaatgcactcagaaatgggatcacaaccaatccatggtttgccaggtgagctgtagtggtggctgccgtcaaagaagatatatatcttttagccacttccatgccaggagtgagtttgtcttccaccttcaccaaaccatcaaaattactggaatctcccttcatgtgatcatcagactggagtaattcatttgtttcctctagaggactgcagtgttgaagatcattaacccagtcctcaatacgcttaatcttaaaatctctgttgggcaattcatcccactggtgaagtgaggatcctcctgggatgcttttcgctgaatcaaccttgttcatcactggcataatccagtctttagctataccagaataattgcaagaatcataattatcatcaacataattttcagaagggctttcagtgatatgattagtatctcctacttttctttgcactgaatgtttttctgcgtcatgaattgaaatatctctccatctcatgtcaagaccatgtaaatcttcaaaagatttcgaacgtacacctaaatgcgtacaccttgcagaaactggtgaacaaacactgagatttggtaaagaaaatgattttcgcaatcctgtgtggagtacgcagagcctggtcactgccctcaccagcacattcaccagatagctgagtatcagagttctcctggccttccttttctgaatctggtggtcccccaattgagtaaatggattcattatcatcagcaacattacaacttacttgaaaactctctaagtttggagctttttgatgctgatcgggcaggctttgttcttgatcttggtcttcacttccatatcctaaggccaacccaatggcttctggggatccatcacaagaaaatcctagatcagtctcattttcaattagactgtttgtagaaaccatcccctctctgtacaagccactctgcatagattgacttttcttaaggtgtccatgcttaggaattagtacctcgccttcaacagtaaactcgttcttcatgtcctttgacttccaaccacgctcagaagaagaaacatgcttaatgtcactagtaacactggaatctgcatgagagttcaataataaggagcttggtttgttcggaagaacctctggcaaacgactatgagaacaatctgacaatgtcttgtggaaagcttcagatgaagattcaatagttttctgaatgaacacaaagacaagtatacagaatcaatgagccatagataatctactgatgctgaggttcagcagaaatgagtaattaatttaccttaggtctgtcggagtgcacgtgagcattgaaacatgaaaaccttaccattgtggcaataccacagctgcttcctcaggcagcctaccttaattttttacatgaaaaacaaaattttcttctataaaagtatacttcttaattcttattaatgtatggaagcttgaaataaatacttattttgttgaatagtggagcaaaccatagtcaagcttccggaaaactcagcaagatgtgtcattagccatagtccaatgataaaccctcagaaacacgacacaatctccaaatacttgatgatattgatcttctaagaacacaaagcaaaatcactctctcattgtcaccccacaccctcttacaggtgcgagaaggatttgattttgttgcagctgccagagtgagaaaatctttatgccaaataggagaacacaaatcaaatcatgcataagagtgatgacctgattacaacaaagagagggaaaaatgcatcatcaacgacctgactgtttgtctaaacatacagagaaatcataaaaaattgtaagtagacaaatgagaatcataaagactgggcagtagtattcaagattaggagcacagtaatcactgacagcaataaaggagactacaacatcaccattccatgatttattcaaaattttccatagttttaatacaccacagattcaagttaaaagaggccaaacttgaagtttcaaattattaatttattattatttttttttttctgattacatgaagtttcaaaattttaagcttcctagtatgtactttctttgtttctgtctccctctccctcacgcaaaacaaacaaaaatgtgaaatttactaaaccaattaagaaaatttggaatgttaagacaacagctgcaaatgaattctgggatttagcattcttactaagtttttttgttcaatattcggtagcctcacaacaaagattgacaatcaacagataaaggttacaattcgcccaattaaagaacaaaagccatgtgggcaaaagctcgatgatcacattcacaattttccatattaacaatattcaatgcaccaaaaatttgagcataataggataatgaagaagctaaccattttatccaacgagaactctgaatcaataatatataattataatatttgaagaaaaaaaaaacttttcctttcatttcatacaagaaaacaacaatagaatgaaaatcataacaatcacaaacacacaagtatataaggtgaaaagaaaaaaacaacataaaaacgagcttttatttggaaaaataggaaaacaaaataaattacagcaacgcaaagaatgaaataaagtgggatctacctcacaccaaggctaaagtaggatagaagaggccttgttgagtttttcttatctgttcttcaaagaatggtttgtatctaatctttctcctcttccttccgcaagagaaaataatataaatataattgttgggaaatgtttatatatatattataaatcagtaattgggaataaatatcgtttgaataaacggcgtaaagctaaggttcaaccctaacctcaacctgtttacttggctgtgatttataaacctaaataaataaccagaccgactttttcttcataaatatttttattatatttatggttttaaaaaaaaaatatcaagcccatatattcttcttttttcattttttttaaagaacgtttcccttaaattattaaagatgataaatgaatctattctttctttttaatttctttgattcctcaatttaatagaaaagaatgagaaaatttgagtccacaaaagtgacaaatcagatacagccgtggagacaggggacccgtcttcatgaaccctacaacactaaattttaatttatttttagtgatgtttaatttagtggaatgtaatagtattcgtaataataatagaataaaaatgataaggaaaaaatttgtatgttttaaaactataaattaaacaaataatcaaattatcattatttattcttatcaagtgtcaaagtatttatataaataaaaatagaattaaatatactttctttattaaataggtaatctttataaaatggttaagaaattctcatataatttttt

SEQ ID NO: 186512 - DNA, 3243 bp, Cannabis indica
ccggccctggttgcaggagcagctgccaaggtagttgaaggaattttgttacaaatcaaggtgagtaaaaactaactaacaaaataacaaaatagacaaactaactagctaattatacaaaagacctcaactaataactaacacaaactaactcaaactgtattaattattaggctttaataattaaagactatatttaaaagtccacttttcacaaacaaaagtcattgggaattatatcttgccttttctatcatgcggataatggtacaaaactcaaaatatatctattttcaattacatataactattacaataataatgcaataagaacattggtattcaacacccaggtgattagtactttctaaacgtattacttttgtaattagttagcaatactctctaaatgttaatacattaaattatacgagatttgatacttaattgcactaataataatattcacatgtaaaaaggtgctagctaccaatctgtgcttagcatttctcatacaattatttgtatttatttgcccctaggctggcaaaaattgcaaggtcgtccactgcgtaggtccatttcaacgtgtcattgtgcactgaaaatattaatatctatctatctaggcatgtagcgcattgttcatatatttatcacagtaaaaactgttcactttgaactaatttattttctttttctttactttgttaataagaaagaggagatagttactaaataaagtatgaaattagacatccattctaatttctccaaaaaggaagtcaataatggcccaagggtaatgaaaatgacccaaatgatcagaaaaactatggtccatattgagctggatatgtcatgactattgggggttaccaattgataatgcttcaataaatggagagagagagagagagaattccaaaagagagggcctcatgactgtagacatttccaaattagatgggtttaaaaacgtacttgggttggcaaaatcttggattacactattggaattgtttggatggactattattattaaatagagtgatccaaatggagaattgcacatggctttttgaagctttaacttcattttccttttaaatttcatgtgagtgtggtctctggactctggccatgaatgatgagtgggcagcgtcctttaaagaccatttttactactccacatgaaaacacaccacaccccacaaaacataaatagcctatataacactcgatccctcctccctatgacaatataaaacacccattaatgacagttttttaacaattaaaaaaaaaatgaaaaagaactagaaagcattaatgctcataggtaactcaccatagacattattagtactatttacttacttatatgagtttttttgtttcagctaaattttttcaactatcactttatttgtatttaacgttttaagttcaaattttgacagtgaaattcttcaaattactgagctaatagtaaatttatggtgttatttattttttttttattaattgtcaatatagacgatttatgtgtacacttttgtacatatatatcacattatattggtatacttatacccatgctacaaaattttttactttagttaaaaaaaaaaaatttttacttttagtcccaacaaaaattgtggttaaaagtaaaaaagttgtggctaattataaattatcatttctatgttgaaactaaaatgttcgtggctaaaagtattagtcacaaaaattataatttgttgtgactaaatgtgttttttaagtcacaatacatattgtgactaaaattaaattagtgacaacttgtaactaaatactatgttttagtcacaagtaagtttttgttgtgaccaaaagtcacatttagtcataaaaaatttatgttgtaactaaaaagttatcactaaaagtagcagttttttgtagtgaattaatattattatttaaattataaaaagttaatttcaaaatttataatatttatttatttttatttttataattatatttaatttcaaaataatatttaaaaataatttataaataagaatattatgtgtactaatataaatgtgtcataagcagtttataatgacactttgccgaataacaccttaaatttattatccatttaatagtttgaaggattttattgttaaaatttaaacttaaaaaattaaatacaaataaaacacaatgtgcttgtttaaccgccaaaaactgaacttatgttaatcaaaagcaaagcccttaggataaggtcaaggaggtttgtactactagctagtttattttgctttgaccaacacatgcctaatacagaataccttttcttttttcttcttatttatttatttatgtatataacttaatggacaatcttgatttccggccagaatttgaacctaagtagtgacaagcttgcccagtcacaaactatactttgattacgttttaattatatataatagctttataattagtatataataaaatacacaaggtttagagaaaaaatgagaaaacaagcacattgtgttaatggttgtaatgcataaatacaaaggaataagcaaaatatataagagtgggaataacttagacattgaaaatagtaacaaagatcacaagtgactatattttaaatgcaactttaagagagcaatttaggttgaagtgcgtgttgcacgtgcagacatgtgtgtgagtatatggaagctcacatatatataaccatacgcacacgtgctcacatgcacacgtgcttagtagtccttacagaggtaaagaaatattcagtttataagagagtaaaaaaaaaaaaaagtttggtctcaaaataaaaatttcttgagaaaagaagagaatgcaacagaggtgtgaatgtgagtgcatgtggattcataaaaactcagtcaaccgcacttgaccccaagaaattttctacagtcccccacccacctggtctagtcatatccctagctaataatattttggaggaatgataattacaatctcctattataattttttagtcaatttttacatccgaaattatatgttgaaatatttttttaatttttttcttcatatcggtatttattatagttacagtattatccctgtaaatttttaaaaattccgaatagttttacagtactgaaaacatagtttatgatatatttcagtttaccacacgtgttcaaaaaattataa

SEQ ID NO: 186513 - DNA, 3105 bp, Cannabis indica
ttttttttttttaatttaaaaacaaataatagcgtttaattttcgaagcttttcctctgtgtgattcaatctaaacaataaaactagtaataacaactatgagagagagtaacagaaacaaggtatggcttttcaatttttattttttatttttgtaaaatcttttggttcaccaagaaaatatcttcaatgcttcaaaagttcagagccctaaatcttacatagattattatattcgctattgttgttgttatggaatttgatgctgtccgattgtattagccaatttttgtgatttttttttaaaaaaaattaaattttaaattatatatttttaaagaaagtatatgcagcggcgttgaaatttagttaggttgtttacttgaaattattattattattattattttaattgtttttcggtgcattagggtttggtattatagctagcgcttcaattttgcgttgtcgccgatggacgctcgtgtcgggggcaagtttcggcttggccggaagatcggcagtggctcttttggagagatctatctaggtttgtgccttatatttatctatttttgaaattattgctatttttttttattttattttatgtatttggctgaatgtggataatgggtgtcactgattttttttcgtgcaggtactaatatacagactaatgaagaggttgcgattaagcttgtaagttgtttgtttacgtaattctgtttgggagtaattctgttgtagtttcattggttgggttgtatactttgtttctgtgtgtgcacttgtgatttataattcgctggttatttgggtgtcaacactggaaacaagttcttattaaatgtagaattaattggtagatgttattcagctttaatttatctgggtattagactattagtagatacaaagaagaggtaatattgtcaaagcttttataagaatgtttctaaaggggttagcttgagtggtcagccatgatatattgctccatgaggtttagtgtgtaaaagtttgccgtagtctcctctctctcaatgattgtatagttgagggagaatgaatatcataaacgagagaaagcaatcaaaatgtgtattgtaatgcagcaatgtgtttgtctattaaatttgtggtttggtggtactttacttctaataattaatgctcatgtttttcttgttgtttatgtgtaggagaatgttaagacaaagcatcctcaattgctctacgaatcaaaattatacagaattctgcaaggaggaagtactgaattttccttttgactatttttttattatagtaaatgaagttttacttgtatcattttaaagtgtcagttcttttatttttaattttttgcgtgacacagtcagttcttccttgttgatgttcgattgaatctctctcatattgactacttgtaatttgttgttgcagcgggaattccgaatgtcaggtggtttggagttgaaggagagtataatgttttggtgatggatttgctgggtcctagtcttgaagatctctttaatttctgtagtaggaaactttctttaaagtcagttcttatgcttgctgatcaaatggttggtctttcttgttgatattttagtatgtgttttttttaatcttattctttcaaccgattattcactgtcagctgttttgctcttctatttcagatcaatcgcgttgaatttgttcattcgaaatcattcctacatcgcgatatcaagcctgacaattttctaatgggtctagggaggcgtgcaaatcaggttttgcagaaatttatatgtagaaagacatttggatatactggttctatttgtcagtgagtgtatgccaattcggtatttgctttttgcatgcaggtttacataattgactttggtctagcaaagaaatatagagacagttccacacatcaacatattccttacaggtaagtctaagcttgaacctttctactttgttttaatgataaaacttaagcttaatttcttaagtttatcgtcataactttgcagagaaaataagaatttaactggaactgcaagatatgcaagcatgaacacacaccttggcattggtatgtcatcttgtgactattttccttctgccgttagtgtttcacagtaaagttttttcaagttattagtgtcatcatttagatatgtgacattctgacttttacagagcaaagccggagggatgatttagaatctcttggatatgttcttatgtacttccttagaggaaggtaattgttttttcctgtgccactttttgtatttttgtagctctattaaattaataatagtttactacagtcttccttggcaaggactgaaagctggaactaagaaacaaaagtatgagaaaattagtgaaaagaaagtttctacttcaattgaggtatggtgtagcatgcatacttatgtatttttttcatcctgtctagtccatcgtaactgaatattcaattatttttacaggcattatgccgtgggtatccatctgaatttgcttcgtatttccattactgtcgatcactacggttcgacgataaaccagactatgcttatctgaaaagaatattccgtgacctctttattcgcgaaggttataattttatatagtttgtgttctaggcttagcatttattgtagtggttttgctgcaggttgcatgtgttaagcttttctgaaattatgtagggtagtaataattctgactattggtattggctttaggtttccagtttgattatgtatttgactggacaatattgaagtatcagcaatcacagcttgcaactcctccaacccgtgcccttgtgagtattttaatttgttatattgccgctcatcaatgttcattattttacgtaacactctcttctttagggtcctggtgcaggaactagttctgcgatgccccttgctgttgccaatgcagacaggcagataggtatttgctagcacatattccctgagcttcattcgaatgtgtttgtttttttatattgccccttttctctcacgtttaaggttttttgagttagtagctttcatttttttttaaaaaaaa

SEQ ID NO: 186514 - DNA, 6261 bp, Cannabis indica
aaccatcgatcttaccaaactttgttagacaaattcataatgttgttcctagtccaaataagcagtctgatcagaagaacagtcagtaaactcgaaagctggaatactagatgcgtaaatcatattagataacaccaacaacctctttacctttaaaatatattctagattgcccaaaaatcaccaagacatgaaaaacataccataaacatggaacttacacaaaaggaaacaaacaatacaaaaatgagagataaatgtaagataagagagtagataaacatgcaaaaacaagttcacaaatagctgttgtaattctctacacacatcaaaacctaatagattgataaaagaaaaaaaaaatctaatttataactgagaacaaccaacctaccatctaaccaaacttggttctcgaaatggtgttgtcaagttctgaacaaataaaatgctacaaggaaataaaccaaagataaagaaccaaactgagtatctgacctcacactagtctaagacatccaatttacaatcaaaccaaaccagcacctaaaatgataaggccaaatatcaaaccttatactgagcaaccaacgaaattaaagtactttttgaagctacttctgcattgttcaaaaaaaaaaaaattggagctgcactgttataccaaaattaaaaacaatgaaactgggacgaattaccgatagaaaattatgtctgagtcgcggacaatgtcgctttctttaagacgtttcgcggctctgcccgaagtgtgcacgacagtctagcaaccacggcgtccccaggataaaacaacctctgtatacgtacgatatgttctgcaccgaactatatcgctctattacaccctaaagtttgctctgagaaaaatcataaggaagaaagaaagattttttttttaatgttggaaaagatattttcttctgttgttctgatacgacttctatatagaagtcgatccaagaataaaaggtaagaaaacggtaatattatcgttcgtggaagagttggattatgggagtaaaaagtggatcattgactgatcgcattttactacttttgataacgttaaaattaattaataaataagaaaataaaaaaatctttatttaattaaataatttttctttaaataattaagtgacacctcacctggctcgaatcgggcggcggcggcgcgtgtggtggtccagtgtatgagtcctcaccctatgcgcacaaaactgggtacgacttctgttgttttgatacgacttctaaatagaagtcgatccaagaataaacggtaagaaaacggtaatgttatcgttcgtggaagagttggattatgggagtaaaaaaaagatcattgactgatcgcgttttactacttttgataacgttaaaattaattaataaataagaaaataaaaaaactttatttaattaaataatttttctttaaataattaagtgacacctcacctggctcgaatcgggcggcggcggcggcgcgcgtgtggtggtccagtgtatgagtcctcacccatgcgcacaaaactgggtaccccttggggcccaaacctaattctcaaacatgcactatttatacacttctaatgaagtgctcttctaatgaagtgctcctatcccatgtggactccaaacaatcacacacttcacttttcaatttttatataatttcataaaagttccaattatattcccccacttgaaatttttaaaaatattttctcaagcaatatcaaacaactataagacagtgcttgagcaaagatatttttcgatttgaatcttgcgcagtgaatacgatttagattttactagagtgactcgaagtcttgaactctatctctaacatcgtaccatgcactaatctttcaagggtgtattcaaataagcatgtgtgttaatggtcatgcacgtctatcctagtatagtgaacgatctagaaattttactccaaatttcataggaagcggcctcactcccacattcacataggtgagtttatcaagagtactcctgtagctcggtactccactccacatagagtatagatctcattaagagtttctattaactcatcatcttatcgcttcaagacttcatgattctcatataacaatcgcatgatcaacacatatcacctcataactttgggatctccagtcattaggttgagttaccattatgggtaactcatctttctaaaggcaatagtcccattcctttcgaagttttatagactttctctctagctagtcctttcgttaaaggatttgctaaattgtcatcagtgcgtacatcgatccttacttacttttatactaaaataattgaaagtattagaattaaaataataataaatttgatacagtatacgacactcattagaaaatgcttaaattgatattgaggtgcatgaaagggactctcaatactagtctagtattgggaaaactaggtaattttaaagaaaatgtgactaattaagttgactagaatatgctgcaaacctagacactagaagatcctcaacactggatatgtgtttactatgcttggaggttatgtgagttggaaatctaacctttaaaaggttgttgctctaccatttactgaggttgaatatatggcagcaacagaggcaataaaggaggccatttggcttatatggcttggaatcaagattgatgagttgattgttcattgtgacaattaaagtgctattcaccttatcaaaaattccatatttcccgaacggtcaaagcacatagatatcaatctatattttagaagagatatcattagtatcaaagagatttcagtcaaaaagattcacaccaatgagaaatcgactaatatgttcaccaagagtataataagagaaaattttaggcattacctaaacttgttgaacattgaagagcactaaaagtctttagtttttcaaaggcacaatagatggaacgacagggcaccattgttgatgaccgcttaactcttgtgttctcttttgtatttttctattgttgaagatcgaataaagtttgaccaaagggcagttcctctcgggaatcagtcaccacaaaaaaggtgattctaaaaaataggaagtaagtcatacaattacctaactctatcagacaattctaaaaaataggaagtaaaagtcatttctatagaattgtttgaggtttcaaaggcacatttgaccatttggatcacacagtttctcactcactatgttaactactactaattacttcagtcaattgagtttataagagtgcatatatccaagtctatgtatgtcagttaattcaggtactgaattacctaactcaagtttgaaatgtttctggtatcacctgtcacctctttctcaagataacttgccaatgatccaaacttgtacacaattcaagataatagtacgattgatttctgtttgatatatgtactttgttttggaaagtgatttcgaaatgtctcatttaagacctacctttttcttttaattttttgtccaagtggtcctttggccattgattctattttctgattatgcatatgtgacttaaaatacatttacaaaaatcacttggtatatgcttataaaattatgctatatacacatcatctgaatttatataccaataataataataataataataataataattataataataaataaaaggcaaaaaaattactcaaattttacattatcaagtctagggtgtcaaaaaaatttcagaactattgagattataaactcaatgacttttatttaattccattacattttactaacacgataattgtctatgtattaaaccgtatcctcaaacttaatttatataaaatcgtgttcttaaatttttataaaggtcaactcatttataaacatgtcgtgtttgtattttattttctaacacaattattaaacgagttgtgttcaggtcaaacatatacctattatacatcacaacatgaatactactcgaattcttaccctatcaagatttggggcaaaaatcctaacctaaaaataataatatgatattcttttctttttttgggttgaattcttccatttatcacaaactaatttcaacagcttttaaccaaaaacagaaaaaaggccaccatccactcaatctcattacctattcctctccttctttctttctttctctctctctctctctcgttcgccatagcctccacactcctatttctctctcatacacacaaaatggttgctttgaatgtcatcaccccaatcaccaccaccaccaaatctttccaccatagatatagataccctctaaccaccaccaccacgaccaacaccctccattacccatctctccctcaccaatccacagccgccacaatgcccacaaagctttccccttttcactcaaccccatctgtcgcatccaccatcttcttcccagagcagcctcctcttccaacggagaagaagcagaaccagcttcttccctttcaaccccaaccccaaaatcgaaggccactcaggttcagctcgccattgttttcggcctctggtatttccagaacattgtcttcaacatctacaacaagaaggctttgaatctcttcccattcccatggcttctcgcttcttttcaactctttgtgggttccatttggatggtagctctctggtccttaaagctccaaccttgccccaaaatcactaaacccttcattgttgctctccttggacctgcattgttccacacagtaggtcacatttcagcttgcgtttcattctccaaggtagctgtttcgttcacccatgtcatcaaatcttcagagcctgttttctctgttgtattctcctctttcttaggtgatacataccctttaaaggtatggctctctattctccccattgttatgggttgtggtttagctgcagtgactgaggtttctttcaattcccaaggcttgtggggtgctttgattagcaatgttgggtttgttttgaggaatatttactccaaaaggagtttacagagctttaaggaagtaaatgggcttaatttatatggttggattagtataatttcactgttttatctatttccagtggccatttttgttgaagggtctcaatgggttcaagggtatcaccaggccattgctgcttctgctggaaaaccttacacattctatacatgggttttgatctctggtttgttttaccatctttacaatcaatcttcataccaagctcttgatgaaattagtccattgacattttctgttgggaacacaatgaagagggtggtggttatagtgtctactgttttggtgtttagaaatccagttaggcctcttaatgctcttggatcagccattgccattttcggaactttcttgtattcacaggcaacatctggatcaaagaaaaaggcaattgaagaggaaaagaagaactgagttttttaacccataatgatgttattttgtcattctgtttttctttttgtttttgatttgttgtagcctataggcttaaatgaagtttgattcagcaaggtttatgatttttcatacttctattatattcaattaagtttgagttaataaacttgtatctgttcagatcaattagcctggctatattcaattaagttgagttaataaatgagtgaaggactgaaccacattagctcatatgataagaaaacacaacaaaggcttgttgtggctcacttactcctttttttttttgaaaataaaacgttgcatagataaagaaaacactagacctcgcggtcattacaaaggatagatacaggtatggagggagactccataactcctaaaaagttttgggtgaaagcccatctagccacattatgggcagcaaaattacaaccacggggaataaaagtaaaattacaagataaaaaataattagagagttgattacaaacagacacataattaccaatgttccaaatatggctcacttactcactcttccacttctttcgccgccattgtcatggacaaaccaccacctagggatgcacacggggcggggaattggcggggagtgctcctttgtccccttccccgttaaaaattttaatcttcatccttgcttatttttcataggtgatggggtaggaaatctcttaatggaagcgaggacggggtgacgactcctctaataaaaaaataaaatttata

SEQ ID NO: 186515 - DNA, 1900 bp, Cannabis indica
agtacgttttgtcagcaattgacttttttaaaagtcaacaaaacttgaccaagttccaatactcgtataagtcatccactaacggaggagccaattatggggggaatccaaatatcggggtcgttaactggatgaacttgccgtttgagggcattgatttcggatggggaaaggagattcattttggtccggctaatcacggagtagacggtgacacatggatacttcgtggtggtggtagtgaagacgataagtcactgttgattgttgtttgtcttctggtggaacatgtcgaagctttcaagaaatatttctacgacgacattattaataattactcgtcagagacgttgtcctcattctcagatgagcttagtaaggagttgatttaggtttatctgattataattgggggacttttgagacgtttagagagtctcatcagctttgaaaattcagttttatggtataaatattattgtggaatctgtgtttatttccttgtttgtttgataatttgctggattacttatatattgtttgattgtatttagttatgctgaaataatatatttgaataactatcaccatctttctaacttattatatattgagagtttttttatgaattcgtattagcacctacttcaaaatatggtgcatgctcataggcataaccagagaatattgttgtgtaaatcttgcattgatattagaaaatatatagcaaaactagtatcttcttctcgtcctgttagagagattgttttttgttcagtgatatatgttagattttttatatgtatagatcaaatatataagggttcctttggtacgccatatatttgaagaagtagattgtttcgcggtgatgatctagttatacaatggaggtggcaattcatctggcgttcgatgacaattcactttggcaatggagatgacgatgaagattcactatgtgcacaggtgatcgactctagtgacatgctcataccatttgaaaattgcttcggtattttctctctttatcgctcacttattattgtaatcaattttagatccaaaacattgaaatcgtgtatactcctaatctaatatcttttcacctcagtatgaaaaaaagtgaaaattctctgcttttcaaattaataacaaaatttgttttcttatgtgacattctcatatgtgtttgtgtgcactcatgaaatttgttttacttcattgattgatctttagtggtgtattgttttctatatggactgttagtgctgtatttgaataaaaagatcgaactatataatggataatctcaaattgctctttttgcgaaagctaaataacttaattagttcaactttgttttttatggaatcaatttctatgcttattggttctgtcatgtttctttctacaagtttctattggggtttgtattcttctaaaatgtggacctaaatatagatagtttagagtttagagatgccaaattcaaagaaggtggatctttgaaattcattgaggtacttcttgctctgttttcaagagttattctatttaatggtaataaattgtttattcaaattatttaatcaagggcattgtattgcatttgatttgaaaattttgttatcaaacatgctcatttcatccaacatactgccttttgattcttgatatgatgattttctttctgactaaaacagaatttatacttttcaaaaataagaaaactaccaaagaagaattacttcacactgagagttggtctcatgaaatgaaattctttcgtccatggtatattgtgaagtatgatttttctcttctttatctatacaaagatgaagttgcctgttaaatttggttcaagctattgtcatttagtgtgttgctctattct

SEQ ID NO: 186516 - DNA, 2801 bp, Cannabis indica
aacatttacacaacaaattactaaaaaaaaatacaataaagtttttgtttaaagaaagaaaaaatacaataagcttaaccatctctctcaaaccccaaccccaccaccatccaaaaccatgtggcggcgcgtggagtagcgcgtgtaaagagtatgcattaacaaagtgggattcctcttggattttctctacatttaaatatattatttttttcttttgagattccttagcaagttcggtttagtgacacatagctagaaagcccttattatgtcatatataagtattttttttatatatttatttatttctaatacttttatgaaaaatactaaatatatttatctttttttccaaatgaaaaagtctaacataacaatcctaattaaacaaataatttgaaattaaatataacagtcactctattattattattgcctgcaataaataaaacttatcttttatcatatttaaaaagggttttttttattaattctaatcctaataagttattattaacattatatatatttgaaaaaaaaaatctcttgcataaaagacctattcgatttctgatctccttgaaaacctatagttagttttgaccatcttactgttcagtttgttaccacaacaaaatacccttctctctcactctctctcctctttctctctccaaaaatcataattttccttctctctcctgcatttttcagctttgcataataaaaccctaattttctatcgttctttctttctttctgtttactctcacttcaccagaggtttttttttgacctacactctctctttttattttgttctttctgtagttctctttaatcgaacgaatgaaagaaccctaatgagtattttgttttgagataatgaatacgagtttattgttgttgttgttgttgttgatgatgatgatggttttgtttttgttttgattcttaaagtgttgattttgatttgtgaaattgtggatctgtctcgtgtgtttggttgcagagaaaatctgaaggaaaaagaattgagaaatcaaggattgggatatatgtccttcaatcaaacaaagcccgataagagcgagaactataatcggaaacccgggcgaccccagagctccactcacctgcgtggacactcaggcgcttacggtaggggaagcggcgggcccgccccttcaccgtcaataaatcgcgggtaaaagttccgtttttttttctttcttcaattcttagggttttgctgattctgattgttttttttttttgtcttttgttgtttttggaaattggatttctttcaacaatgttttttcgttttttactattattattattattattatgagtgatggttgcttattcggattctggtataaatttgaattcttttcagtaagaagtatcacaatgcacaagggccgcaacttagggcaaatgtgccgaatgtaaatccttctgatagtaatgttgcaacacttcgtggagtgcaaaatggtgcccatctacagcccccattacacggtatgtatatatatgtgtgtgcgtgtatgtatatatatgtcctctggctctcttgtttttctagatatatgtgtatatatttttaatcgaaaggatcgattattgttttaggagcacctgatgcaccggttaacttatcagctgctaagcaagctgaaactttggcatctcaaagaaactttcgaggtcagaaggtaccgacttcacaacatgccaccatgagcagtgagagttcagccaccactaccccgacaaaaggtgagtttgaaggttgatgaatcaatatatgatggttgtttttgactcttttccttgtcatgacactggtttgggtaaggtaattattgtgttttaatggtggtgtagtgtgtgagggtattcatttagtttctggtttattgaataagcttatggatagagacattcttaaaaatgcatagaatttgatgaatgcaaatgaatagtttttattaatttgttttgtaataaataaaaaaagaatagtttttattgatttgttttctaatggtgcagctccagatgatggatcaaaggctgtagtgtttcaatttggttcgttaagccctggtttggtgaatgtaatgcaggtattgctaaaatctttgtaccagtagtttgtaagatttaagttctgcactatacaaattttgttattattgtagattaaagaacatgagggttttgtcgctgttttgtttttttgtaggttcctgctcgtacaagctctgctccgccaaatttggatgagcagaaacgtgaccaggttcgcttgctctcttttcattcatatagtctttatttaaagtaaggaagctttttcagttcggtgcacagttgcacacaccacgtggaacaatatttaaattgcgtaaagattaagttggtttttttttaccttcaaatttgtcttccattgtagtgtctcttgaatttttttgaccaaagttcttttggtttattctcttttcttaaccccaaattaaaagaaaagaatgattaaggttggcaacacactccccctaggaccctcctaggcgttctccccactccaagtcactaaaataatcattttgccaaaaattctctctctctctctctctcccacacacacacacacagaagtcagatatttacacggatcacattgtagtagagtttttgccgatgatattgctttgttattttctacttatttgctaagtagttataatagatatattatttttgcaggtacgtcataattc

SEQ ID NO: 186517 - DNA, 3820 bp, Cannabis indica
taagggggtgcattatagaatttaatttctaaatttatatatataactaggtagatggcgaaacaagtagataatccatcaatacatcccttttatgggggtacattgtagaatcatcatatattatttagaatcatcccttttttggttgctgattattggctagtagcataacagtgtagctagctgatcttgattttcactcgacaaagagataattttctttagagggtattgcaagtttctttgtctaattttcctagagtttgcagtgtcctaatctatggttgctctatcaatcatgcctcaggtttgattttcactcggcaaagagataagctgccagcattatgaggttaggaagtttcgattttccttttccttgttgtgtagttagcttattattttgtatggcaaatagacgcataaatatgcttcatgtttgtgaccattgtcgatcaaatgattgtcagttttcttatgctatatttatggtattcatgttaactaggtgtttacagtttgatcttttgattgagattatgccatttacaccattactattatgtgatattaatttactattaaaagcaatagacttctagtacggtaaacattagaaagaaagaaaatacaacttaaaagatgctttaaattttaccataaaaatgcataatctgtattggaaactcatctgtattagatgttcattttgataactgtagtgatgatagatatcagtgatgtctgcctcaattttggctacagaattagtattggatactaacagcatgttggtccaactccttcctctgttttataaaattaaatgaaaaacagtgttctgttcttctctatacttgctttattaatgtttagcaatagttggtatggcgtgatctaagcaactaaaactaggtaattatatcatacaagtaatatagccaagttaattgcatgttactacaaagggagctttcacatgacttcttccaccaaatttaacaaaatccatacagagaataaaaacagaaacaacattttcaaggttgttttactctctcatatgaaccaactgatttgagcgttatctcataacatgactcgccaacatcctaatgggttcgtcttgtttgatggaaaagatagagttgttagagtaccgtaccatacaaagctccccccataagattgcctctttcgtatttggacaacggtccaaaagcatgtgacttgtcacatttaagcaactatgacaagtgtccaagggcagggctcccctgcatagcccgattgcatttaccttttcggagtctttaccagaggagatgttgtaaaatcccaagctattttgctttaaagatgaaagggagagtaaaagattgtaaaggtttttttggtaggtgttgtcaaaagagtaattacctatattggagcagttccaacaatattcggcgctggaggtacaacctttcagctgggcaaggttgggagtgaaggtgtgtatgaaagtgaggagaaagagcagtatagttgagcggctcatctttacttttgggcatgagacgaaggtgcaaggcttgaagatagttcaaatgtctggtgtgtatataatacacacttgaagagtcaacagtcaagaacaaagaaattgtttgtgtgaaattacctaatactttatgaagtggacccttctacagattaattttccacataaacagattagaatcattatttaaattaaagatttgtatggcccaaagatgaaggtcagtggttgtcctgttctcggctacttatcattcttttcgtgttaatgtgtgtgttggtgtttatcttttcatgactttacatagaacacacaatagtatttgttaattttcttcatcacattatctgtatttcatgagctattttatcattcacattttactcctttcttatcaatcatagcctaaattacaacttaaacactacgtccttttcttttgaaaaaatggtttcaacagatttatggttcttgtgagtttacaacatttttcgactccaatagaattcattagattgatagatcatagataacatccaaagtaatgtaaacacattaatgagaataatgtgtaatcctgtaagtcaaataaatatcttattctgattccaattcatcaatccaatttaaggtaactctgatttttagtgattctgattatatgaaagtaaacacaccataagtgttacatgaaataaataacgttcttaaactacttttataatagcttaaatttccaagatgataaccagcgaaataagtttaaataaagcaggtaataaagattcagatttatataaattatgcaaactagacacttgagatgcatttaaacgcaatacatgaccattctcactctcacaaattaggaccactaccaaaaaccaaagacagaacagggggcatactaacgtgacttcagacataaaccatattcatattcaaatatttgattgattttgttggctagcgaggggtgagttcagtcattgaggccttatttttggatgcttgattagagtcactctttgaaccgtggccgtgtgattgagacgctgctgagttactattattggaggataacgacatctctggtccaaaattactatgcatgaaaaatgcaggtttagaaggggcgcggattgtaacagagtggctatttagcatgagaacaatcgaattcacggttggtctgtctgccacatcttcttgaacacacaatagtccaatttggatgcatctaagaatctcagatcttgaacccaacagaattttcgggtctataagatttgcagctgtcccctcgttccagtttctccatgcctgaaaatgttgttaactaattagctaaatgaagcatcataatttataaaatatttacttgacattaaaaaggggcagggttgagagaaaattgtgtacgtaggtagatgaataatatgtaaacttacgtaggttaaaaggtcctccatgtcctccccattttgaaaactgctattcttttctcctttgacaatctccaatagtaacactccaaagctatatacatcagacttgacagaaaattgtccatgaagtgcgtactctggagacatatatccgctgcaaaagggcatgttattcatttatatattatgtttctattatcttagctctcaattgcttacggtttaagctatatgatttggatattgctgaggtgacactaactatggaaaccaaatgatgtagcatgaattgtgagaagcacttactaggtacccacaatccgattagttttgtcttgggtttgatcgaacacaaataaccttgccattccaaaatctgctatctttggggtcatttcctcatccaacaatatattactagctttgaggtcacgatgaataattcttagacgagagtcctcgtgaaggtaaagtagaccccgaacaatgccttggattattttgtaacgtatatcccaatccaattctgcacgctttgttggatctgcatattcatatacatgtagatatgtttgtttagtcaagtctagttcatgtgttaaggttagtataaaataaaacagtcaaaatatatattccaaccatccaacacatatttgcataccaaatatgaatcgatcaaggcttgaatttaatacgtattcataaacgagaagtctttcttttccatccaagcagaagcctaggagtctaactaaatttcggtgttggagtttcgcaacaagcttaacttcatttttaaactcttcgtcaccctgtccag

SEQ ID NO: 186518 - DNA, 3638 bp, Cannabis indica
acaacttttccggcgagatccccacacccatttccaagcttctgcttttggaggttctcgagcttcaaggtaacaactttaccggctacattccgacccacgtgacccgttttcgctctcttcgtctccttaacctgtcttccaatctcttcacgggtccgattccggcgaggttgattggctccgggaagcttactgaaattgatttgtctaataaccaactttccgggagagttgaagtgggtagtaaatcatgtgagtttttgacacatttgaagctctctaacaattttctcactgaacccattccgactgagatctcaaagtgttggaatctgaagacccttttgctcgatgggaatattttagaaggaaagattcctgcccagattggaaaactttctgagcttcgtgttcttgatgtttcaaggaacagtttgactgagaaaattcctaaagagctcgccaactgtttgaaactatgtgttcttgtgctcactaacttagttgatgaagacagttcactagacagtgctagaggagaattcaatgcttttgtgggagccattccttttgagctgctattacttcccaccttggagattttgtgggctccaagggctaatcttgccggaagattacctagcacttggactgagtcttgctcactcagagttgtgaatttggggcagaattatatcaccggtgttttacctgaaggcatcaagatgtgtaagaacatgacttttttggacttgagttccaacaagttaaaagggctatcttcctcttcaactccaagttccatgtatgctttacttcaatatcagcaggaatcaaatatctggttttcttccaaggtttggtaaccatgggagttgtgatactagcatagtcagttctaatgtgaataatcaggatattcttaaggcttatttaggattggggttggataggaatgattggattatccatgattttagttggaatagatttgttggtgcattacctttgttctttgttggagatgagttattggcaacatctaatgatcataacttctcatatagattgttgcttagtaataacaagttcaatgggtcacttcctattgggatggttccccagtgtaatagctttaagggcttctccatcaacttaaatgccaacaaatatcaggtgaaatttctcatgcattcccagttgattgtctaaggctaacagattttgaagcagcttacaatcagcttggagggtcattttctggtcttgctattagtcatttggttatgctccaacgccttgacttaagaggcaatgcactatctggccctctacctcatgagttggtgaacgtgaaaagcctcaaatgggtgcttttgggaaggaacaacatgacaggagaaatcccttctctaattggtcacttgacttctctagtggttttagatctttcacaaaatgctctaacaggattcattcctccaagtttgacaaaagcttctggtcttgaaactgttttgcttgatcacaacaagctttatgggaagataccatcatctttctcaacccttgttagtctcactcaacttgatgtgtcctttaacaacctttctggtaatattcctcatcttcaacgaatcaacggttgtgatgccttcaaaggaaacaaatatctccagtcttgtcctgatcctcactcagcttcaccagccaatcttcctgtgccactcgatgtacacaaatggcgcagccgaaaaaagataaagactttgataattgctgcagtaacttgtgcatctgttgttctgtgtttgcttgcagtgatattttgttctttgcttttggaagaaaaaagttgactagactcagcagcctgagaaggaaagtagtagtgacttttgctgactctccaagtgagctgaattatgacaatgtggttagagcaactgggaatttcagtatccagaatctgattggaacgggtggttttggttcgacatacaaagctgaattggtgcctggttttctggtagctgtaaagagactttccataggtagattccaaggtgtgcaacaattcgaagcagagataagaacattaggccgaattcgacacaagaaccttgtaacacttattggatactatgttggtgaggctgagatgttgttgatatacaattatctctctggtgggaaccttgaaagcttcatacatgagagatcaaccaaaaatgttaactggggagtcattcacaaaatagccattgacattgctcaggctctggcctatctgcactattcgtgtgttcctcgcatagtgcatagggacatcaagcctagcaacatcttgctagaccatgaactcaatggatacctctctgatttcgggttagctaggcttttagaagtttctgaaactcatgccactactgatgtggctggaacattcgggtatgtagccccagagtatgctaccacttgcagggtatcagacaaggctgatgtctacagctttggtgtagttttgttagaactcatgtcaggaaaaagatcacttgatccttctttttcagattatggaaatggcttcaatatcgttgcgtgggccaagttgctaataaaggaaggccgttgctcagagcttttctgtccacagttgtgggaagtagacactgagcctgaagagaaggagaagttgttagaattgctacggcttgcatcaatctgcacggttgaatcgctttctgttaggccatcgatgaagcaagttcttgacaagttgaaacagttgagaacttaagagagctaatgactggtcttgcacaaatgaaaactacacaacaaactcatttgctcacatctctactacagtactggctaaatgaagaaatcaaagtgagtttcattaatagtacactagcatagaattatcaaacaatatatgatgataataataatgtctcatttgatgattttcaggtgaactcttccaagccactaaggtttgctttcaaatttttttgcctctttagtaaggatttccattcattgatacttgttttcatgttttcacttatttcttttcatttgcagaatttgttatcaagttgtatgaagctgagatttcgaaaacaaatcggaaaatccccaacagcactgaatttagtttacaacatacaaagtcactcactgtaagcagagtaagaaaaatattcatctgctttgtatttaatctcaccttacatgtataatatagcaagtagattttatcattattatatgacataacaactagtgtgaatataatcttgtactaaactcaacaactgtcttcctttgtagccttaaggacaaactcctctgtagtaatgccaattatctcattagcttgtttcaaatcaacacatgaatacattccagtactatcctgagatcaaaggcatatatgagtcaatgaatttgcttaaacaacaacctcaaactcgaaagaaagattatcaagtcttaccttagaaacaattctcaacttctctaacttacgaaccgcgtcatccacatcgaaattgcagctctcaccaaactcttctttgataagttgctcacaccgcaagtcaagatcctatttcataccatta

SEQ ID NO: 186519 - DNA, 3463 bp, Cannabis indica
tcacatcttcactaattgtgaaacttaatcgcactaacttccttgcatggaagtcttaagtcgtccctactataattggatgatcttgtgagatcttgttcacagacgttcctccatcgcaaattcttgttactagcgaaccaaacccccaatatcaaaaaagaaagtgccaagatcaattgattctctcctggctctagtcttcaatgtatgagggtgttcttggatctgttgctaatttcacgatcttactcagacttgaaagccttggaacaacgttttttgagccaatcttgagcacatcttcttcagctcaaaggtcagttctcacacatgcaaaaatgttacttgacaatcttggataacactgataaagtttagagtctttttgatgcaatcaccatcgctggatccactattaatgagcaagatttcatattacaacttttcaatggcttgaatacgactctgtggtgtctggaatcacttcaagaaatgatctcttgagtattgatgaagttcaggctcttctcatggctcacaaaagtcgtatggaacatcataatgcgctcattgatctaactatgaaaatgcaagcgaatgtcacctttggcaactcctgaggtaacagctccaaacccccttagtatgctaattgtgcgaactctactagtcgtggttttggtcgaggttacacttcacattctcgattgatttgtcaagtgtttcttaagatgggtcacacagctgcagtgtgtcactaccgctttgataaaaattgggttactctaaaatttggaccaaatactccttgagcctttctcactaaacaagaatctggttaagaaagtaaaggctattctccctaggttcttcctactttggtgatgactcaggatggtttgctaacgcaggagccactaactcagtagacaacctcgattctgatatgatctataatggcactgagacattatctattggtgatggtaagaaacttctcatctctcatgttggctcagcttgtttaccttcatctagttcttctcctttgaatttacattatgttcttgaagtcccttatattaataagaatttggtcagtgtgtccaaagtaactgaagacaatgatgtcttccttgagtttcacaaacaatgttgtttagttaaggacaaggatttcagacaagttttgctcaaggggacagttaagaatggattaaacctgctctaaaatggctcttctacatcatcacctacagctctatagtgcaatcttgcctttgcgtctcacaatagtttaatttctaattgtttcccctactattgcgttcctaaacaagatgatgtagacaattcttatactaatcttgatatgtaaaatatcttcctgttttgagtattctcctcctctatttcattcatttactagcaataacttcaataattggcactacacgcttgaccattgggcctcaaacactttacaaaagttgttacctcacattccccacactagctcaatgaaagaccttaaattttgtactgcttgtcaacaaggaaaaagccattccctatctccactagtcgagcctctcaacctttggcacttattcacactgacttgtggggaccttctcaagagcactccacagaaggatacaaatattatgtccattttcttaatgattacagtaggtatacttggatagtcccccaaactgtaaaacctcaagtctttgaactcttcattaaatggaaaagttttgtggaaaaatagtttaacttgccactcaaagttgtcccagcaaattggggtggggaatataggccattcaaaaagatttttactagattaaggcatacatttccaaagtctttgtcctcataatcatgaccaaaatagaagagcaatacgaaaaatacagacatatcaatgaaatttgactcactttattagctcaagctggccttgatctcaattactagtggcatgcattcagttgtattgtcttcactatcaacagattactaacatgggtgttagatttcacatcaccctatgaggttctatttcttaccaaaccagactacaacatccttaaaagttttggttatgcatgcttcccacactaaagaccatacaacatgcacaaaatagatttcaggacacatcagtgtctgattcttggctactcctctcaccataaaggatatatttatgagagtccataagagagaatttacattgcaaggaatgtggtatttaatgaagaatgttatccttccaaactggttccctctcatatgcctcttcttcactgcatgtatctcattctatcccttacccctttttagttactactttttcaaccatacctagttttcatcatgctaatgcatgtgcaaatgttacccctattaccactaacactgaagttgctactcctattcctccatcacctataattccaaccctaattcccatactagtaccataaactcagcctattgaaccacaaatatctcctccccattctcctaatcctcacacaattttccttcccacaccagtactagaacatcagcctactgaaccatagataattccctccccagccccaatacccatttttgagcatattcttcaacaagtttcagcttcatctgtccaccatgttacatcaaatttcaactccatatcagctctagcagattcatccactctcccatccagcagatcacattccatgaggacaaagatcccagaatggtattctcaagcgtaaagcctacttggccacaaagcaccctcttcccgaagcattattgcctagtgagcccaagtctacttaggctacccctaagagtcctcactggcttgcctctatgattcaagaatttctagccctgatcaagcaaggtacttggacacttgtactttataataaagatatatgcatgtaattgacaatgagtgggtctgtatcatcaattgaaggttgatggttccttggacaagtttgaatctaaattagtagccaaagtgtatctaaaaatacctggcattgactaggactgttatccgaatttttgcatgcttgacacgtgaatcctaatcaggaggggttaagggataattagccggtcaactccatggaccaccactccaggaaaataggggctttggtttgcgaaaagggtctatgtgataagaactcccctgcgaggaaacgatgcaggagatatccgagattaggagccactcctagtcccaaaagctaaagccactttctcccacatagttgaagtcaagtgctcccgcaaagggtatggacttttcgctaaaagcccgaagatgtcttgaaatgcgtttagctgagctatactcccccctcacgaaggccctgcccgtacatgtcaaactacggattcaagtcccaggctttttcaggtacggtgt

SEQ ID NO: 186520 - DNA, 3755 bp, Cannabis indica
gcgtagttcaatctgaaaacctccggagagtgatatacatccgaaagcacatccttatgttcttcttccaccactctctcttctactattttagcagaaaccttaaagagcccaaaaacaaaaaaggatcagagaaattgaagaaatttaccggaaaaggtggaatcccaagcaagtacctgaggagttggggtagggttctggaagtggatggatttgaaggagaaacaagtgaaggagattaagctgaatatggcgagagtgagaagagatcctcgtaaggagatgaaagaggaagatggcggcgccggagattgcttgccgccactcatcgccattagagtattcagtactgttttcttccagtgatttgaaattggcagtgaattttctttggtgggtttttgcttctctttgattttgctcctttcaaataaataaatgccacaactcttttatagcaaatactcgaacttcactatgccccccaaagaaaagttgagtctttaatctttataaagttttattttttatttttaagataattataaatatatttatttgtagttactattggttaaaaattattaaagtgattgttaaaagaccaacaaagttttgttttttttccttcaaactacacttttaaatggaaccaaaagtgtcttgaaacttggccaaactcttttctttcttctcaaaatgtttatattcttgaaactttaaaatgccaatttacaagaaaagaatcctgtgctatatttcggaccaagtaaccataatgtcctacatacctgaagcaaaatacatgtattttttatatacaataaaaacaaaattaaaacaccccatcttgagattatgccaatgctgattgagttttgtttgtagcatattatattatgccacaatgtaatttttatatgaagaatgagaccaaaatttaatttctgggctgcagcatgtacaataaaatgccaccagcaactgaaacattaagagactcaaactgtcctgccattggaatgctcacaagctcacactcatgtcgagatttctctgataggccacccccttcactacccagaaccaagcacaacggaagatttgaataagaatcggcaagtttttgagaaagttggaagactggtttcctttcatcacgactatctggatgtgcagctagcattttcgcttgaaattcacttatgaggttttcaagatggaaccaactgccacaaactataggcagctgaaatgaggctcctcggcttgcccggattgctttatcgttgaatggatcacaacagccaggaagtagaaaaattccaccctgttgaaaattaatcctgggattaggcttctcagttaaagtcaacaaatcatgaccctttttttctgctatcaaacagtatttacatataacaaaagatgcaacagggtttcggagtagatattaatgagatatagaaaggaaacaaaactgaacaatatatgttaaaggcagtaaactgaatccaaaaatcagagatgattgacgaaaggctcagaagacaaaacagaaccacaaagtaagaatgatgagtgttttaacttttcaactaattccatacccatttaaaggccatggctgatctgaccaacgtaccaagatttccaggatcctgcagtggataactaagatgaataagtaacataatatgttgccgttaaataccagatataagaaaacacacttcattacatttaaagcacagaaaaaacggagattacaaaaaacttcaatacttaagtagaggaaaaatcacctggatgccatcaaggaccagaatcctatgtgcaactgggaaccatctttcacagcctgcttcttgttgctgatcatctaagttaaagaaactggtaggaatgctcatgagaccaattacttctatagattcagttgattgcaacccagaaagctttttcatcactgcattgctcacacgcacagtacgagcagaaaagccacctatctcctcaggtatttcagctttatcgagtacaagtaaacaatccattctgacagttttctcatgtaatgactcttgaaatttatatatctccctgaaaacatgcctatgtcagaattttaccagtgtagataagttgttattgttgacattggattatgtggaattctaagttctaaatggaatctagaaagaagaagaagagagacagagagagagaaatttgaattgcaatcacagtagcaaaaaaaaaactttaaaagcttaacttttcaacctataaaatgaggaactagtctagcatctaacttctccttttaagcagaaagccaaaaacggtgaactaccgttaaaacaagtatattaaaacccttgaatgcaacttctaaaacaagtagggagttggcagcatttcgagctaggagttgaaccaatgctgctattccaaataattcaatttgatgaaacaagtatataacagttaacactacactagtgaagttattctataagatttcattcaatatcccctataatttagatatctaaaacttttgctaaaccaatcactccctaatcctatgccagtatcccaaagaactaaactttttgctaccattttcatcagctggcattttaaagtttctaattattgtactatatatctattcaacaatcaagtggtcaatcccacaaggttttggctagaattttcctgtattgcatattagatttaggttcaatggttcaagccgccaagcaaacaattgatcatcagtagttaattaactattcgcaagagttgtttctttctttgccatgaaaaatggttgccaatttcatcatatataataaaaaaaacaatatactattagacaacaaaaaataaaattgctacattgccaataattacactccaaagaatcaaaataaagctcactgaggctttgtattctatcgaaactccatcctttctcagaaatcaaacaagttggggaaaaaaacagatagaagaatatttttgccagagaaatttcagaaggcatagcaaagaaacctgataggggtggcaccaacgacgagaacagaaccataagtatgtcgataagaggagctgaggcggagcttgagacagtgcttcacaaaagggtttgaagtgctggtaatggatttgacgtgagcaggcaatggaattttcgaacccaccagtgagacttcgccgtgattattttctgagtaagagttgttatgaaaatgagttcttctttctggaattgataactctgatgaattccatactctgagcttcgaaggataagtagtcagtaaggctgtattcatgcacagcattttctctcccttttccgttgatttattgcatttgcgcttctctgcaacttatattgctgctactttattttaattataacttcttcaactatttcagtttcaaaccaaaattctccattttcatatattatgacttcttaaaaacacaatttaaaaaagttataaccgaaatagggacttgcccaaaagaatttggaagctagtaggttgatgggttttttcttaattagtgtgatgaaatatttactaaaaagaaaaaaaaaagtaatctggattaaactcctaccagtttctttctcaatttaatcattaaaatatatcaccaaaactctacatttaatgttcattgtcaaaaaaaaaaaactctacatttaatttttaacaacttttttt

SEQ ID NO: 186521 - DNA, 1442 bp, Cannabis indica
ataagaagaatctgattgattcttgcatacttgcctaccttcttgtcgtcatacattcgacgggcatgaagagcaccaagcataagtaaggtagccacagttgcaccaggcaccaaaaaagagtcacctgcacaaacaccatgaaatccacaatggttttatacaataacagaaaaatgacacaattcaatggcaagacttcttacttccaaccacataggggctaggttgggattcctcttactgctcgttgttataaattctttaattacttataccaaacaaaattgtattaataaaaaaaataaaataaaaaatagaggacaaggacttctaaaagacaaaaaagaaaaagcataaacacgaactcaaacaaagaaggaacagaaaaaaagctaaacgccaacatgaggcaaaggaattccagcttggcttttacagctcctcactgagataatacagtaattccaaacacgctttaaattcgattagttcaaaatttcctacctaaaaagcagctttctgaaacaaactgtaagtaaagcagttctcaagtaattggcctgaaattcaatcacttttttttttaattttgatatctagcttttagcttttgatccccttttagccagtataaacataatattcaagcagcatagtattacaaaaattggcccataattgttttccaactctacctacacttagactatttagctaatataattacaagagacaagtacttatacttcgtgtttattgagtattcaatttccaaaactttccacattatgacccatatgtatgagttttaattcttttcaacttcacaaaagaagacgattacttctaacaacaaagtgtgtcaataagtgttagaatttgggataagatgaatgaggttccatctcaaaatcaattggtaatgggaggagtagcctattcatctatgacaactctaataataaggtacaaaagaaatggaaaacacaagcaaaatgtaaactaataaactttcgaatttcgttttctcgcacaatcactatttttttttttttttgtcttgaaaatcgcacaatcactattgttttagtaattcttcatctaacattagtaaatgtaatcaaagtcatcgagtttttcttttttctttcatactttaaaacaattaagtttaaactccgaaaccagttaattacgtgaccaactgacctttagaactgccacttccgccattaaaagaagcttgggcttgagcaactgcttgacctcggagctttctaataaacgaagagaaatgacgacgctggttatcatggagggaactgaggtgagtagagttagggaagactggaactctgtgcgaaaccctaaatttcattgttccgagctcgcagcaatgaagctgtagctatacgttttcttctcttctctcttctctc

SEQ ID NO: 186522 - DNA, 4307 bp, Cannabis indica
cctaacacgagagagagagagagagagagagagagtagtaatagtaaacaaataaagcttcatacaatatatataaatttttgaatttgtttttgtgtgttatatattgttatatagataaatacgtgaacaaatttgggttggaagggaaggtaaaggtttttttgttttaaaattttcagttatttgattttggtttggtgaaactgaaaataatatccaagaaaagatttttcgcttaactgaattgtcagtttcccgggaatgtttaattaacctggggctcttcgttttcttccttatccaacccttatttcatgatcccatttcggtttatgaaactggtccgaaagatttctcatcgtctggtgtttctgggttgattttgggattttttttctgggttttctttgtctcgtagggaatggaatttctgagatctgaaaaaaatcgaaaaagtaggtttttttagaggttagtgggtttggggggtgagatttgatctggtgttgacgacccaaatattaatataaaatattgtttatatattttcttgggtgggtagctagcttctatattaggcttttagggatgaagagtgaggtgggttttggtggtagtggagtttggaacgatgaagacaaggccatggttgaggcggttttgggtactcgagctttcgattacttgatatcaagttccgtgacgaacgagaatctgttaatggcgatagggagcgacgagaatttgcagaacaagctctcggatctagttgagcgtccaaacgcgtcgaatttcagctggaactatgcgattttctggcaaatatcgcggtcgaaatctggagattgggtcttgggttggggggacgggtcgtgtagagaacccagagaaggagaagagtccgaagccacgagaatcctcaaccttcggcacgaggacgagactcagcagagaatgaggaagagggttcttcagaagctccataatttgtttggtggctccgatgaggacaactatgctcttgggctcgaccgagttaccgataccgagattttctttcttgcgtccatgtatttctccttccctcgtggggaaggtggccctggtaagtgttacgcttctgggaagcatttatggctcctggacgctttgaaatcttcttctgattactgtgttcggtcttttcttgctaaatctgctggaattcagaccattgttttagtcccaactgaggttggtgtggttgaattgggttcagtgagatctgtgggtgaaagcttagagcttttgcagtcactcaggtccttgttttcaacacaatcttcgctcacaagggtttaagcccatagccgtgttgcctttgatggttgataagagagatgagaatgttaatttgactaattctgggattttggagagaaatgaaagtgtaggtgtacacaagatttttgggcaagatttgaatgccggtaccgttgcccggcctcattacagggaaaaacttgctattagaaagttggaagagaggccatgggatttgtatcctaacgggaacgggaatcggattgctttcgctggtccccggaatggggttcatggttcaacttggccacatagtctccaggtccagggtgtgaagcaacaggggaacccaactgaaatctatgcttctcagtgcaccaagagtactaatattcaggagattgttaatggggttagggaagattttcggttgaacaattaccagcctcaaaagcagcaggtccaaatgcaaattgacttctccggggccacttcaaggtcaagtaatcaccggccggctagtgctgaatccgagcattcggatgttgaagcttcgtgcaaggaagaacggccgagcactgctgctgatgaaaggaggccgaggaagcgtgggagaaagcctgcgaacgggcgagaagagcccctcaatcatgttgaggcggagagacagcggcgtgagaagctgaaccagcgattttatgctttgagagcagttgtgcctaacatatctaagatggacaaagcctccttgttgggagatgccatagcttatattaacgagcttcaggccaagcttaaggtcatggaaacggagagggagaaagttgggagctgttcaacagcagcagctatggaagctaataacccggatatggaaattcagtctagagttcctgatgttgatgttaaggttgttaataatgaggttatagttagagtaagctgccatttggagtctcatcctgcatcaagagttatccaagcattcaatgaagcacaaatctctgttgttgattcaaaatttaccactgtgaatgacacagtgtttcatgactttgtaatcaagtctcaaggatctgagcaactgacaaaggaaaagttaattgcagcattttccattgaagccaattccttacagacgttgtcatcagttggatagtaaaacaagacttgttactcaagtagtgcatagggattatattgaagaactgtttaggagagatgattcttcaagagtttttgatatacagcagcagatcctataagggacaagcagtgtcagctagaattagaaaagagaaaaaaaaataactatctgttgactaagtagtgcagcaaattttatgtgatttgttaatacttttatagcatacatattttgtcattaagtattcttgcaaggtggatgggattaagtttgtaagtttaacctactcttccatcgatggtatgaagacgaagctgatattttcttattcttattttcatttcttctttccccaaagtactaaccttttcttctttttctctagttccttgcatcattagcgtacttattaattgttattactgttcctttagtatattctttacgttggatatcaacttcacaacaattcccctttgtttattgtattattacctgaaaaaactataaacaaagttcatatatggagaaagttgtctattctgttcttggctggtctgtccatattttgatcatcataccatttcttttttgtctttttttttcttacttttaaatatatatatttctaggaaagtcttgtgttaatcatcttattctactttttttttatggttggttctttgcatgttgttggttagaatgagtatatcatctgctgtagctgaaaacgactcaaagtcttcatgaaaacgtgtttttttgaagtttgaacctttacaagttttcatccatgtcatgatgttgggaagccacataaacttgtgctaaataagcttttttattctctttctcttttttatttaatataattgatgcaatttggtgttgtgtcagctcttcctttagtgacattgttcaattcataatggacttcagagtaatctagtccttttctagtactagctcagttccattaagtaaatgtaacccaactaaaacgttttacttatttttctttgaatcaatatttttcctttcaattcctacatcacatgtttttcaagtgggctgccagtttttggagcactaatacaaactgctctcacataaaaaataattaaacaattttgtcaactttttcataacaataattataaataataataataataataatagtaaaagaaatctataaagtagtacatatatgtttctaaataatatttgttcttgtcggaaacattcttggccacttttttttttcttctacaaaatttgaataaatattctaaatattttctggttattaagggaaggtttttgaattaagacatggacacatgaaaagaagagaccttgttcttaaattctaggccataatatattccataaagtgattacaggcatctcaaaccaagaaaaaagaaaaagaaaagaaaacgagtgttaggaaccggaatagttaccaataagggaagagaaatagaataatttgggagtaaaagaaggcatgtgtgtgttgaagaagaataaatattattaagttgagtgtgtgatactgatataattgttgtggtccaaattgtatacgcgttgggcacatttaatgttttaagagacgttttcatgttttgctgggcacctcttttttcagccaatgaagaaacctatattgggaaatcatgtggtgcatgtgtacccttttataaggcttaaaagtaactcacttgacactaccctttttcaaaattaggccatcataaagagcgtgacaaacccccctattatttattgattgatataaatatatataggcacacatcctgatcctaatcatgcatatatatatata

SEQ ID NO: 186523 - DNA, 2013 bp, Cannabis indica
aaaaaaaaataaaataatagagtttatgtcatgataataataaactaatagagaccaactaaaataagttagaggaagaaaaaaaaatctcaacttttgaccttaattaatttctaataaaaccaataatttaaggtaaaattggtaaaattaagggtggttagggtgtgatttgattaattttgaccctttggaaactaataaaatgacttatggagtttgaaattgaaacactatataaacatgttccatgaaaacttaaataccaaataaagtgaaaagcattatcttgctcttgtcaactaaccaattaaagcaaaaaactgcattataggaaaatttactatttgttatttgtactaattattaaagtggtctatattgggaaaatatctagttaacaaatatttggaaataatgatccaattttgaagttggacaaaaaaagtcatttgcatgaagaacaatatgagttttttcatcgtgttttgtctttacttacacgtttattggaaaagcttctcacaacatctaagattgttctaaataaaatcacacttaattttagagttttcaaatgatggactactgaaaaaaagatacatcttgttagcataagaaatacacatcaatccatttaaaccaactttctacgagctatgtgaaattgcacaacttacttattctttttctttacaaattacgagactgtgactgttatatatattgtatgtttttttaaaatttagtaaaaaaaaactaattcaattagaatcgaataaaattgatttgtgttagatctttcattgctaaattgaaaaactaggtatatttagtaaattatgtttctaaatcaaacttataacactttttcattttcagcatcaatgatttacaaaatcttaatttcaataaagttaaggtcattgctgacggaactgttaattatcttaatattttttttcacagtttcttctgtccccctcctcttaatttataattcctccctctgtatgtgaaaatcaaggtggtggtcttcgggttaagtttgttgatacgatgcgtaattattgtcattgtcagaatagtttataaacgttaaaaagattatcaattttctaatgagagaaaaaagaaaatgaatgagagaattatagaagtatctttgcaaacatggtaccctaacccttttggtgcatagaaattcaaaggctaattatgatttttgctcttgaatttgtaaggctgttaaaaatatttcttaaactattgtaattgttgtatttaaggatttttcttcaattttagtaagaaaagtctaacatggttgaaaatttaggagtatgatttagtacatgacaaagttcgagtgatataatttagtaaatattaaagtatgagaaacatgatttagtacataaacaattaacgaattagtaaatttgaataaaattggacaaaagtctttaatccaataaatttaatagttcgagaaatattttttacgaaaaaaaatttatgagatataatttagtacatgttaaaatttaggagataagaatcttaatcaactaaattcaaatacctatatttggaaaatgaaagaaaaaataaatatgacacgtgtgaagtaattaactataaaaaaaactcaatgattggatactcaagaagatgaagaaatgataggaatagtggagttagtactatagtgaggaaatgtgtaaaagttgtgtagggtgatttgggggacaagaagcggcgcgtgaggcctaactacgatagctcagccggcacaaagtgggacccacacacttacaccatttcatctcaacccttctttcatattcattcaattcaaaacaaaacactttctcacactttctttctttatctgttttgcaaatattattggttgaattttttattttataaaataataaattaaatattataattttttaaaataaagtgtccaatttattattttataaatacttataattttttttt

SEQ ID NO: 186524 - DNA, 6025 bp, Cannabis indica
aacaaattcgatcaagcgataatcttgcagacttattcacgaagtcattaccaacatcaacttttgagaagatggttcacaagattggaatgcgtcgattaaaggatctccacgaatgccaaaatgagggggagtaatttcatactgcactcttttttccttgaccgagttttgtcccactgggttttctcggcgaggtttttaatgaggcagttattatggacatccaagggggagtgttataaatagtattaattatgtggatgtccaaatcttttatttattaccattaatgtaatcaacattccctttttcttagtttccctttctcttagtttcttaatatttgactcttgtatgtgtataaataggagatcacctattggaataaaacactcagaaaattctcatctcttctctattttctttctctaaattataatattacataatactaatatttcataataaataaaactatataaatataatatcaaaataacatatgaataacaaaaaatcagcaataaattaataaaaatacaatataaaaaaactatattttgtgtaaataaaaataattataagaatattaaaatttcgtaaaataattataaataattataagaatattattttgtgtatttgtgtaacaatccctagaattaaagtgttttgatttgaggcaagccagagtagttttctagtccgttcccttttgtttatgacaaactcaaaatcaaaggaagagttcaacgttcaaatataaataattggtcaatgttattttcttgcataactagccaccatgacacatatcagcctactacccacaacacatgaactcaaaatagactcaaaccaacttagctaataaattttgacattactatataaaaaaaaatatactataaacttattttgatgtactttttttttgagataaaatggtgacattttattagcaaactgaatcaactattacaatgtttaaaagatcattcggagcagtactttcagtgaacatacgaactgagtgaaaacaagagatgcgagccatataatggacagccttgttagcagaacgtttaacaaattgaatctgaacagattttaaagaaacaagcagctctttgcactcttaaatcaccacgccaaagagagagcgtagaggaaccgaagaatgtaaagcttgaacagccattcgctaatgtgcttaattacaactattactaattaagaaaaacaacaaaatcaatccataaacctatattttatgtctccatcacattttcacattcatttcacacacagtaaatctgataaaaacctaccttttatgactttgagctaattttcaggttaataataataataattaattaattaattaattaataataataataataataataataataataataaactcactctcctctcccacacaactgaatagatcttctcaattcagattcaattatgctctaacaatggcagattcaaattccaattcccttctcaatctccattcctctagattttgattttgattgatttcaattggggatttcacctcatcttcaaatgggttcctctcaatccatacaagttccagaaaatagcgacgaagaagaagaacacgatcaacaacaacaacaacaagatgacgaagaagaagacgacgaagaagaagaagacgacgacgaaggagaagaagaagcagaagaagaagaccacaatggcgagctcgacaggaggaggaacgaaatggataatcatttggtgaagaaggttcttcaacaagaaccggagatgttaccttgttatgcatcggcatcgcctctctctcctcagctatcttcattaggtacgcctcgtctcggaccttccatcaaggtttgggacccttacaatgtgctcgctccgcccccaccgcttccgcctcctcccgtcttctcgcgaagtttttcgtctaatgccatggaggaggatcgggtgatgttcgaagtgtttttgattagtcacggcgagtgtcagttgagtctgaggcctgatttggttgggggacggtgccctgaggctgcactcaccaccaatgggaagcgtcaagcaagggctttggcggtgttcttgaattcacaagggattcggttcaatgcggtttactcatcgccgttggatcgggctcgatccatggctgtctcagcttgtcaggtattattattactattatttgttattcaactttgtttgttttctgacatttaaatcagctttttgaataattatatagttgaaaaaaaaaatgttctttgttgttgggtctgtgaaatgaatgattagagcttgaattggaatgtaagaatgtggattctttcccatttttggtagtttgatgtgatgtgatattgaattatagaataaccttaatcctaatgttatagttggtcccagattaagctcaaattgttggttagaataggcaatacattgtagttgatttttctatacttcaacaatgagggtagccagctcaccaaatatatgatattcattggaaagtggaaagtgttaacttagctaatgaatgtgcaacgctcttacctagcctaggacaataaaaaaaagaaaaatcactaaaaagattacataaaccaataatctctagcaatccaaccaaggtgggagttgtcaatagaattcttcttgatggtgttgatcacattaatgcagtcggattcgatcgagacaaagttggaagtatccattgtttacatttttggaaaataggatcccatttaacccaattatttatatatatatttgagaatcagaatattatagcaagtgctattagtggggggggagaccatttgagctacttacataattcttcatatctgattctgatcatgatatcattgattctaataatcatgcctttaatctcataatattgatttttttttgagtacaacgattgtgaagaagattcaaccaaaatttaattctgtcttagtgtagaattcgggaaattatagtatgtttaaattggctgtctgttgaaagttgaaaatttgtgtacaactaaaaaattctgcaggaaatgaactttgcagaggaacagattcaaacttctgatgctcttgtggtagatgagtcaggggctattgggagggatgggagggatccctccggtcagagatatactctgctgaaatgttgagctttattgacaatgttcagcctgatttttgtccaccctcaggggaatcgcttaggcaagtggagtttcgaatggttagttttctaaatgggactgtgttggggctgcctgaaaagttaagatcagatttctcgtcactccatccgatggagaaccaaggttttccactccataatcctcactctttatcgaattcaatccatgaccgagaagggtcttcactcgcagcacctccctgggatgcgcttcagaggcagcagcgccagggaactgggctactaaggaaaaagtccggaaaaagtaggctacagtttatgaccacaactggagatcatgaggttgaagaagaaatttcccctcaagagtccaatcatcgaaactccctacatgatataagcggcaggagctcctcttatgccccaacttgtattggtatttttagccattcagtaccaattaagtgtctcctcactggcatccttggctgcagcccgctaatgtccaataagatgtgcatagacgattcttcagtaacgatgttgcagcattcatggaaaactggttggcagataaaaaagttgaacgataccgcacaccttagactgctctagtcagagcatatagcctgaaaattttccgcaatggattcatcgaccaaagcccagcaatggcatcggtttggtttctgaactaaacatgtatgctgcaactcatgatgttggatgaagttgcactacattttgcacttcttttgttaccatctttgcaatacttgttgtttctaaattaactagctcccaaattgttgtgggagttgggattatttttatatggggtgattcttttgatttgtagcaatttcatggagtaactatagctgtaatagaaagaaaataagttgttattattattatttaaaatgggaaaacttttatgagcttatggcagtcatttacttcttgtttttttccctttaaaagcaaattctcatgctttaaagggtgtgttattcattgtatagatttgggcattgttacattaaattagattattatgatttcagtgcttcaatctgtgctagtggaaataactgggcctccatgtgactcttatattttattactcttaattcacagtttcaatagcttggactttttttttcataaaggaatcaatctgaatcttcacctgaaatttttatgtacttgatatgttttctttttatttggaatattcatttgttattttctgggaaaaaaaatcagaggggtttagggaacataacctttcttgatgtatgcaatatgataaggcacattaagacaaaagatgaaaagaaaaaagaaataagtcatgttagtttcttgcaaagtttaacactttatttcaaaataagagagaatccttccccactttttctagttcattattttccgtacttaatttccattacctttaatcaatctttgtggagtagggtattaagaaaaatattatgtattgtaaatgtatgattagtataacagtagccataaacattcatgtgaaatcaaatccaccaaataacaaaatttttaagacaaggtaaagatcataacactagaaaaatcatattttggccacatttcatagttcaatccatctttgaggagtagattatttaatattaactcaaatattttgaccctttcgatatctaattaggtaggtgatcatggtttatttgtagcacaagaagttagagcatacccataaaacaatatagaagattttgaggcaagagatggtactctactctcacatcacacgtgccaccaccaaatgaaactataacagccaacatgggtcataactcacatgggggtagagagatcggatcaaacaagtgtctcacactcactccaaaaatctagacccctttagcattatatatctatatatataatacccttttttttttttaccttatttttcttatgaatgcagataatctaggggagagagagagagagacctgtttgtcctactctcaaatatgtcacaaaaaaccataaagaagacactaaaaaattaacactagcactgctatcccgtgatacccaccgagtgaactaaacaacactataaacactcacacaaccacactatacataaccccttttatcctctcattctctcattctctcatctcaactcaactcaaaactctctctatttctatctttcattctctcaaatggccattttatcatcatacaagttttcattagccttaatagccataaccatagccatattccttggcaatgcaacatgttcaacaagcagtggtgtgcctgcaatctcagcctctccagcagtgttaccgtacgtgacagcgcccaacatgtcctcattcttcccttctcatcagcccgcagcggcccccgcccccgcccccaagcctgagtctgaggcctttgcacctgtgcctagctcgggagagttcgtgggaagggtctcttttgctcaatcaaataatccaaaaggcttctcattggctttgcattgcattatgggattctttgtggtatttttctattgaaagttactttattatgttgttatattgtagttatagatttagcatattatatagctttatgtgtttagatcagatgatattgagacttaattagaactgtagaagtaattgttttgttttgtttttcttttgtttcatcaccgtttgattcgatacaattatgtaacaacaattgttttttgtcattttgaaggaatctaaggtgatta

SEQ ID NO: 186525 - DNA, 2664 bp, Cannabis indica
aggatagtttagttgcaattctttatgttttttaatgggatattatttcacaaatacacaaaaataataaaaaaatattttaattttatccccatgaaaatttcccgccacaacgaagatttctcaccccgcccccgattgaagatatgtggggatgagggcgggatgggtattcaaattgttaacaaggatgggaaatgaggagcactccccacctgttacccacccaatttctattcatgtcctagaggcacaatttataccattcagaccatctcgaaaaagtgacacaaaaaattgtgttgtatttggcgcaaaaaataattttgtgatagatttgcatcaacttgtagtattgtgctccaatgtacaatttgaaaacataatgaaaaatttaatatttttttaatattttttattaaaaatacaagaaatgataacttcgtcattaaatttgattatataaaataatataaaaaaataaataaattttttataatttaatgtgatagttaaatattttaataaaataatatagatgacaataatgtaaataaaaaagcatgcatatattatgatacaaattttgtattatagcatatgttaagccaaatttgatataagacttgtgatgtgctaaatttgaatcaccttttgatacactatcagagcacatttttttggtaattgagttatattttagcttattgcattcaagataaaatattctttcataattatacattcaataaaaatactatttcttaatgaaaaaactatgtatttatattcattataatatatgtttcaattttggttatggtatttctaaaatatacttgtaggtacaacaattggcctcttaactttattgacaacaagttttctagtatggtggaaagtaaagaagagagaattgacaaatctcagagagaagttttttaaacaaaatggtgggttaatactgcaacaacaattgtctactcaactaagtagagaagaatctcagtcaacaaaaatattctccgaggaagaacttcaaagggccacaaataattttcacgaggatagaattgttggaaaaggaggatatggaatagtttacaaagggataatgccaaataacaaagttgttgccattaagaggtccaagctcggtgtccaaactgaaactgaacaatttattaatgaggtaacagtacttttacaaataagccatagaaatgtggttaggctattaggttgttgtttggagacagaaacacctttgcttgtttatgattttgtaagtaatgggactttgtcccaacatattcatgagaaatctcgagatgctcaagtgctttcatgggacttgcgggttaagatcgccgaagaaatagctagagtacttgcatacttacactcagaatgttccacaccaattatacatagagatgtcaagaccacaaatatattattagatgaaaactacatagcaaaagtgtctgattttggagcttcgagactaattcctttaaacaaaagtgaacttacaacattggtgcaaggtacactcgggtacttagatccagaatactttcaatcaggtcaattgactgataaaagtgatgtttatagttttggagttgttttacttgagctattgacaagcaaaaaggcagtttcatttgaaagattagaaaatgaaagaaacctagcaatgctctttcttaagtcaatgcaagaggattcattaattgagattcttgacaaaagtattgtgcaagaaggcagtattgaggcaatcaagaaagttgcaaaacttgcatcaatgtgtttaagtgtaaaagggcaagagaggcctaccatgaaagaagtagctacggagttagagggattaagaatcatggaaaagcacccatggagagaagaaaataatttgagcccagaagaaagtgagtacttgcttggagacaccgcaatggtaaatgctttccaaattgatattgatagcaaaatgtactctactagtacaggatgtaacaactccaaaaattgtattttcattccatacaaccatggacgttaaattaattgacatggttatatagttagctagcttgtattttttttattgtttttagtttcaatttttgatcattatcatctatgtcgaagatttacatatgtataagtacatatacatgatatatcacatgttacatgtatcattcaatcattattataataacaatgagggtaatttttaatcaaactccctgaattatagaaattagcatgatcaatccccaagacataaattttgggtgcgcagaagtccccgtactacaaaatgttttgttgtccactctttcattatttttttattgttaaatgtcaaataaacctgccattgtgtacacaagtgtacacgtggaataattttattagtccacatcattttatttttttgaatattataaaaaataattaaaaataaaaatactccttttttatttctttcttcttcttcttcttctccttgtccttgtccttgtccttctccttctccttctccttctccttctcagtcttaccagtgcgaccctgagtaaaatttggccctagaaaatataattttttgggccccttttttaaaaaaataaagggtaaatggcggca

SEQ ID NO: 186526 - DNA, 2422 bp, Cannabis indica
ttgttatttatgtctgctgtcatttcatattgtttcttaattgaaattgatgttaattcagttacgattcactacaaaattttgtttgcttgaattgaggaaaaatttataagttgggaaccctcttctcttgcatgtaattgttgtgtccccgtttgatacattattaagtgatgttttattctgatgattggaatttgactatataggcaaccgacgtggtcttctgtggacgaattctaatgttcctggcacatttttttccactatctgagcgttcaggtatatatatagtttatatctgatcatatttaaaagaaaccactctgtataaatattaggaaaatctgaaggaaaagggatcggaaacgatctcataaatttttatatgtatttgtttcttactctgtaatctattttgaaaacttgaatcaatagaagtttttctccttgccctttcatttggaacgcaatagccccttcgaagattaaggtttccagctggctactaactttgggtaaactcaacaatgaggagactcttcagaagtgacagcctttcataaagatcttcccatatgaatttggagtgtgggcatagcctcgcctttttcaagacattatgtcttgcgggaagaaacaaggcccacttcaagtaggaagaaagaggtctggaacatagccattatagctacatgttggcaaccctatctcaaaaggaacagttgtatctttagggtatcgaagaatgcatttaggaaaaaattaaatattttagtcttatgatctataggtcctacagttctcttttgtcggatgtcttgcgagattggaatctgtggcattaatttattgatttttactccctttctgtaaccaataggactttttatcctcttgtgtaatgttttcttttatgcttaccatgaaaatgaaaatcatttttatgttaagcagtattcattttaatgtttctcgtttgtttattgcttgcagctgtaaatataaaaggagtttttaacacatcaaatgaaacaaaatatgagaaggacccccctgatggtacatgctagttatgcaattcatggttttcttgttttaggttattttactgatcattgcaactttactaatgttcttgattactgattgcacatagtaatcttttctacaaaatttcaggcatttccattgatttcaacttttataagaccttttggagtttacaggtaaacctatcttttgaaatcatggttatgtgacaaaatatgaaaataattggtttcttttaatgacccttcttacctctcttctagagagtaaaataatctactataattattttgtattgactactttgtcaacaataaaataaataagaactagaatagatgaaatattgttgcttatagcataagatgctagagttatttttcttcatgtaaagttactggaattgtagcatagccatatattgtccctctcgatatcatatgaagtgtaatttttggctcttgcccataaaatcagcccatacttgtaagagtcgaagttctcttttaactacccatgcagtatggtttttcatttattgcatctatattggtaaacatgcaagcaactgcttatgatgagtgcatgaatcgcttataagatttagatttattttaacagttggctctatgatgtggattcttcttttacatctttttgataaataatgcaaagtagggttgttttttatagcagctaattaacttcttcatttattttaatttttattattatgtctttttcttaatatgtaggaacacttttgcaatcctgcttccataagtctcgttcctatcaagtggcagaaattcttgtccaatttattggtataactgaatctctttattggtttttttgtttgctttatatgatattgcctttctttcttaatttattacgggagtgcttattttttctctgttgtctataccggaatactatttcttgaattttacaggttgtgctgaatacatttgaagctcaacctttaagtgatgaagagggaaatgccaataatttggaggaggaagcagcaacttttagtataaagtatcttactagcagtaaattaatgggtttggaggtatatgatgttgaaacattttgaaatgtatttagcttttactttgtggttgaccaaacctttaatttattttttcgcttttccttatatttctctgggatggggttgtggataagacagttaaaggacccaagttttcggcgacatattcttgtccagtgccttgtactattcaactatcttaaggtaatagcaatttttgcaatgatctatttcagtttttatatgcacttagtagtagacactaactctcatttgccactaggccccaggtaaaagtgaaaa

SEQ ID NO: 186527 - DNA, 1746 bp, Cannabis indica
tgtccctctaaaccaataagtattattcttctgaaaatcatttcagatatcctatatttacaaagccatacaatttagataaaattaattagtaagttctaaaaaaatataaaaattaattgactaatacaagaatagaccccctcttaaccaattattgcaatcttgaagtattttactttaataatttgattcccttcatctttataatgtcctacttaggaaagtcacatggtttaaacattgaactttataatgactttgtaatccataaaatgatttcataaaagattttgatgatttagaacttaaattcatgataaatatcaattaaactactaatatatgcatttcaaactgatctggaccttattttcggacttttattgtgatcttttgtattttttcacatatgaaacactgacaattgtagatttttgattaagctcaatgggaccttaaaaatcaatgagtttatggaaaaaaaaatgatttttcttgcttgagatgaatcgatgggtgctcaatgtcattcttagaagatacatacgttttaatttgtgtttttatttgttagaggtgatgcatttttcttttaaaaaaatgagtatttttttgatatctggatgttggatattttataaagggatttgagaagtgtaaaggttaaaaccacgaccaaaatatgggttgtattaaagttgagtatattttcaagctttaatacatatctcttatatatatataaaattcacctcaagcattcattcaagtgaaaaattgtgcctctctaaggaatataaataatcatgaaaaaaatccaaaaagtaaagttcagattagttagaaatgtatatattagtgttttaatttatatttataatgaatttaagttataaattatcaaattgtaattaattttgtgtaatatccatgaagatattaaaaaaagtagaagaagaaaaatggagagaaatgaagagatgaaaaattatagaagagaaaatgagaaaagtgggtggtgactggtgagggtggatgaagaaagagagagagcgaggtagttttgaaaatattaaaagaaggaaaagcatattttgagagagatatgatatattatgtgatatattttttatatgagatgacatatgaagaatgaaaactcaactttttttctattcttcatgtgacagttttttctattcttcatgtgacaacataactaaagaaaagtcccacatattgccacaatcaattttatactaatgattcatcttatatccaaaataactctctcataatatcttgaaacacttcttatgctctctctttccctcttctctcgtctctttcactattaaacctccaatggcacccattaagtcacaaaaaatgttcacatttccttaaaaatacctactctaacaagaaaataaaagttgttgaaggatataccctgatttttgttgtttgtaatcttcgaggaaagactttttggataagtcattttctttaaaatttattgattggatttttttttgtttggcattatattttttgtgtttttcaaactaaatttgtgcttgtctttgtgggttcaatttgattttttgcaatatatttttttatctgcatttcttctaacactttaaggtattttgtgtcgaatttagtttaaatggggtttgtatataatttgatgaatgctcgaaaaatgcatgatatctaggttagtgatgagctcga

SEQ ID NO: 186528 - DNA, 2643 bp, Cannabis indica
gatgccctgcttttggttcaatcattgactgctctaaaacttcctccttgttggaagtcaagggctgctgttgctaagatatggagtttgtttgatgtctttactagttgtgttttcatccatttgaatagaattgacaatggtcaagctgatgcacttgcaaagcttgcgcgaaacaatgagtcttttctggaatttaagttaagggagggatccccttttgtgattcccaactatgttttctttaattgaatgaacatcttttctctcaaaaaaaaaatataagaaaataagttggtctatttaagaaaaacgggtcggtttgaataaagcacgacataaattcgatcacaacacgacattattaaatttgcaggtcatgcagaaactattctataaaattattgtacggcacgacacgactcataattttatgacccactatagtacgatctatattttgataggctctaaaattatgggactagcacgacacgtatcgcaagttagagaaatatggttgtgggatgtctttagaaggatcagttgaggtttagaatgagaaatttggtatatcaagttggaagaagtttttttttctttttcccatgaagatcttcaatagagccaccaattctaaataactgcaacaactatcaataaaacaaaacacacattaaattgtaacaagtggggaatgaaagaaaagaaaaatctgaagtaaagtgataaaccaaaccaagcaaataataaaattagtttaattgcaagaaaaaaataataatagtaaaatttagaaaataaaaacaaaaaacaatccacgtatattaaacaaaacaactgattaagactctgtataaggtgacatttttttttggaagagttcctttttttttaaaaaaaaaaagaaatacaaaacttaataattttagtttgtttttatctattttcaaaagttagagagaccattaaaaaaatgaaagaggataagttttttgtctatattttttaactttaaatttcattcaattgaattaattcagccttaacaatattaataacatcaaaaaaggaagattatacaatctttaacaacacaccactaaaaatgaataacaaaacattcaaatttctgacaagttataacacttttttaaaaaagtaaaaaaaaaaattaagttttctacatttgtcaatacagaacaaactttttatatttctctaataattacaatatgatttttagaaaagaaaaataagtttagtgtatagaaatactctgtgatgcttgtgatgctttcttgacccctgtggaggacgtgggctcggcggtcggtgcttgtgatgctttcttgacccctgtggaggagaatgttgtatctcctccacaggagccatgagaggggtggcttggaactgtagagggttggggcagacctctacagttctggagttgaaagccctaattcggtcgtgcgatcctgacttcatattcattaccgaattaaaagtggatgctacaaatctggtacgttctcttgagtatttccatttttatcagaatattgtttttcctgctatggggcttgcggggggcttaattttggcctggaaggaaggatttgtgttcgaaagcatatgtgtgtcgaaaaatcagatctctggaatagtttactctgacccagaaaggaatccatggttactctcttgtgtttatggtccgccttactttcacgaaaagagggttttctggtcgtccttgatggatttaggctctaggtttggagggccttggttgatcattggggatgtgaattttgtgttaagcaatgctgagcgtgcaggggccagggggaaggatcagtttctcccctttatctcgaatcttatcaattcgaatgccctggttgacctgcctgtcaaaggggattgtatgacttgggataaccatagagatggagccaatcacgtcaagtccgccttggacaaagctctcgtgaatgaggattggttgcgaatctttccgtcggtggtggttcaatcccttaccacctgtaactctgatcatcgaccgcttgttattaattctgcttcacggacttctaaggcaagggcccctttccgttttgaggcttggtggactagggacccccgtagctctttcgttgtggagcatgcgtggggatcggtatcccatgattgggcccctgctagagtttttaaaaaggttggtgcttcccgtttggctcttgctagatggaatagagaccagtttggtaaattggatacatgcatttccaagcttcaagatcaattacaagctatccaatgtatgcctgtcggctctagatcgtggaatcaggaggtggaagttaggaaagagctcaatgaggcgctaagacgaaaatcgatttattggcaacaaagatctcgtaattcttggattcgggatggggataaatgctccaagtttttcttccttactgcaactatccgcaacagaagaaactctgtggaaagtattttgaataaggatggggtctggataaccgatagagaggctattggtaatgaattcactaattacatggaggatatctttagtaacccggtcatgggccctttggaaagcttagaccattt

SEQ ID NO: 186529 - DNA, 3884 bp, Cannabis indica
ttttttatttttggtttcctttttgtcaatttcactgaaaagtattgtatatatgtttttttttttcttttttgcaggtgaagattcgagttcggatggagtgccagcccttggttgaagatcagtttggaccaataattactgataactactatgagcctaaactgttttggtttgaacttgaccgggatcaaacagaaaaactaatttctttgttttcatcatttctgacaactgtgcgtgctgctatctcagcgaatactgagacttcaaacactgtttacaatgcagcattccctgtgcctaatagaaggcgagaagaaatagtgaagtccctaaatgttgctaaccctgatcagactaacacagatggagaaaaccgtaatacacggagttcacccaagttaggtaattctaaccgtgaaaatggaaattgggttcatggaggcttagatgatgaagaacgatgtttggaagctatagatcataaaaaatcagctcaaacgttaaaaactggtgttataaaccaaacaaaaagttgtgattattcttactcttctgctgtacaaaccatgggaacttcccatccacgaaaattttggagcgaattgttcaaaggttcaaatgctgaggatgctggagaggaaagtcaagacattaagttaccatcttcaggctcaacaaacctttctatatctgatgattctagtttggatgaaaagggaaaatgtttagaagttgttgttgatgattcagaaaactacgaggaatacatgaacctgggactaattaatgaactattgaattcccctgtcaagaaagaaggatatacttattttacaagttgcactcaaaaggacactataccaacttctctaacaacaaataaaggtaacagtagcttcagctgaatccttttatctgaatagtttaaaacattgttaaaaatttcaggtcctccccctcatttagaatttggaaggcaacctttgaaagctgctgtaggtgaggatacagacagaatgattggtgagacaagtagactttctatcaaatgctgaatgtacctcagtatctgcagtgatagtaaataagtttaggaaacaataatagttgggaagacaagtgtcacaggaatgtctttggtgtgggattttatcttattgcattagtctttaattatatttatttacctttttatttttgtttgtcactttggctttggctttgattttgatgtttgctgctatttgtttaatgccttttgttatcgttttggatatgatcttaagagtgatggatcattgtatgttggaacagtgggatagacgtgagtatcttaaatagaaagagagtttttgctctcttttgggggtttcccttgtttaaccatggtttcacttgagctttatttgattttcccaaccaattcatcccatgagttattaaattatgtttactctccagaaacaatggacatcatggaaatgaatgcttctgatttcaactctatttttccgatggtaattaaatctgccgatcatattgaagctttgaatttacaataattagttactttttataactctgtattgtacctgtgaaatgttgtaatagttactacgtgaaatcaaagagctgaaatcatctcttggagaagaagatcgcaaaatcaatcttttggagcatgatatggtatggttgttactaaatttcattatttttgcactttattttatttgtcatgtttctcagcgaagttaacaggtatttgctttattattctataccaaccaacctgcatcatttgactattcaaataaaaggaaaggaaaaacttgcaccatttgactttcttattccttgggcaatttattcctgattcagtcctttagtgaactcactcaagacttaaacccatacataataagaaaatctctattttttgtttaattatgatagtcatcaatagggtattggcagcttggcactctgttttgctctttgaattttctccattataaatgaataatttgagttttcacaggttaaatcaagattagtaattcaactcttaaaagatagatgcaatgcattggaaaatcagctatttaaacaaagtgggaatgatgaacaagaggagtccgagtccatcaatgatcttcatccaaaccttgatgagttagtacttttagtgggaggatttgatggttcttcatggttaccagctttagatttttatcatccttctttagatcatatggaacaccgtagctccatgcgttttgcacgttcatatgcctgtgctgcaaatctaaatggagaaatctatattttgggcggtgtatgcaacaatgtgtggtatgatgaaggtactagttttactttttttcttgaattaaattttctgcagctacgtagatattcaatcaaaatgcattaacaccaattctttttcacgaagtcgaatcatacaacccggtgtcgaatcagtggactagatgtccttcattgaatcaaaagaatggaaactttgcgggagtttcttttgatgataaaatctatgcaattggtggtggaaacggcaatgaatatttctcaacggtggaaatatttgatgtgaacaatggaaagtggatcccagctcaacccatgctacataaggtaaattttctttggcacacacttgcttaatgcatctagttgtcggcttcatctattaaatggcataatgaatgacgcaactattggcaaattggttaattcttactgagaagtgagaattgctagtccacaaccaaatgtttgtttttccccaaatagatttccagtatctggctccatatttttgcaccttcaaatgtagatactactactaggaaagtaaattttggcaatacataggcaactcttgtgaaaatttctcacttcactctgttcaaccagtgacgtgtatgctgttttccatttataatacaaacatgaaattaaacccaaagggcaactacaaattcagttaataatcatatctggtttttccttctttgttcagagactttcctcagctgctgccgaaatcaatggtgcaatctatgccgtgggaggatatgatggaaagaactatttaaagtatgataccaatttattatatctgtgactggtattgattttctatataaattaatggtattagctagcatgtactacgaacgagcatagtaaaaaaaaaaaatggtattttgatccttattatctgacacatctcttccctaacctctcagatcagtagaaagatttgatcctcgtgaacgttcatggagaagacttgagagcatgtcaacgaagagaggtggtcatacagttgcagttcttaatgaaaaactgtgagttgatggtctcatctgcatgttaagatttaagattagcttcttgctaattcattttgattccttaagacaatataacacaaacatatgtagttttacgttcagaactgcgttaacaactaataagatgatccattaacagatttgttttgggcgggttacaatggtcagaacgtaatgtcttctgttgagattttttgaccctcgtcatggctcttggatgatgggggactccatgaatgactctcggggctattctgcagctgctgtgattgaagatacaatttatgccattggcggcataaagggtgacaatgagattttagagaccgtaagtttgatattttcatttctacagaaaataagtgacacctttcgtcttagcaaggttttgatacagaaaagcttgaatgtacaggtggaatgctacaaagaaggtcatggatggcaaaagactaatctcaaagccattgggaaaaggtgcttcttctctgccat

SEQ ID NO: 186530 - DNA, 4883 bp, Cannabis indica
gatctgaatttacttaaataaccctattaatatttagtgaacatggtttatgctactgggatcagtgatgttaatatatagatcaacttacgttaacaaaaaaatatgaataagttaaaagttagcattattattataccaaaaaaatgtggctcctttagttcatttgttcaaatagtgggattttttttgtaaaccgctcttatgaaatacttcttatatattttcacttcccttagaatagggcgtataattttacatatattatatttatatataatgaaaaaaaaaaaatagaagagagacaaggttggcagaactagttatgtgagagatgttctttagtttatgcagagtcagagccactgcaactaaaaccatgaggcagacgtgcttatgaagtaaaccatggcttgaaatcactccaaaatcagacataataatacggttccacaaatttaattggtccaactttcgcctgatataatatgtttcaatttaaagttgaataaccttataaaatacagcacattacttattgttcaacattgtcatactataggggcatttaactttaatatgattttcattatgatattcttttagctataagttttgattaagagtaatgatatgttcacattagctaatagtaacaattatctaatgttaataacaccataaaatcattcacgctcttgaataatcactttgataatccaatatgccacctttttggggccacactttaaaaactatcaacaatgaaagatggcttattctcttttagagatatgataatttccaaaaagttagtgcatgagagctacgtatgtgatatgttaatctaaacagaaaaagttaatacataataatacatgttatatagagggaactcgtaatatggtgaattatttattagaaaaatcaaatatacatagtgacactggttaaatttgaactttagaaatttagacagtaatagtatgatgattagatcatctgatgatctagattatgataactcacatttgtgtcatttgatatgggaataaggtaaaaactatgaacaaaaaaatttaaatgcaaaactactatattgtgataaatgctcccaacatttgtctttgccaaataataattttttcccttcttccaacacttctccctcttattttctccacccttctaaaaatctctcaggccaaacgtaatgggaaaataaaaatgatagcaaagaaaagcataaagaacaatcaaaacgggtagtttgacaatctaaagaaaatggtttcagagtaaaaaatataaattcaatagggcaagtaaatgatgaaaccaaaagagatttccataaaagacgaacaatatttgctgtaggtggggttgtaatatgaaggcgtgcaccagctatgtttgcaatgattcatatatggaagactatgtctaataaaaagcatagcaataaaagcccatatccttttattcacctttctacactatttaagcattgcaattacaaaagagaataaaatgaaaaacaattataacaaagatatagattgcactggctgccatagctataatgttaagccaagttaagatatgcctttcatggttactgaaagtgactgtcaagagtcagcatttgtttacatgtttcattgattcaaggcaagtcattacagttggtccctctgatccaagacagatctttacaaatacatataaagttaggccagcaattgtattgcactacctgccaatgacatggattttcattaaaactaaaaataatcagagctttattaaacagaatcagaaagttgatagataaaaagtaagataaagtgactatgcataaacagaaaagagaacagttagttgttgttctaatgggttttggactataagggcaagggcaagggcaagagcatgtgagcttatattctcagtccaatgccatgatttctgtaagggtcacattgaccgaaaagaaaagaaactctatcgtaaagactaaagagaaacttacgtttatagagaggtaaaaatcaaaagaaggaggttaaagcctcctcccaacattggctcatattgaataattacttccccaacaccttatcatcactagtccatgttagaagaatcatgaaagctgacaaacataatacacctacccaaacccttttctgtgttcctccaatcaaaatttttatgcatcactataaatagaaagaaaacagaaatattatcatgttcactcacttaagtagtactcactaacacttaagctgatctatcttcttaaacttcccaactcctctgtttttcctctggaaaaatgacaaactttgccactactcgcatacttctgctctggttcagcttgttattactctatgtttctaatacacatgttatggctcaatggcctgttggaagatcaaccaagttttttgatttcaaggtcacttatttttcttttccaatttatacacacacacctgtgtgtatgtgcattcatatataaaaacttttgtcacatttgtcaggttcaaacgaaaagagttagtaaactctgtaagagcaaggacattgtgacaataaatggaaagttcccaggaccagttgtttatgctcaagaaggtgatgcagtcacagtaaaagtaacaaacgaatctccattcaacatgacaatccactggtaaatttacacaactttatttctttgtagaaatgtttctgggttcttaacatgtactgcatgcatcatgcaattattccctttgtttaccagtcaattttcttttcaggcatggtgttcggcaaatactatcctgttggtatgacgggccttcctacattactcaatgtccgattcaatccgggcagagttttacacacaaatttacgttggtgaagcaaaagggcacttttttctggcatgcccatgtttcttggctaagagcaactgtttatggcgcccttattgtctaccccagaacaggagtaccttacccctttaagcacccctttcaggagcacatcatcatactaggtataataactgactttatgacaaccaaagtaagaaatttaactccacatttcaataaatataatggaacattattatatactgaattgggaaagtattcgttggcaggagaatactggcttaaggatgttgtacaacttgatcacaccaccatagccagtgggggaagtcctccaccaccagatgcttttactatcaacggccacccaggccccaactataactgctcaaacaatggtagctctaaatgcagttttgcttaatctaaagttttaatatggttctgttaagttgtgaaatgaatttgttgtgaagtaaaaatctagccatatatctaaaggttgaatttttttcagatgtctacacaattaatgtgactccaggaaagacatacttgttgaggcttatacatgcaggcctaaacacagagagctttttcgccatagctaatcacaaattgactattgtagaagctgatgcagagtatacaaaaccattcaccacagaccgtgtgatgcttggaccaggtcaaaccatgaatgtccttgtcaccgctgatcagccaagaggaagatactctatggccatgggaccttacatgtcagcaacaggtgtccaattccaaaatatctcatccattgcctactttcaatacacaggggctgttcttaatagcttatctgtaaccactaaattaccaagttttaacgataatcttgtggttcagacaattatggacggactaaagagcctaaccagtgttaatctttcgaaacaaattgatgccaatctttttgccactgttggattaaatgtccaaaagtgtcactccaagacacccagacaaaattgtcaaggccctaataatggggttatggcagcatcaatgaataatataagctttgtaaagcctaaaatttcagtgctggaagcttactataagaagattaacggtacctttacagaggatttccctgaagtacctcttcaattctatgatttcgtaaatggggcacctaataatattcctaacaacacgcagtccttgaatgggactaggaccattgtccttgaatatggaaccagggttcaacttatttttcaggacacgggaactgtctccactgagaatcacccaatccatctccatggctatagcttctacgttgttggatatggcaatggtaactatgatgaaaaaacagcaaaattcaatttggtggatccaccttatatgaacacgattggagttcccgttggcggatgggctgctatccgatttgttgctgacaatcccggtaagcatgacatttctcttagttctggagcaccactaggtacatgcttccgcatagtatgaaacgggtctcataccgtgccagcgttgagcactgtaaagtaaaacttgtagcattgtcctcatcacacatttgaataaccaaatatattatgtgtttagtataattggtagtttagtatgctactctatctctagttggggtgtttttggtttttactgatacattaaatgattttgatattgaatgctacaggagtttggtttatgcattgtcaccttgacatacaccagtcatggggattaggcacggtgatcattgtgaagaatggtaagggagatcctgagacccttccacatcctcccactgacctgccaagatgctaggatatgcagttaagcattcttgtagtaattaccacttgtttctccttttcatcccaaccaaggattcttttggagcaagttttgatatgttatatccctttgacaaaatgactgtgtgtgtgtgtatacaagatgcaa

SEQ ID NO: 186531 - DNA, 2151 bp, Cannabis indica
tagacactctcagttgtagcatttattagtctaatagttcagctgatttcaaagccttaattatatccagagctaaatttatgttgatatttcatttaagaaaagtagaaactaaatttcttactatttagaatataatgatatacattatacatttccccttggcaagttcctttatccttattctgcatttgatgcagcgtgagctacatttcttccatggggtcatagactcgcaaatatcaagtaaggattaatcaaacacactgaattttactcattgttagatggtcttactccaaatgttagcctttgtgctcaaatttggaagtaagaatcaaaataatgtcactctttaatggctttctgatttttatataaatcacttctctaatctactccgcattaagcaggggctgcatttgctaccccatctagcactaacccactagtaccttcaaaattaaccattaggtgacagtgtcacatccatagccacaccttcagcctctggcatatttccaacctcattcagtatccttgcaacttgttttgtcagttccgaacgtgcataatcagaacgctccctagtaatagatgattccgcaaatagattttccataagacattgaaattctggaatccagtcatcattgctatgttgagtaccattttcttcataaaagactagagagctttctcttcgccacctattcagatagtatttttcaggaagctgaaagtagttctttactataaatacccgcagagcatgtctgcataataatcctgaagattcaaattctttacaggaacagtgaatctgttcatcttctggaacccatataacaagacgctccccgtccatcttcttgaaatggcgtacaatataggatccattagccatctcagaagtagcatattgcattgacagggctaattcatgctgaaattcgttgaaaacaaaaggcataagaatactcctagcatgctcctcaatggggatgcatgtcttggtatacatgtattgcatctctggacgcgcctgattctgaaaattagcagagatgcttacctaaaaaggtgaaatcttttgatcagtgcaagaacttaaggacaatcaattgagcgaagttgtgagaaataatataaaccagtacctgctcaaaaaaactgcgcaaacatgtttgggcattgaaaatgcccttcaaaaatccatcaacagatttcgaatatactgttgttgccattcgagcaagcaagtatcctcttgtataggatggagcccaagatgaacggaatgaatagagtaaagcaatatgtttgtctgcattgaatctaaacacagaaatcatttgattccattgaagttcaaactcctccgtagtttccaatcgacaaagtgtgtcaaactcagatttaaattctgcaaaacgagatccaagtggttgaaagaaccaactgtataccttggataaaatattccacacagaaatgacatgtttagttgctggcaaatcagtctgtatagcatccctaagcccggggtcaagatcagttagaattgtttgtggacaatttcctctcatgaaacgaacaaaagtctgtatgcgaagtagaaaaaacatcgtcaggaatgctatatgaatacacagctaaaatcactatagaggatactgatggtaaacctgtaaagcccacgagaatgaacgagatgtttcatcttggagtagagcacaaccaaagaagatggttcttccattactgtcaatgccaagccacgctccaaaaagcatgccatatgtgattgatcgatatgaagtgtcaaaataaactacatcaccgaacatgttatatgcgtggactgaatcactataagaccacatgatgttctcaaccttatcattttcatcaacagtaaaatcataaacaaaattttcatctgcatatttggccaccttgcatgcttcaaggagttccattgtatcactctcccttttctctgttagcaacgcatcattctcttgaacaaccttcttccgattttgaacaaaatttctaacatccctctccaaaaagggaagctgcccaccttgaatacccttttccaactccaacaccttcacaattcgatgtatagggaagcctgct

SEQ ID NO: 186532 - DNA, 2611 bp, Cannabis indica
aatcctaatttatggcgtccacattattataatttgagtattttatagtgtccaataggacaatattatatcgatgtggcgtattataagtagttagagattaattatagtatttattaaattaaaatgtatatgattcgatattgatttgtaccaataattgtatgtcacctcatctgatatttggcaccataaggtatcccttagcatttatcttataatattcttatcttgttgagtttggattaccgataaatatactcttttatgtaatttgaattaaatgtaatttagaataattttaatgtttcttgtatttgctcacttaagaaattgtacgataattatataattggaggtataatattgtatatgttggatcaactctcactagagctagtgccacgtgttcatccaagctttgtattcggttggtagttagttacacagttagaatctttagtttgttatagttatcatttttcaattaggtttgttactcaacttctcaagccatgttggctatatatatatttgtactttcactatattcaataagtttgagagatcaagggtaagaaagtaaaaagctagagagcaatgagttgatcggaaaataaagaacgatggtcagctataaaactttgaggctgttcagagaggtttggtacactttctaaggtgttgcctattgatttgtaatatatctactattaaatatcaatgcatgaactaaaccaatctaagggagttcagtaaagaggaatagactcttcacaattatgagggaaagttcgaacctctatatgcactatgtcaattttttattctgttttcttttattatagatttttagtttctttgccattttttgttcttgttcagtttctttatggtgtgtgtggtttgcaaaaataggatcagttggtgttggtaaaattcaatagtggtatcagagctccaggttgtgggagaaagaacttaatcagtgaagatcaagaataagacctcaggaagaataagaaatcgaaagacagagttgtaggtgcatggatttcggaaaatgacgagtgttaaggtcaacattgaaaagtttagtggtaaaaatgacttttgtctttggcgtggtcatcttagaaatcttagactcgatgaagctcgatcaaaagatgctaagaaaccagatggggtcgataaaaaagattgggaagatacactctagaaggctcggaatacaatcattttgtgtcttaaagatgagatcctcatgaatgtggttaaagaaatgtggagaagccatcatgaatgttgcatatttgatcaatcgatgtccatcttgagttatcaaccttgagactctagaagagaagtggacaggtaaggaacctaacttatcttatctaaaagtttttggatgtactgcttttgtacatcataatgttgggaagttagaacctagatctattaaatgtgttttcttgggatattcacatggggttgaagggtataagttatgggatagatcaagatgagatttcaaggccattattagcagagatacaatattttaacgagaatgaattttcttgtaaggataacatgagtgcaagtcctagtaatgttagcaacataaacataggaaaagagagttcaagcatgaaccaaggatctatttaggtggaaaagatggttgaaccaggttccagcaacaatactagagaagcataggctcaggtggaaccaattatagagctactagaagaagaatcaagtgaacataatcaacacggagagccaaaacttgaggactacatgttgacaagaggcagaccaagaaagagccaaaacttgttaacaaattgagtctcaatatatgggaagatatcatagcttatgctttctactcagtaatggaattaaccaaagggaacttgatgatgaagcaatgaataatattgatgcaaagaaatggaatgatgctatggatgaagagatagactccctggtcagaaacaaaacttgatacctagttcctaaacctgaagatggttttgtaatatcaagcaaatggatctataggatgaaggatggagagctagaaggaggaaaacttagatacaaggccaggtttgtggccaaaggattcacacaaagaaaggggttgattttaatgaaatattctcacctgttgttaagtataaaactatcaaaatcctgctttcaattgtagtttagtttgacatgaaacttcaacaaatggatgtcaagacaatatttttgcatggtgagttagaggaagacatgtacatggaacaaccaagaggctatgaacaaggatctgcaacaaagacagtgtgcaagctcaagaaagcattgtatggtttgaaacaagctccaaaataatggaatagaatatttgacaacttcatggtgaaaaaaggttttcagaagagtctacatgatatttgtttgtactacaaaggaccatatagaggaaagtgagtatctgttgctgtatgtagatgccatgttactcataagcaagaacaaggcaaaggttgaaaatctcaaggagatattcagtgcaaaatttgacatgaaggacctgaga

SEQ ID NO: 186533 - DNA, 963 bp, Cannabis indica
atgtgcccgatgtgggactttcttcaaaatagtatatccggcggtttctgatcatctggagcagtcgtcacccctgcattccctacctttcgacccgcctcatgtctcaactgacaaatgccttctcgtggacgagtcttacctgaacgggagatatggctgtgctatgatttccctttccagaaactcctcggattggtggatttgctcctctgctggttcttgtcagtcgactttggaagctgaaatgcatgctgttttattgggtcttcaatgggcgatcaagaatcagtgggatgatttctcaatcctgtccgactctagtgtcttggtggaggctctggctgcgagaaagtcccctgaatggaaggctactgccactttctctgatattttgcaattgttatcttctttttcttgttgtcatgtactttttactaaaagaaatgttttaagctttgttgattctatggctaagtccatgcgcctttgtgatggtggctgacaggatgttaaaggggagggattgccccttgtgaatcccgaactgttatgggttgttaattgaacagagattcttttcaaaaaaagcacaatagtaattgtaaaaaagtgtgatgttacaaaatggggttaggagatagtaattttactaatggaaaaactatgattatttttgaaaaatagaattattttcactaaaagaataaaatagcttaattttacaaaatagatttaggagagagaaattttactaaatgagcacaaaagtttaggaactagtagagttattttcactaaatgggtaaaatagtttaattttagaaaattaatttacgagagaggaattttactaattgccaacaaaagtttagtgactaatggaaatatataagaggaaaatttgacttattatgcatttattgggccgaaatcgtttccctaaacctaagctattcaata

SEQ ID NO: 186534 - DNA, 5662 bp, Cannabis indica
gtgtgcaactaaagtctcacattaggtacaaatggaaaatattatacgtgtccattgttataagaccttttgggaaggtacccaagatcaaatttgtgagggcttaagctcaaagtggacaatatcataccagcgtggagatagatggtgtccaacgtcctaacaagtggtatcaaagccgaattccaaagttagccatgtgaatgaattctcaaatgccaaacaaagaagatgaacctcaataatctcacaatgtgatttgtgggtgtgctctaaatagaggagttggcctgagaaagagcaagaactctcgaggtagtgataatgctccatgtaaggtgtgtgctctaacgtattggagggaagtatacactatttgatggagagtggacggatagaagattatttgaggagagacaatgtggtcctttctttaaggagagaggattgttgccttgttggatgtacaattaaagtcccacattgattagaaatagaaaaaattgggttcaatggtatgagaccttttaagaagatgcccaaaaataaatccgtaaagattgatgttctccaacgtcctagtaaacacaactaaatattattaatttggttggtaatcaaatattccttttctctattttcttctcaatataaatgacaaaaacagagacaattttctaagtaataattaacaacacaaacacatgatgacctcccattcggccatgagttgactacaacacaaagaccaatcttcctttctctaatggttattttggttttgtctgtgagatctaatgctagtggaattgccatttactggagccaaacgacaaagaaggcacaccagcagaaacttgtgccacaagcaactacgatttcttaaacatagctttccactcttcatttggcaatggcaaaaccccaaccttaaaccttgcactaaattaagctcacaaatcaagccttgtcaagctaaagtcatcaaggtaaggctcttaattggcagaggcgcggccgcgcgggaagctactcgctctcgtcttctgatgacaccaaataaatagcagatccctttggaacaatttcttaggagggcaatcctcttcaagatcatttggagatgcaattcaggatggaatcgattttgatttggctaaggaccttgcatggtagagccttcaaggcaagaatgtgtacttaattgcagcaccacagtgtccattccctgatggcttggtagcaatgacaccctcaatcaaaggtgtcattctttggtcaaagttctactatcaagaatagtgtctaaactagtaaaaaaagaactcaatgattgctatgacaaaaaaaaaaaaaagaattattgtgttgactatatggtttaaaaatttgatcttgccacatctgaataaattgattgatatagtatagattaggttgacaaaaattttgggtgatcattgaaagtcaaaaagtttgacttttggtgtggggtccaactttgaataatatgtatttttatctaggggacattgtggagtaactacaagtggcacgagaagaagggtggcttgttatggtgaaagagctaaagtggttaacttctcttttcatggctttgtatacatcatctaaaccttcttcaattaactccaacaccgtttgtggcattggtggcatgttaacatccattgatccttcaagcattctcactacatctcccattgtaggtctcatgataacctcatcttgaatacaccaaaaagctactttcaaagctctattgagttcttcttcctctaatactgctccttcaagtcttttatccgcagctttcaatggggtaccttttgtcatttcctacaaacaaccattataattattattcattttcattagattacaacaagtaaaggataacaaaaaaacagaggactctgtctttactaaccttaaaagccaaaccaggataaaagaagtcatctgcatcaaaagacatgtcaaggttcctccggccaccaataatctctaaaagaagcataccataactgtaaacatcggctttcacggttataggccgattactaacccattcaggagccaaatagcctcttgttcctctaaccattgtcacaacatgagaatgctctcttgccatcaacttagctagtccaaaatcagaaactttaggcgaaaatttctcatccaaaagaatgttttcgggttttatatcgcagtgtataatcctatcacggcattgctcatggaagtaagcaattccctgagcagtagccactgcaatgttgaaacgagttggccaatctagcatcttactttgggaattgtatgagggaaatatccacttgtccaaggagccatttttcatgaactcataaactagaagcctgtaaaaaaggatcatcatcatcaaaataatcatccattgagtcttttacatttgctatgaatgaaatcaaccattaaaatcaactatttcttaccgatgttgtccttctgaacaatatccacaaagacgaactaagttcatgtgatgcattgagccaattgtagtgacttcagttatgaactccttttctccttgtggcaaaaccttgtcaagtttctttacagctattaaagtaccatctgcaaggcttcccttgtaaacagtcccaaatccacctgaaaacaaaaccataccatataagttcatcactaaagaacaaatcttgactaaataaaacatatgtactaaccagttccaaggatctgtgagaaattccaagtacgaatattcaaatcccggtagctaaaattgattggagtaccagccaaaatcaaagagctttccatagctcttttcaaagctctttttctatgcacattgtagtataataacaaacaaaggaggccaataagaacaatcatgctaagaacaataggaataaccaaaaccttttctttcttattcaaaccaccatctgaagaatcctcagatccttctccaccccaaccgttggatctaaccttaacaaacagagtagaaccagtatcttcataccctccataatccaaactcctcaaaatccaacaataaggcttctcatcatctaaaccataaacagaagcaatacattcacaatcagataaacaagcatcaccacacttggacacatttcttacgtcactgaaatttgctatgacagaaaaatctgagtaataatagttagtttgctgaaccattgaaatcctaaactgggatttctgatacgactgcttatgatcacacttcccaatcaaagaagaattctccgaacaatgattatcatttccaaccttggaagtaccaggtaaacaagtacaagaagcgttagtttgacttttgtcaagattacatatcccattaccgcaaaccccagcaatgtcgcaaggtttagaaaccgcagcccattctggcacccattgacgtgacccattaacgtcgtcgtcccaacgataaagacgaagattcccattattctcaagcgttaaccgccggagaactgataagccggtcgaccggttagtagcagaagataaaccaccgtaatcttcgtcgtttttatacacgtaaacggcaccgtctgatgattcaccatagacaattccgaaactacccttttcgtccaaaacagcaatgacatcccctgttacgtttgatatatcgggtccttgccaatatgagtaattggcataagaatccggtgaagagtcaaacgtttcggggagattataagtcaaagctaggcttaatgaagttggttgttgaagcattttgagagcgtagtagcttccacttgagtctgattttgatgttgttaattctaactttactgataaaggttggtttgggagcagagtgtctgatgggtgtgaaaagctctgccaaacagggcggtttacgtcgttatataggatgaagttaccggattctgacatggtggcagcttcaactccggcaccggatgtgtttgaggcccatatggtggtggctcttccgtcggagagaatgaggttcccggcggtatttagctccaagattgcattttttgtgaccggagagtctctatatttagacaatataagattgagagaaaatgaaattttgtttgatcatttggtcataacttttcacctgcaaaagctttagtataaaaactacgtattctagagatgatggtgcaatttttgttgtgtagtttttgattcatagtgtatgctaaaaactaccattatatcatatatatatatgaaagtttcagtacttacttgttaggtgaccagactactgtacggtcaccgggaagctttgcaaaccaaattgccaattgaagtttgttgtaatctccattctccattggagtgaaaccaaaggcaaaagtaccattgtcagagacccaagctttgttgtcccgagccaacaacctcgaacctagaccaatttggctagctactgagccatactcaaaaccaaccaagactcccaacaaggccaaatggtacaaaaactttaataaagtgcaagaataggccatgtggactagtgtgtgtgttttgtttatttatttttttgagaaagagtgaaccgagcttggaaaatggttcattttggtgtatatttatggggaagaaataaaaagagtagacacagatcagtagtagtaaagtctactaaatattactataaagagaagtttgtgttaaatgagaattaaaataaaaatgtgacacgtattaatggtgggtgaactacacgttgaaaaagagtagctgaaacaaatggtcggctagcagggacatggtagagatattattatatatattttgcatatataaatgggatatgtatatgggtgtacgtgttgactagacagtggcttgtaaagggcttaagtgagtttatgaccaaccgaaagtcccatgctaatatttgacacgtactcacaattatttttgcatgagaattattaacaaaatattcttcttttcacacttgggaattccgtagtgaatttgcactttttttgtacattccttgtttgagatcatagactatgatgattgtggctaagtgtataatcttaaagtgcattatagattttgttacacacaagcatatttagagcaatacatgtacaaattggcaatatcctcatgcatggcagaaaacagtataaacttttatatatagtcatatgtacaaacttttattactgttgtatgtaattgtaaaggttatatagtgtgaaaagagcaagagagatttatggatggtgatattacaataattattgttgtcacgatttaatttatccttaaaataaaaatggataagtacattgtatcattttcttatccaccaattaaatcaacctctgttgaagaaaatatatataggatgatgaatatgaatgtgggggaccttatatttaagagatgtattattttgctttgacatttttgccgcatgcacaccccttttaaattgttgttcatttcaaaaaataaaataaataagtcgtctcatttaatatgcttgagtacgtacgtgacgatcgatatggctcaattattcttattattattgtgttgtccagcttcaattatatatataaatatatat

SEQ ID NO: 186535 - DNA, 3003 bp, Cannabis indica
aactgggccgaggaggaatgttgagcccactttgggtaagaagaggagaatcgaacgggaggatggggccctctgatgggctgggggttgaagttgacggggcccttatggggtctttgggaatctccttgaagcctctgcctgaagagggggataagtgtttggtctcaggtactaacgtcgagggcaagaatgatttgaatgtggataaggaaaagtttgtcgtggtgacagcccagggggacgaacagttgaatgggataactcatggtaagggcgatgctacaactaggaagaagaatgatgctcaggattttctcaaggccgaggaggcgggccaattcatgccccctctggcgccatgatcctcctttcgtggaattgccgagggcttggcaaaccttcggcaatcacggcgcttcgaagtttgattcgaagtgagaatgctgatgtggtgtttctcatggagacaaagaaaactgcagtggaaatggaagttattagaagaaggttgggttttgatgggggaatttttcagtcggtaagaggttcgtctgggggattagctcttatgtggagacgtggctgggatgttaaacaactgaagtgtgatgtcaatgagattgtagttcggtttggagaggaccgtggggcgagggagtggattggttgtttggcctatgctcctccgcgaagagatgaccgtctagagttctggaatgaaatggtgcatcttgcgaatggctttagcgtcccttggtttgtggcatgggacctcaattcggtgcttgatcaaaatgagaaatttggtggaaatccggttactgcctcggagggggcgggcttaagggaattcatttttaagtcgggggtggtggatcttcagggtgctggggctctgtttacttggaccaacgggcggaaatgggggcatcttattagggaaaagctggatcgggtattagttaacgtggactggcttctccaattccctaaggctggagcgaagactctgtcaattagacactctgaccatgcggcgctgaagatagacacacttcaagacatggagagagtgaatgcgcccttccatttcttggaggcgtggctacaagacccagggtgcatatctgttattactgaggcttggaaacacgtggttctggggcatcatagcttcgtgttatgtagaaagcttaaggggactgctaaggctctcaagaaatggaatgtggaacattttggtatgtgtcatgtgaaattgaatatgctggaatctcttctcagggaagtgcagaatagggccccgtctgatttgcagattgaaagtgctattgtccttgagattgaggaagtggaacgccgacaaaactctatttggcgccagaaatctagagagctttggcttaatcatggggatagaaactcccgtttcttccacacggctatggtggttagacgcaaaagcaaccatatttggtctatcaaggaagatgttgggccttagattgaggggcgggagaatctggtggattattttgtgagcaaattcaaagatctctattcctcctcccaccctgctgttaatgaggagttgttctctcttctgtccccttgcatttcgggagaggaaaacgagatgctctgtcggatcccggaggaagcagaaatcaagaaagtcgtgtgggaattggcccctctcaagtccccaggccctgatggatatcctgttattttctacaagaagtgttggggtcaggtggggggcgatgtttgcaactttgtgcaagagttctttcagactaggcgttttgtgaaagaggtaaatagaacttttattgtcctgattcctaagaataaggctgcaattaagtttgatcattatcgtccgatcagtttatgtaatgtttgctataagatcattgctaagcttattacaaatcggttgcgcggggttctggataaactgatctccccgtatcaagcggccttcctcaagggtcgttagattacggagaatgctgttattgctcaagagattttctcggacctaaagaagagacgtggcaaggaggctgtggtaggtttcaaatgtgatatggccaaggcctatgacagacttgaatgaccctttatcgagaaagttctgatggcttacgggttcggtgagaagtttagggagctggtgatgttctgtatcagatcggttagctttcaaattcttcttaatgggagtctgactagggtgtttaatccggctcgtgggttacggcagggggacccaatgtccccgtatctgttcataatgtgctctgaggtgctatcccggctgttgttacgaaaggaagagaggttagaatctcgagaaatggcccaccaatttctcatcttatgtatgcagatgatactctaattttcgctaatgctcaacttggagaggtgcaagaagtctttgactgtcttgatacctattgtgattggtcggggcaagtgatcaatgctacaaaatctaagtttttgtgttcgaaaaactgcaaccgggaattttgtaagagtggctgggtgattggactaagttctcaattatggatggaaaggagcaattcctggggaacccgtttgtttgttagaggaaaccgggctacggatttccaatttgtggtggataaagtgaatgcaaaactagaaggatggagggctaaacttctttctcaggcggctcgaacggttcttatttctagtgttatccaggctgttccgatttacaatatggggttgtttaagctccctgccaaatcatcaatgccttggataagagttccaggcgcttttggtggactggatccacggagggaggccgattcctatctttgatggcttgggataacatttgtaaacccaaaagatgtgggggaattgggcttcacagatttggagatattaatcaatgtttaattgccaactaggctggaagctggctaacggagcatgatgctctctgga

SEQ ID NO: 186536 - DNA, 3510 bp, Cannabis indica
aaatatttattatgtttttttaaaaaatatttatttaatttatatataaatatttattaatattattattattattattttattttataatttacaataaataattttaaattttatttttaatatcttaaattatttaaaattttctgaaataaatgtggaaaataaataagaagtaatgctctgtaatttatatatggatatagacattcatcattaaatattatgcaccaaagaaagaaaatttctatttttataaatgattgacatcatctatatgtatatatgtcaatcataagataggagtatttcattactcccactttatagtcctcgattcacccataagattttaattatgagaaagcaacctttgacctgcttaacttgtaatagtactaggttgagttaatactaataaagtcttgcttgtagttgtaagtcaatgtctcagcttggccgcgttttcgtgtgattattaattttttcttttctatacatggcttgttaatttagcatttcttttagccagtagttatatcatcacagtcatgtatatatattttgtatgataaacgtttatatttacataaaatgataaaataatctaagagacgtgtacatgattctcaagtatgacatgaattactaaatgattccgtccatctcagtcaaaataacaattattgcaagcctttaagaaatgagtgccgggggtccatttcactttgctgtttcaacgcatttttatttttttcaatgtatacttgatatttcaatcttaaactaacttacctctgttttgacagacttaagaaatgggtgccggtggtcgaatgaatgttcctccaggctcaaaaaaatcagaggccgaaagccttaaacgagttccacacacaaaaccaccattcacacttggcgaaatcaagaaagccattccaccccattgtttccagcgctctgttgttcgctcattctcttatgtcgtttatgaccttaccattgctgccatcctttactatattgctactcgttacatccccctcctcccacaccctctgtcttacctggcttggcccatttatggcttcattcagggttgtgtcctaactggtgtttgggtcatagcccacgagtgtggccaccacgcctttagtgaccaccaatggcttgacgataccgtgggcttagtccttcactctttccttctcgtcccctacttttcatggaaatacagccaccgtcgccaccattccaacacaggctctcttgacaaagatgaagtctttgttcccaagaaaaagtctgccatgaaatggtactctaaatacctcaacaacccccctggcagattcctcactctaacaatcactctcactctgggctggcctctttacttggccttcaatgtctcgggccggccctatgaccgttttgcatgccacttcgatccatacggcccaatctactcggaccgtgagcgggcccagatatacctatctgatgtgggcattctcgcaatgtgtttcggcctttacaagctggctatggcaaatgggcttgcttgggttttatgcgtgtatggagtcccattgttggtggtaaatgggtttttggtgctgattacgttcttgcaacacactcacccatcgttgcctcattacgatacatcggagtgggattggcttaggggagctttggctacagtggacagagattacggtttgttgaacaaggtcttccataacatcacagacacccatgtggctcaccacttgttctccacaatgcctcattatcatgccatggaagccacaaaagctatcaagccaatacttggagagtactaccaatttgacggaacaccagtgtacaaagccatgtggagagagactaaggaatgtgtttttgtcgaagctgatgaaggtgaagtcaaaggtgtcttctggtacaacaagcttcgggattgaattagtaaacacaaacgaatttcgtaactcaaattgcaggtgggatttggggaagttcttattttgttctttaacttgtattgttttacgctggtttagttcgtgtactttggttagctttagttttagctgtgcgttttgattttcttgttcgtgtctaattatattttatgtggacgtggaccccaaaaatgatgggttaagaattattaaaatggagaaaagacaaaataaatatgatgatgagaaagatgtgtagttttgaggtctagttggggttgtctttgaatgtgtcttgtttctcggcagaaagaaagcgtctactgtagtttacgagagcattggtttagactgttggttcaaatcaatttcctctgcttgttctcattgaaataaaattgagttctatgaagacgaatttgccgccagaatacttaaatttgtttttaatgaatcagatgaatttttattgctctataacatttttgtacaatcggtttagcctccttacaaggccagtattatacacattttaagttttacaaactactaaaccattgaacatcttttgcactaattttttttggccagatcattttgatcctcaacttcatatggtaaatatttgtataaaaattttagtgataaaaaaactttttgttagaattttgatagtaataaaattcaaatcattaatttttttattttttatttaaaaagtattttaaatactaaaaaattaaatatttaactaattaaaataaattattcaggaaaaaactaagtaaaattaaaaatcaattagttaaatcctttaaattctaatcaatacatgattacatacatgttatgttaaaaatgtacattaacatcaaataacaatcaacaaaacccccctaaaaaagaattggcaagaaaaatacagattcaaaattagatacacctttaaactctaagaatcacatacataattaatattttatttgtaatttttcaaaaataaaaaaaaatggtatacttttcttgcatttccccatagttcaaacataacaataaaaatgtcacataaacctaaaaatctcttctttttttttttcttttttcaactgcattaccaaaaatatttacaaccaaaagaataagaatgaggagaatcgagaagtaagctagatcatcactagagacccaatcgagagctacaaaaccatcatccttagtcggagacactcgtggtggagtctaatgtcaggaacatatcaaaataagatggtgaagatggtttccacgtggcagttcctctcatcctccatcttgggtgctcagttgctccgttgatctcttaaagtcctccaactcatcccctactttatcatcttcatcttcttcaacacttcactagtggccagtaccttgatccaactccttcaagtctatcgtcaatggccaaaactagtcatcttcctctctggatcaaatcattctcaggcatccttcatctttcccattctctttctttttctcaattcctctctctctctct

SEQ ID NO: 186537 - DNA, 4979 bp, Cannabis indica
ctactcaaatctacttcattagactgtaattttatcctattcctatcctagacaatgaatttttgcagtccatatatgattaagtggacttttaccaagaattgaatttggatggttcatcttatcgagattctgaataatattttatataatgactatgaagtttaatttttaatacttaatctaaaattcaacttttatttacaaaaaaaaaaaaaaaaaaaaaaaaaaaaaaaaattaccattgatattcctacgaataataactcgtccttccaatgacttctccccaaattctgtcgctgcgaattcattcgcttcccactcctcctgaccaaccacagccatatttgccaaaggccatagccatcaaaaacaccaagaaaaatgccactttttgttataaatgttaattttgccatattttgatgtaaaaaagagccaaagcccataaaaaacagacgaagtaaaatgtgccatattttgatgtaaattctactttcaaaattgataaaattatccactaaaaaagtacacaagaaaaatgccactttttgttataaatatcaattttgctgataatttaagtaagagtgactacaagctcttcatcgctctctcctttatcactcaacacatacaaaaacggcggcaagaggcccaacgcggaagagctcctcttcctctctttctcattttaagccaggccaatccattggtgagttcacgatctgcaactattttccatcgcaatccaaatatcaatatacagattttgcaacaatttcaaatctttattgaataattttgcatttctttattttttttttcaacagaccagtatgatttgttgctgtcttcacaaagtttctatgcatattgtttttgtttaatcttttgtgccatagtcactgaaaaactgatttttttgattgcgatcttcttctctctattcttcaacgaaattaagctaaaacaagagcatagaatatatgtctgtatcccatctgatttactattcttgcttaaatatccttctctgttttctgatagtaagtaatctttttacgttttcccgaaagtttgtatgagattccatgaaaggattgagaataatgttttgttcaggttcttttatctttatctttatgtagtccgattgtattattttctacttttgtcggtttgatcttttaggatttcttcttcctcttccttctccaaatgggttccgccgaagtcgagcacagatgtttcgtcagacgattcgcgtgggcacaccatgtggattaaatacaatcatgattttcattcattgcaaatgatacgattcttttatctcttgagaatttgtgccacattacagttatttaattgctgattttattatatgctacctatctacctaagtatctaattctgaataatactgtatattcactcccaacagagcgtgactaaaatgcccatgaaaattagacttcaggcttcataagaatattaataaagttctctgatgttctgtttgtgaaatggtttgggtctccagtttccactagatggagaaacttgttaagtttatctatgttttgcttatttatttatttatttgctaaaaataagtttagctatgttttccattgatatggtgagtgactttgagtaatttttgaggtttgagtcttcctcattagtataaggttttgtcgtgtcaagtacatctatgttcggttctgataatatttttgggttttgagtttctttacttgttcttttatttgatgttttatttgtttttttcctctacgccgattactatggagtttgcttatacttggctttcttcttcttattattatttttggtgggtttggtcttgttgatttagtagttgcgcacttgttccttttgtgtggtttttgttcttatttgtatgagattatactgatcatcagtagtagttcttttctgttttaaattttgtcaaccatggagtgttaagagaatgaaattggccatttttgctctgcaaaacttgagctttgaatcccacttatccactgagatcattatttttgttccagtaaataactgttatgcatttgaaaagttttcggttcatgagtttcaaattagaatcagcatgttaagttgagaatcgtaatcatttgaatttaaaatgtgttagttcacttcttcacatcttgttggattttactaattgtttttttcttgtaccggttttgcagtttaaacttcaaagattactgatacaatatggttaatgcaactaaaggactgttcattacatggtaatgtacttatactagcactaatcgtttctattcatgtttgtgcttttgtgatagtccattcatttatattttgttggatattagacttctcttctcacacttattatcttaggttagaaaaaaaaaagaattgaaacttgtatatgagcaaacatccaagaaacttggtgtggtgaataatgcttggtaaactaaagctcataaacaatcaaatcaaacaatgatatacacgcattaaagcaatacaataaaactctctaaaacaaaacaagtaaaagaagaacaatgcacagaaatttatcctggttcaagtcaagagtggatgagaaatcaatcttggtatctttattgatttgaatcaggggagtacagtaatcacagttgagaattggcatacaaactctcaatcacaagtgttttcctagcttaacactttcatcacagtagtgcagctcaatacaaagccccaagcccctaattttcattttatctgtacactctaatgattgtctctctctctctagtaatctttcttaatctgaactggtgtgatgaaggacaatagtgtatttatatatatatatatatatatataggcaaatatgagtgttgctggcaagaagttagttaggacaggcaaaagttagttgtaatttaggagaagtagggtctatttggctgagcttctgctttctgcttttagtttcttaggaagttcttcttaagttcctgagaaagttgcataaaaccgacttcttttaaaagagtttttagaattaaaagttgaaattcactggtaactcaatcaacagcagaagtacttttggagcttcagaagttcaaaagtaatttttaaaagctcagccaaccagggtcgtaattccaacactttggattgtgaaaagtgctcaaatatccaatcttattcaatctgatggggttcatgtaaattatagggtagaagtagtaaagttttgatctgtgcaatattaactagtttgagttacctttgttccttcaaattataataattattttcttacaagtggctgtgtttgtttcttgttttcgacagtgacatacctatggcacaattcataatcaatatgaatgctgccttgcctgcatcgcagaagtttataatacatgttttggacaatactcatctgtttgtgcaaccccatgcagctgaaatgattagaagtgctgttcaagagtttagggaccagaactcatacgagaagcctaactaaaacattgtttagtaatccaaagcaagcattagtctcttttcttagtactgtatggttcaactttttttttaagcaatgaatgtatcattgaataactaaatcatgttcgacaacctaatatcatctaaaaatttaagaatcccaaatccaatatgaaaagtccccaaatcacacaacttgttcatccattcaaagattatacgctgttaatgcagtcacattggtcgtccgacaaacatgaaaatctagacaacataattgcaacacaataatcaaagatcattaaaaaaggtatgtttcttataaaaagatcgttgctaggttatgtttcaactacttgagtagaaagtcttaaagaaagaatcttagaaagtcttaaagaaagaatctaatccaatgctaacaagagtcacgcattccgcttgaatcacagtaaagctaagtataaaacacaaatatgtcaatattagtaagaaactaagagcactcccaagagatacaaatttatcaaaagtatggcatgtaatagatgttcttacataaatttttagagcaataaatagtattgttatatgtgtagaatagtactattcattgttctaaacttatttatataaaagttcgttgtaaaataaataaagtagattttagtgatatattttaaaagatagagaaaagaatattgaaaatgcttatgaaatacaatttagtttatataataaaccatgtgtggtgtagtggtagggatgtctttattgacattattttttgcttgggtaaatggttcaaatcctaccatagtccctcagtgggaggaattatgtttggctctttgagagactagcttgttgtgaaagtgtcatccttaatggaatgagaaccctcgagaggtacacgacccggactaggaccccagactcgacacagaccttggactcaaccccgaccccagttcggactcggaccctgcctcgaactcgaaccgctcctagtctcgaccttagactcaaatctagactcggacctcggcccaaaatccgacttaaataaaattaacaaataaaaataaaaataaaatttacaaatcacatttttatatttacttttaaaattagaaaaaacaaaaattattataaaatacatttctattttttacaaataaaattttaaaaacaaaaatttcacttttatattgccagtccgtggagaagatacgaaatgatatgcctttgaattaatctttctatcaaatcccaaaccgtaacagagcagaggagactagcgctaaacatagtgccgctttcattccattctatctcattccttcatttctgctccgacactgacagtcctctcttctccgacctcatcttcaatctcaattgggggagacccccttctctctctctct

SEQ ID NO: 186538 - DNA, 3854 bp, Cannabis indica
gtaggttgatgcaacaaacactccaccaggtcgtaaaactcgactaatttcagcaacctataaagtcaaaaccattttgatggaagcgtttgtttacttggtgacactttcattgtttaaaacccaatgaaattacaacagtgagtatgaaactcccctacaactgcttacttacagctgataatggtgaaggccaacagtgtagagctgcaccagcatgaacggcatctatagaacttgatgcgaaagggagcctagagatatctgccctaaccaaaactatgttcctaaaacaaaaataaaacaactcagatacatgtcaaacataaaatttgacacaattaaaaggctttcactaaaaagttgcaagtagtagcatatggaccatttagagaggatcagaggattatattttttaatgagaactgcaaatacatactctttgggaaagttttcctcctgctgaatgaattcatagcactgcttcaacatgttctccgagtagtcgagtgcaacaacaagagaaaaaagattactcttagcaaatagtctcgagaatagcccgctcccacaactcgcatctataatatttccacccaggactggctttatgaatttttgaaccagatcaaactgcagtaaacattataacatacatggttctttcttagcaaagaaaaacgcaagtcaatgtccacacttaccatggaatttcaacatatataatataagtttagagtctcaagaaagttcattattattagcagcataatattacgctacatggtacatacttccctattcaatggtttactatcattgaataaagaatgtatgtagagtttgtatatccttggagagttgaaacggaagacaaaatgtcacctctttttcagggccagggaaaccacctaatacggaaaagctttgacgccaacccctttcataaagaaatgataccaaaggtgtcctgatcgaccaacaaacaaataatataagattaaaacatatcataagatttataaatagagttgtagattcatgtggtattgagcaaagccctgaaaatgacattctaaaacatagtaaactatatgagatatatatgtatttcacttcacatgattgattattagacagataaatttgcatccaacaagtcacaagatacatagaaatccactaaagataaatctgccgaataagttgaaactgacaaccattagatagttacctgaaaatctctgtggaagcgggcatgggttcaccatagttcttagtcccacttgcagccgtgagctcaagatgagtctcattgccaaagtaagtcttcttacaagtgccacattgtaaactagacccagagactgattccctgcaaccaatgaatcccatacaacagttaaaagagcaagaggtaccaaattaaagaaccgacaaaaaagtaaacaaatcaacactaaaataaaaaagagcacaacacagtttaagcttcttttaagagaaataccaaatgggtagttttaattatgatgaaaaaagaaaataaaaaaccatacacagataagcccagttcgccgccggtcaacgccaatggttcgtagcatatcggacaagctaaaatgttgctcctttttttattattaatgtcttcatcattttggacagcagtaggagtaggatcctgttgtggtagattagatagaaccaaacttatttcaagtaaatacaaacatagacgtggggaaatatattattgaaaacataaagattacagtggaatcggtttggaggaagacagttgaagaagctcgaacacgtagggggagaaggcgtttgagagtgttcctacagggctgctgagtttgattgatgacccaatttcttgaattgatcattcgactctgttgcacgcctacccacgataggcttctcaccaatgtcaccattctcactttctctctagaacaaaggagtaggacaggagacgcgtttcagttttggccgggaatatattgatggcgtatatatctttttgctggaaaatatttaaaatgagttttgaggtactaatctcacctaatataaattaaagaaggaccacaatttttggacatattatttgcttcacaataactattatcattttgaggacaagaagacccatgaaggagccttcctttatgtttttgacatcaagaaagctttaattttaatttttctactaattatataaaatgttttgtaaatttttgagaaattcagaaaattttaatccgctgaaaatagtgctataaatacaggtcgagttttttgacaagaaatgaaaccagcacgagtctggaaggtacaagcacgattaggcacgaaaaaatacgggcttcagcacgacacgatacaataccccaaattgataaaatataccacgaaaaatatgtccttaaacacgacacgcacgaacttacgatactaactaaaaataagcttcaaacaatctattgcacctgtttttcttattttatacatttataaaatagttggtaccttatttttatattgtaaatttttttaaattttaaaagttttacataatttttcaaatactattatgtgcattgtatgtataaaaaaagtaaaaattaaaaacacaaatcaagtgcattgatttgatacactcattttttatgggtgcactatgtaagcacccaaaagtaagtatcattctcaagtttaaaccataatgtgctttcagattttttggggggttagttgttaaagatattgtttctaattgtacaattttcttgatgtttgtttttgggattttatttaaaatcctgttgatgccactaatgtctaattaatgatagtcgtgatttcttttgaactttttactctagagtagtattttctgagtatttttctaacacaaaataaatagataaataaataaagcatctggtttgttaaaaatgtttaatgagcatcaatcaccaattcacttctcataatttaagcgcagagtttctaaattcctattctttaattttttaaaataccataagtgagtaacttgaatattgagtagttttacatgaatattttctaacttgaatacggatttcaatttcatccttgacaacctggtctcgaagctacatggttgaaagatgaaattactttcaaaagctggccgtgctacccttatcaaatttgtgggactggccttgccagtttacactatgcaaactaccaagctctccaaaaaaacttacttccagaattgatggtatgatcagggatttttggtggggttgtgagcagggtaatcgtggtttgtgcttaaaggctcgggaccacttatgccttcccaaatcaagaggtggactcgatttttgtaagtccatagaattgaaccaggctatactggcaaaatgggaatgggcccttcttactgatgaacagtctctctactgcagggtgttaagggctaaatatctaaagagtaagacgttcatggaggcaacctatacaaattcagactcttggttctggaaaaatgtggtcaaatcaaaagtgattctcaggaaaggggcttgtaaacttgtctcgaatggggaagatacgaatgtttggtcgatccttgggctgttcatggcaatgagttctatcctagacccatcacttcttgtcctgagagggtggttaaggtggcagatctgcttaataataatggggatcgggacattgccatgctcaagtccctgtttgactctgatactattactaacatcctaaaagggggatagccttgtggccaagggaatgacagatggatctggactaaggaagtg

SEQ ID NO: 186539 - DNA, 2385 bp, Cannabis indica
aaattttctccacactggccatgacatctacaaatcagtggaagcacatgcaaataaaagaagaattcgcataaaactctgagcaagtgcaacagtcagcaacatccacaaagggccagtaaaagtatatgaccacatagcaaacaaggaacacatgcaatgcacgtaattggagatggcatataaattagagcaagaaaaacatattagcaaattaaactcacctccaacggtgtcatcaattccaaaggcttatcccaaacagactgttttgttcttctgttgtaataatatctgtagggacaagaaattcaatagcaattttagttcaaacaaaataattgaaaacaacctcaaatgacataaactagaagtaaagagtttgttataagaaatcattaaagaaaaccaagatcctcaaacaataatcaaagtattttgattgcagtattatcaccgaaaaagtgacaagagtgatagatgaactaataacttacctccttccatcagtagatgaatgttcttgccaatcagataaggaaggctgtgtaaggctatttattgcctgtaaaacaaaagatgaggtcaccaaagtcacttcaaccctatttattatcataatgtatgctctctttttccttttttccttttctgaaacaaagctccccacctaaccctaccatatttagggaccaataaactatagcaattttaatgtaggtgcccaggaggacttgaacctcataccttgtgggagcaaaccacatgcctaaaaatttaagctacccctattgggtataaccataacgtatgtatggaaatgtaattaacatagtgataggaatcaccaaagaagaaaaagtacatcaaaatatgcacaacaagaagagacaagacctaataatttttttctattttaatcattaaagttcagcagacaaaaatgaataaataattaattacagtatctgtggaagaagcagccgaaggttgatggccagtctgctggactaaggtagcaactggagcactctggcttccagagggcaaccaaggttgtcctggaatgggtgcttgcatttgaggcattgactggaactgtggcattgagttggcattattttgtggttggacgaaggaaggtgcaaactgagacaaacaaataaaactatgtcaggttttttgcatcatgtacttcacaaaaccatgcaaaacttatacacaatattagcccttacagaatatggtgatgaaaaaggcatcccggcaccaccaggcatctgattattgaaaggaggaccaggttgctgagtctgtggtggtccaggtgtaataggccttgtttgaatgtacgacattggtaaaccctgtgatgaaggcatcggatgaccaccttgacctggtctaggagggtacggttgcataggctgagaaaaatgcattggctgactttgtacaccagacatccctaagttaggatgcggcataccctgtccaactggctgaaattgttgcgaagctgatggaagaaatggttgtccttgctgatttgggatcattggtcgaaactagagtaaagaaattcaaacaaaaagcaatcaataaagattatttcaaaacagagacgacaacatgaaaagggtcagcaagtgtggacatagatggattttttttttgtttttttggaaagcaacattgagatattggacccaaaacattgagatccccaaaatctactgcgggaggccaaaccacaaaaagaaagctcactaagaaatttttttaatgggtcttttcttccattgaacaaaaagctgatttttacataaaatccagacccagaaagacattagagcaatggaacattgcaataaataaacgaaaccaatcaacaaccattccaggtatgatctaactatattggaatgttatcacaatccaaagacaaaaatttactgagaaactcataagaacctaaccagaaaagttccactgcaaatttcaaaatttacaccataacaaaagcagtctattataatgaaactaaaggtcatagtaaaaaaaatgaattttctgctcataggaatttcatcaagttacaatatttatcacagattcacaacaaacacaccataataagacgttaaattataaaaaaaaaattgcacaagttaaactgaatatataaaacaaacaaataatatgaactcatgaggaccgaaacaacatgaaaggaagagcgaatacgaaaagagaagttgggtatttctcagttttctccgatttgtaagagaccaaataaagagaagaaagaagaagaataatgcacgaaatgaatttaagaaagaaaaagagaaaggaaaagagagagttacctggaagtaa

SEQ ID NO: 186540 - DNA, 3195 bp, Cannabis indica
tatgtttataactcgactgtctgaacagtcttccgcgagactggaacgtacaaactaactaactcatgtatcgacgagaaaacttgtgagtaacttttagaataatgtagtaacttttagcatttcaccatttttaaagaaaatgttgccaaatttatctcggtcgccacaaaaattaaaaaaaaaaaaaaaactacttcaaaaaaaagagactttctgcttcatagatgaatattcagcatataacggctatggatttgccggtttggtaatttttttttctttttcaaaatcttagtcccagtaatgaccatagggaaaatagatatagtttaggagaaagaagggtattcaggtaaatccacttctgctggggctagtaggcgggaaagagcttaggaacactgaaacagagcccacttggttctaacgaacaacctccaccctccaacagaattgaaaaacagttaaaaccaaaaaagtagaaacaagtgagcttcaaaactctctttctctccgtatatcatataaggtccgatcttgatgaaagaagagaggtgatctgacaatgtcggttccaatactcgaagcttgcaagaagagaaaaagaagaccaaagctgtttgggttccatacgttcggagattccattcaagcaagaggtcctttcagagagagcattcgattgtttcttcaagaatgtgcagaaatcgaagactataatcttgaaggtatgcccgtgtggtgtacgcttctcgtccttgaaaacagaagcctcgtactccctctctacaccattgaagaagacgttaaaacctctccactaccatattgcgatcactgcagatcaaccggtaattcgtctgctcatcattttagtttcgtacgcggtatcgtttgtttttttgattctttcatagcttttttatcaactttcatggcgtcttgtgtttcaattaaggctggagcaagcacttcgttgctaagaggaaataccactttttgatcccaatagacgattcgtggaacaagcccttggacgatggtgttcttgatacccatgagtcgcatcttttgtacggattgatacactctaatggcttcggccacttgcttagtataaatggacttgagggaggttcaaagtacctgtttggaagggaaataatggacctctgggatcgattatgcactagtcttcaagcaaggtaagaaaaataagataattgcgtaattaagttttctatcaaattcaagtttttagggttaattttgttagttaatttacaggaagattacggtggcagatacgtcgaagaaacgatcaatggatcttcgccttctccacggggtcgcttatggacatccctggtttggaagatggggttaccgcttctgccatgggagttttggggtgaaggattacaactacgaccgagctattgagattctctgtacattggagctagaaacgataataaacgatttcagcgacacggaaagattccaagacatcaggcaaattattcgtctttacagagatttgagcgaaactcaattgataacgctcaaagatctgttgaaattcatgctcacagtaaagtccagagcctcggcacatggaaaagtgatcatagcatcttctagtactcctgttgtctcgtccttttcgatctcaaaacctttcaccagaacatccttacagagcaataataacaagtcgcatgggagagacaatattaagcccgtaaagtacaaaaagttcagcactgtagtggctaacatggacagccggtggcctcctagacgactagaattcgcagccgatgtgattgtgaaagccctcaaggagaagaaagagagcaattttggtagtggcgggatgaccaggcaagacgtgcgcgatgctgctaggttacatataggcgacactggtttacttgactacgttctaaaatctcttgacaatgtcattgtgggaaatcagatcgttcgccgagctgttaatccctctacgagaatattggaatacactatccatgaagttcgtgaaaatcctagtaaggctgtttctcagccctccgatcaggaaatcatgtttaatcaaactcagaaattcatatctactaatactccaccaactctggttcctgggaatgacgtgtacaccgacgtcatatacttgtataggcacgtacttctggattacccagcttcggagattgttgagttagctacgcaaaccgttctagacaccaagcactttgtgaaggagtggccattcaaagacgaggaagagcaaatgttgacattcatttgcagatttataccgagtttaagcgatgaaagtgagtgtggaatgagtgagattgtgtctgtaccattacatgccacggttggtgagcttaagaacgcggtggagactgctctaagggacacttattgcgtgacagagcaaatagtggtgacggatatagacgggttggaggagattgatgatggagaaatattgtttgggagacttgaatctggcgtcgagataagagtgagggggaataatggtattagtaatattggggggtactccaagagtcccgagggagggcttttgaggcgccaaggtggatgtgacatgtggatggtgaaatgcgagtgtggggcccgggatgatgacggagagcggatggtggcctgcgacatctgtgaggtgtggcagcacactcgctgcatcgggatcgacgatgccgagaacgtgccaccactatttgtgtgctcttcatgttgtgactcccttgtgccgcccagagttgctcatcgtgaggaggcagcatccggaaaaatggagtattgtgaggatttgttgctgccgacccattcatttgatcaatacggcttggccataggatactgattaattggagctgtgtcattgcaccattaagttctttcttttgcttaatttcctttttcttttcttctcacaatgtgcaattttgcagaagaacatttcacttcgtaaagtaataagcttccgtaaattttgaaactaaacaaagtctactatcactcactcaccacatctatctctataaatatatacatatattactacattagttggtacccatttggagttctttcaaaaacaataaataatcacaacatgtcgaatttttattttcaataattactatt

SEQ ID NO: 186541 - DNA, 7543 bp, Cannabis indica
atcggggaagtggaggcggcgctgaggaaagaaggggaggctttgccgggacgtgtaaaagatcggaaacatgagcacgagctgaaattggatatggctagagggtatgtttgtgattgttgtaaaggaggagggagattttgggcattctcttgtgatgtttgtgattatgatcttcaccccacttgtgtggaaatggataaccctacctcttgatatatattcttctccatttatttatttatataatatatatgtgaagtgggtgtaattttttaaaatatagataaatatacttacaattatacttctgttaactttttttttaatttaagaaataaatatttgtattacattacattaaatctctatctaaaaataataacttttaatttattataaaaataatataatattatatagtatgttatctttgaattattataaatatttaataaattaatattttttaaaactaattaaatgactagtctaaaatattgcttaacatacatatttttttaatcattaaaatacttttattttattattttagagtatgatatattatttaattttattgtcatatatatttacttatttattgtgttgaccacgtttctagtcaacgacgcaagatcaaataaaactataataaaagtgtttgaataatgagaataatgaagaattataaacgatgcaaagatgtatagagattcgttcccggattcagtaatagtctactctctttttattgtaattttactaagaaataacaagatcacatgaagttcaagtgagtttcttgctatcacttctgtaaaagttacaagtaattggcagcgtaatggctcttttgagaatatagaatttagtctctggatagtgaatataattcattaaaatgcaaaatatttacatttaattacagaataaataattaaggatttgattgagtcaatcccacaatatcctcaatacccttgattatcgcaatcccacacttctaggaaccctgattgacctattttgtagggaattaggcagttgggatgaatctagacatttcctctatgagtttgttggctggacatccgttcgggatgtgtcttcctaactgtttagagtaatggttggtaggctccgtccagcttacacctgatgctgggtgacttctcctttcatgtattctgcccaacacctcccaagttgtttgatgtcgtaagatccacaaagatcggtgataaccccgaccaaactaattcccccactcgtggcgccttgaaccatcgtctcaaagctttggcgaatgatttcacccacattaagattgtagcccttcatgatggcatacacatacttgagacagtcgatttacacataaaaaaaagtacttacttggcaccaaatgtgcactgacaatgtataaccaagtcttagccactaggttcagttcacatctatacaagaggtttgacgatccatctagttcatgaaacctcaaccccaggaagcctacattttctgcaatgtcctcttaatcaagctcttcatattcctcaattattctcaatctttgttgctctcgatcaaacccaagcatttcataacaggttgattgcttctgtagtagcaaggacattctttgttcgtacttttactagcccattctttatttcaggctagtaggccaagaattcacaagccatggtgacattggctcttttgtggacattgacaaacgaaccctaatttcggtttgaacttgatgccttatcctctcaaactggggttggttgttcaacgagaaagtgttataatcaatcccctagtcgttgatatacgacttattttttaatataagaaactgatcttgggcttcttcacttacaaaccgagtcttatcaaatgaaggccttaaggcaatacatggaggattcgatgaggaggcacctacctcattcactcttgttcgctttgggcccatgatcaaccaaaaaaaatcaacttttacactcaccaaaatttcttgagaaatttcgacaacacctccccttaatttcttcactttccctacaacaaaatttcacaaaaatcacagctctaatacccaatgagaccaataatccaatacaactcaaaaattctcaagaaaatccacaaatcccagatacaatcttcaaaagctttcaaaataatggaaaactcactaattcatttgaacaatcatgaagaatgagacttactaatgaggacactatcaatgaaccaccattgttgaaaaatcttgaaaatttgagtttgaagatgatgaatagtgaaattcttggatttgggtgagaatgagtgatttagggtttgattttcggggaaaaagaaagattaatgaaggataatgtgtttagaagtgattagaagtgatggaaatgaagaaatcaaggatttgtaggagagattgggtgttttcggttgagagaaagtgaaaactcaaatgggatgataaaattaggtttagaattgttttggcccgaagtgggtctttataggctgcgtgggtctcctggttgcgactagctaatccatggtcgcaaccattgcgaggctgaaaataaaaggctttctgtaaaattcgtggtcacgaccacttagaagcctcatcgcgacaacataattcgtcgcgactagaaggcttgtggtcacgaccactgtaacaagtaaaatcgaggcttcttactaatgtctttcttcatcgaagggggcttcttgtatggaacattggcgtgggtggccattaggattgtcctaggagtgtctgtgaggacggtgaagcatgtgaacttctcctccttttcccgaggatgttgttgtgtaaggggattattgaatttccctttcttaccatttccttggtcggaaccaatgttgttttatttccctctgttattgttgttactttggggttgggcaatattattggccccagctgtggcaggtgtattgttgggggtagctactttctgcccgccaattttcacttggcggacaacctcttcaagttttatgaaactgttcggtctaaaaactctctcatactgttagttgatatttttttgatgtccctacaaaggtcactcagaggtaggattcctcctaaaatggttgcataccatccttcttctattaaacctttgatttttgtggcttcgatcatgaacctttagatatagtctttcaaaagttccccgacctttgttttatttcaatcaggtcctcaaattgagatggtatcagtctagaggatggaaatgtgtataaactcagtggtgcaagcatcccaggaatcaaatctccctagggacagtttaaaataatactattgtgcggtgtcagacaaggttgctggaaaaattctacaatgaacatcatctatcaccccttccagatccatttgaatctcaaagtatttgatatgggccaaaggatcttcttttccaatgtacattttctaggttggcatcatgaacttggttggtaggggcaacgcgttaatgtgtgcagagaaaggtaatcctcaagcccaatcaagttccatgtcgaaaagctttgggtcggatagtccttgtacaaggctcttgagttgatccaattatgcttgtactacagaatcaactctagtcgtcctttgtccagccaactcttctcttgggttgacaagaggttgatcatatgggtcagcaggatatcttgtccccttagtggatcattttggggtggaatttgtccatcctgattatttcttcttcggtttaagttattccgaaggtcttctcccactcggggactcattctatcaaacacaaagtccttgggcctcaggtcagactacgtttgagcatatcgggaaggaacatcattattgtgcctggtgttattatgagttctttggttagtgcgcccatcaagagggtggctaatggaaccatcctcattgaggtaggggtaagattagtgggacctactttggccctacttaggtaggatatcttccctctttctttcttctctaagaaagtcttagaactggtcaattcaactgtatgccctttaaggcgagatttgttcatcattgggtcgattgggaggcggccttatttgggaaacagttgggctcactggatgcgaagttcccccatagtccctaaggcattgagttttctccatgacataaagaccttttcccccaaagggggtcccttatgagtggtggttcttccactctagacccaactctttcgttgaacctcctaatcaggtcatttgccgccctattggggcagtttaatttttcctgatgggattggaggatcgtagtctgccaatccatccattcttagaatttgcatctctgctaggctaaagcattgctcacagcagtgcatgtttcttcttattcatgatggaggatgttcgtatgatcctagacttgccctacgacctctcttagtctggccaactcaaaatcatcccccaagtcaacatggggttcgttgacactaggttggccaaatccaaatctagtttctccagcgtatacctgggggtagcccttgttaaaggaacccctgtggtactttgggcaggttgtccagcattgatcgggacctgcctgacatttgtcaagtcttgcctgacattaactgggcttacctgttggaaccctgcagatgggtttgcccgaggtggctgggcagggttggccgaattgtcactagttagtggaacatagacattgagattcacagccatcgaatcctgggtttcagtggacacgtttttccttgtcaggatcatcctgattaccaggtgaaaagagatgagatctttgtaagaaagttaaagctctcaatgaaagcacaaaaagtgttgactagaaagatagccaacatattcatatttgcatatcgtttaataaaaatgagagaaacctcttttaaacctcccaataacagtttacattcttgcacaactaataccaaaaactgactgtaatggcaaccaatagcctgaatggcaatcgaattccaacggcacatggccctaatagccctaacagctgtccagcaacaagtgaaggcaccgtatcactttcttgagccttcaagggtaagtgaaggcaacaacaatgactcaatttacattcttaatacattttttttttttgaataagagaagactttattcaaagaaaccaacgaagaaacacaatacaaacaacagctgcaaagctggccgggaccaacagcactacgagctagttataatcttacataaatggagatcaaacttgctcttgctactacttatacaactcaaacatatgtatttgatagcattcttaatatccaaactaatacgagagatagttttgtaactaagatcaaaaatataattgttcctattcactcaaatattatggataataaagcaaactgcattgagcaattttctctgtaagtttttgatgggtttagaaagtcaatcataccaatccttgaagcttttcggccaatctaatctccctaaccaattgctaacttctgacacaacctttaaagtaaacgggcattccataaagatgtgaccatgagactctttgtcagtttcacaaatcggacaaagatcatcaatcagcataaacctgctgatgtggtctctagtcaagagcggattattgatcgcttgccatccaatgaatctatgtttcgaaatactcattttatgccagatttgattagcatattcaatttttggcatatgattaacagatatgtaaaacatattggctttgaacttaccattcttactagcattaacaacatgtaacctatcaatagaatttctcagtcgtaataatttcatgaaatactagctcgcatcatgtttaaactcaacctgccaaaagtcatttccttttaagtaaatagcatttattcaccgaacccaaaggttatcctgtttgcttgaaatagtccaaataaactttgccatcaaggttgtgctccatctcctaccctcacgaaaggcaacgcctcctcttaatacattattatatgtataaataatacatagatttttcttttctttcaaatatatgatgttttattgaaattacaataaaatagagtttacatataggatgaggaattacttcttaccaaaaaaaacacatcggttagcctaagaggatgttagcaaatccataagctgcaagtattaaaattgtgactagcatgagaaagaaatacctttaaaaattttgacaacaataactttgtcacaaaatataactcataattaattataatagaaagatattacatatgatatgttgtttttgttttattgtggccgaattagaaaaataaatttctaagaacctatatatagtaaaattagctgacacaggtttaaaataaaaagataaataaataaaagagtggtcaaacatgccttagaaaaaggggaaactacactaaaattgatcaaggtatatacgtagtgatgatatataataataataataataaaatatgtattagatccgattccagggaggttatatttagtggagacacagattgtaaaatagtcaaaacaggtttatattatatatagtcaaaactagtgcttatttatgccacaaacatggttctttctttatatagtcagaaaacccaaaacaaggattatatatagtcaagacaaaataaaacaaagccatgcatgcatgcatatacctacctatgcctggttattttttttattattattaatagccacaagacaacaagacaagacaaaaatagttcattttctttctctttctctctctctccaagaaaaagaaaaaaagaagatttgatcttgtcttttgggtttaggttgttgtttgagaaagtaaacaacaacttaattaataagaaataaaaataataatgtggtttccaaagcaccattcagagagaaaaggagggaatggattggtggcagtggccatagacaaagacaagaacagccaaaatgcccttaaatgggctattgacaatattctccaaagaggccaaactgttgttcttattcatgtcaagctcaaacaaaactccaattcttctttttctacaagtacgtaagtcactcattcactcttattatatatatatatatatacatctcaatgggttttacttaacctttctaattattattgtatacagaggtggcagaggatagttcactttccaaagaacctgatgccctagaccagggagttgctcctcccttttcgttgtttttgttcccgtaaagatgtaagtcacaatcaaatcaaatcaaattaattatagtatcagattattattgtttttctttatattataaatatacattacagatacaatgcaaagacatcaatgttagaagatgtagatgtagctaaagcattgattgagtacgtttccaggctgcaatcgaaaatttggttctt

SEQ ID NO: 186542 - DNA, 2407 bp, Cannabis indica
atttggtagatatcaaaatttagtacatgagcaattacagaattagtaaaagtgaatgaaactgaaaaaaaaaattcttaaatctaacaatcttaatagttcaatggaatttttaacggttaaaaaaaattcaagaagcataatttggtacttgttaaagttcaatagataaaaatcttaattatttttatctacgggtttggatgaggaatttgagctatagactaaatcgaatattgatatgattaaggtggatattgatagagtgattttcacgtgggaaaggaagctcggtgttgaaatactagctcgagacagtgtgggtcaattggtggaggatgcctcgttgtgtagaccagtcaagtggatccagctttggcgagtacagtgggaatcaaagaagctcttagttagattaagacaaaagggtgggcaagagtgaaagtttaaacagattctttaatagcgattcaagctacttttagttccttgaatatgttttctccttttggttaaatagttcgtgaatgcaaatttttgttagcttctttaccttttatcaatctattatattttattaaacgttctactattaagatcgcttattgtattgttcgtgactcttatttttattcagatcgtaattttattttaaagaaaaaaaatataaaaataaaaataacacatcagcgccacataagcaaaacagtacaaaaattctgaatttgatgacattgtattgattgttgtgagagttatggtaatggggccttgccagtcacgaggaatgtaatgagaaaacatacactatgattatgatttattatgggtaagggtggggttcaccactgcacacttgatcattcttctctttagctataacatatatatttatacagctaaaatattgttgtatatatagacaatatgttgatttgattattttgattaagatatatatacacttaccttactactatattaatgatttttcctttaaaaaataaaatcatcattttattaaaacgattaactcagttactaaacaaggtagcaactcaacaggaacattgtccaagttgaaacgacaatcagggtgggatacagccgctctagcaaaagagtgagcaactatatttactgatcgctttacaaaataaaaaaaaatattacgcaaagcatgaaataaagttttacattcactaatcactttaccaaacatcgaaaccacggacatagagcttcgcatagcttgaacaaccgagagacagtcggtttccaaggtgacattggtccactacgtatataggcaaagtatatataggcaatatgttgtgaaatatacttgtttaaataatagagagaaaaaaaataataaccactacgtattggcatagggaattagggatgactccataattttgtgactatagaatagagaaaaaaaaaaaatcattaaaccaataatttttattagtatatgcatagatagtctttaaaagtggtggtgctatctctcatatattaataatttttattaatatatgcatagttaattacacctcatttgtaatatatacttatatagttaattaaagtgtgtatatatattgaggaaaaaaaatacatatttttaatattatatgtcatagtatttgccttgttaatgtttaattagtacacattttcaaatattttgaattgtcatataaaaaaattatgcttttgaactatttgtttaataatgtaaaattagtaataataatataaactttaaaatgatttaatttttgaaatttattttttaaagtggaaattttaaggttttgttttctatatatttatcctaaatcttgatagattcatcaccaatagaaaatgtcaacaaacaagttatagagtttatttatttgtttattattattttatgagctagaaaaatgtaagtgtatgtataaatctcaatgaattaaaaaaataataaaaataaatgcatttctcattgtgtacattgaactaaataggatcatttgaaaatatatatatatatatatttatatattgtgtctaatgaataccaacataatttcaaatgtgttatataggtgactctcctagtatatcgaaatattttttaatattgttcttcaattatcaaaaatttaaaactaattattatataaaaatagtattttatttttacataataagtaagtatgaaattaaagagaatagtaatgaaagctatagaggcaagtgggtgagatcttaagaatgggatgaatgaccatgtgaaatgattttataatttaataagtgatgggactacaatatgtgtaaaacaccaaactgtccaaaataaataccaaaaaaaactaaaacttatgtcatatttcttatccatgta

SEQ ID NO: 186543 - DNA, 1443 bp, Cannabis indica
ttgaaagataggattaatgaattctgagaaattataataagtattttttttttaaaaaaagtattgaataagtatccaacggtatgaaaatataattactaagaaattattaaagtaggttaattatgcaaaacatgatgattatactttttaaaacatgaccatattatactctaaaaaaaaaatatattatatatcaaattaattgtgataatacattatgtatctagcttcttttctttttaaaaaaaagagtatatgtatgaacaggtaatatattaaataataaatctcattttccatcaaaaattattatttttcgtctcttttgatttggacttgcattaagtgcaccacttacatcccaaaattaattatttctagttttctaatctttattttaatttaattatattgtttataactttaattggttgagcttagctttttttcttttccttttatttcttttttatctttcgctgtccttaaattacaatgtaacaacttaattaggtcattaggcattaaaaaattagaataaaaccctatttgcaggccaatattacattactcaattattatttttgaaaaagaaaaagttgtggaagctaatgtacatcgatctagccaccatatatttataaaaatccataaaactattgaatattgatattgttcttatctaaccctaatttcttaataatttttcttgttttttggtgacatatttaaaccctaatttatgcaagatgcctttagttagtcttgagaataatgtaattgtatttattatttaattgcatttacttggtcaatgtttgtgttgtggtccctcaaagttaaatttaatttgaaatgtgaatactttcattccaatatgtattccattttcaaatcaattaatttaaagcatatttgggaaaaaaaaaccaaaagaaatctttattacaaaaataataagaatttttacagctgtaaaattgcaataaacagggcttggggaaggtaagtaagagggttttaaaaaaatagcccaaaaatagggtctttttatttatttaacatttttgcttggaaatttaagattagatcaataattataatagtagaaggctgttttggtcttgaaagatgggtccttgtccaaacatagaacaaacttaaaaagtccaaatagttttagtgatgtgtcagtgtttcagagccaaaaacaaaaactattttaacctcattctaatgcttaattaaaaaaagtgtctgattccactgtgtaaaataaaacactttaatttgtcaaaagataagaagaacgctggtaataatatgttaaaaaggttccaacatgtgccagcctttaaaaccacatgcgaagcattcatcagaataattgcctaatccaattggcctttttgaacctcactttttgtcccgaaaaaccca

SEQ ID NO: 186544 - DNA, 3261 bp, Cannabis indica
cactaaagtaatagagatatgggaacagtatctaaaaggttgccggggaatactctgtgacttgtcggtgctatatcttttttttttttccttcttctttcttttacattgaaaataaataaatcaacacattcgcagtacgatgtatttttcttttatatttatatacagataactagttaacatcattgttcagaagaccaaagaaaagggttattattgtagtagcaaacctaacgaaaattaatgagttattgttatttttatttaatggtaaaactaagaaaagggtgtaagttatagattggccaaagaaggttctcttttgtatcaaccaaaatattatatatattgaaaacaagaacaaaaaaagcacagttctaaattagagcatagagctaatcatagtgcctactatcctagtcttcctctctctatctgggtatctctgtttttcagttctgattaagctacttttgttgttcttcttcttcttttcgattcctcagctgctttgaactttgaagctttattcatttttttttgagggcattccatttgaggtcattttgatgcctacgccacttgaacatgattacataggcttaacagagccttctaccatggaaaaaagctctgacaagctttcatcatcttcttcttctactctttcggatgagaagagctctgcttgtaacctcaaagagactgagctaagactcggcttgcctggttcccagtctcctgaaagaaaaccgggattcggggtctccctttttggtaaagatttggaggaaaagcataatgggtattctccaaacgtgtcaaagaactttgagactggtgttaagagaggtttctctgacgccattgacggctcctctgacaaatgggttttttctgtctctaatggatctgatgctgatttgggaaaaggagctgtttttccttctaccggaggtgggcatggagggaaacctcgtggtggtttggagaatcagcagtcatgctcttctacaccaaccatgaaagatgttgttccaaagtcagcacaggagaaaaagccacaggtttctgaccacaccagtgctcctgctgccaagtaatttcatccatcctattcatttcttaatcgtttctctttagtctttgacaggtttgagtgctgataatttaagctaataccgaaagaaaataagtggaagtttaattgtgttcatattatgttgcttctcctagctattttcatgtatgagaggtgacttgtattgctgtgctgttagattagttcactccatttatatattggggttgattttcttgcttaaataatattgatttttatggtgtaccctttgatgtacttgtattgttttgtttagaaagtaataatactgactgagtttgaattctttaccaagttggtcttgtctctttgtgttgaattttacgaatcaagttctgactctttgagcataaaaccatatttttgtaacagggcacaagtggtaggatggccaccaattcgatcatttcgaaagaacaccatggcttctaacttgtcaaaaactaacgaagatactgaggagaaatctggattgggatgtctttatgttaaggtcagtatggacggtgctccatacctacggaaagttgaccttaaaacatgtactaactatctggaactctccttagctcttgagaagatgttcagctcctttacaattggtaacccctctctttttctctctgtatttctatctgtctatatataaatattttaaagcaactgtattagctatttatagtcttgagtttgttctatgtatatttccagtcatttactttaacttctaatgactgatacaggtcagtgcagttctcctggtcttccagagcgaaatggattaactgagagccgtttgatggatcttctccatggttctgattctgaatatgtggttacttacgaagacaaggatggggactggatgctggttggtgatgtcccttgggagtaagtgtttcttcccctttttgtgattttgtataattcgtgacccttcttggaattatatgttttgtactaagactcagaatatctgccttatagagtaggctatttattagattatgatatttttggacttaataagaagagtttaagcctcttcatatattacacttgctgtaaagagtcaaccattaattatttttatctaaattttccattgcttttgtttttaacaggatgttcactgatacatgtagacgattgaggataatgaaaggttccgaggctattggacttggtatttattctaaaatgcttacttcaatatctcatgcttttttttctattttacacattatcttataaattggtttatttttcctttataacgaagttattgttgttctttggctacagctccaagggccatggagaagtgcaagaaccgaagctgctaagcacaaaatattggcaggacaagacggcattctccatggaagctaacccctacttggatttcaagttgggtgcttgtgagagaacgctaaatatgtttcttcagtatgttagattgtgtattttgtgtactttgagaattttcacagcttgaagtatttcactggagatataccatattatatacgtttgtttttgcttttattttcattaattgtatctgctgcttcataaactctgtttagtgtgtaaatgtaacaatttgctgcttccagaaatctgcgtgtatctgaaagagaaatatatataatattaatatctttgggtccataggcattaattttggtgtctcctcttggtccatagagattaattttgacacttctagttgaatatgacaaggaattttcggataagtcctaactagaatttcatattgttattattactcttttctaaatgcttcaccaaaactcaccctgtgttcagtgttcatacagttacggtaaatataatacatcaataacaatattgatctctgaaacctaaattgaatttcgtgtaaatcattttgaataaccaaaaagtgtttatcagcaattatattaccaagttttgttagtaatcaaaagtcaaactgtttagttgaggagaaaccataaacagctgcaacgaagacatggttgataaaagttacaatgatacagagcagcatacgttcacatttttcaaagttttttttttttttttttttttttaaaaaaagtttaaaaaaaagactcgacgagtat

SEQ ID NO: 186545 - DNA, 8477 bp, Cannabis indica
taataaattatttgaggtacaaaatttatcaattactttttttgtcaaaactaattagctattagtgtgggacaagtgtaacaacttaattttctagtttgaaagaatcctatatgaacatatagcctaaaaatatatcacaattcatttgtaataccctaaaaatatttatctaactaattgagggttatgaaattaataaccacatgtcattacgaaaacctcaaagaaatttattaaactaataaaattttgtgatccaatagggatacacctcccaaaaggtaagaaatccattacaatgcttatccactttccacttagccataacttgaggttgtttattggctctacgagggatcaaacaaacctgaaaatcagtggcatcaaggctaagcatcaaagtgaaggaagaatcagttgacttgttaagagctttttaggtatgaatcgaacttgaaattatcttacaatctgtaagtaggttaaaatctctaagatttaaggcttaattaagatacctgactcccattgatcacagcctgcaattcccctgccaaagaattaggaactttgctcttctttgcaaacaagcttatgatctggtcctcttcatatatctttgaaagaaactctaatgcatcaaccttactaaaagccatagagacaataacattcatctcccctagttgaggtaaactctagagctgaaaaatgttagaagataaattgaaatgattttatacaagagttaccaatacatttgattacaatccagtaccaagatctaagtccccttagatctaataagataagatccccttgcttccatcaagttgaactccctccagtagatcagtttaaactcccttcagacattgcagatcaacattccttcttcaatccttgaagatccaatgaactacaatcgacaacacaaccaataaagaagaaacatagaaaagtattttgccatagcagagcaataatcactagaagattctatcaatgatggtgagttagtttgaaaaagctagatcaacttatttaactaacacttcgataacagtgacttaactaaccaaagcaccagttcaatctagctggcaatgagctaaaccaaaaaataaaacaaactaaaagctgacctgacaaaagataaatgagctagactaaacaaatgcatataaaaagacttagatgatcaactcaaatagccaggaaagaaataattcagaacacaactaataaaatatcaagcaacataattttccatacaaaaacatggcagttgcaatctcctccttgaaaattatgaccaacgaccaagcaatatagacaaaaacacacaaaagaagaactaagcacaaacaatccaaacgatattatcaaataaacttacccattgatattgtcaagttcagcagacagaataacaaaaaaaaagcctaaacccaaaatatgaacattgtttagcataactgtacaaaaatgtaacacattatctccccctcagtgatcataatcattcattgctgaaatcggctgcaagagaagcaagaggaacatgcactaaagtatcaacaacatcaatacgataggggaggtaatcagttgaaggctccccctgacaccaacagttgttgaaactccttgatcatcaaccaaaaccgactccccctaaacccaagcaagaacttgttcctcctggacaatagcacaagtatttgggctttgatcaataggcacgaatgaaggctcaacaacaaaagtagggacagaaggtccatgaaccacaacatcagatggaacataagtcagatcaaatgtggataacacgatgaatgctcagagaaggcatcgtcaccatctgaagaactcaaaaaatcaccaccagtgggaacaaaaggaccaaccttagaagactttaaaaccacaatcatagaagacaaaacaacaacgacaactttctcaaaatgacactgacattgttgatctcgtgcataagagtcagctaagttatgcaccaaagagaatagctgaccctgcgaagtagaaggactgaacccttcaagagtcactgaaggaatagtggaggatgatggaacatcagtggttaaggcctcaccaatggcaggaatattcctaagaaataaaggcaaaggcttgccaaaaataggagagaaggacttgccaagtttagggactggtagaatcttgccttaataaaacacagtaagaaaccccctttgcaccacttgattaatcaaatagggataaggaaaagtctgtttcacctgtttggcagtagcagagttcacaatctgatcatacataagggatggaagatcaatactgacaccagttcctaatgcaaacagaaatttgccagtgttataattgatggtagaaatgagtgagttagccccccaattggataatgcaatcttatgaaggactttataaaactcagtaagcacggtaacatgtaactcctttccattctagataaacttagagttgccagtgatctcagaccctatttctttaaaagtaggcttaaaatcctcattaaaaaatgggattggaatggttttgattttcaagacatatctaatggttgaagaggcaaaccaaaatcgattgccttagatataagctaagtattggaactttcttttcttgttcaaaatgctaccatcaagattatcataaaattaccttactaaattttcatttggctactgaagatgagtgacagtcaacacccaccctctcttttcaatcagctctctaatttttgaaaagtacttaagtttgacttaatatttcaagccacaaagggtgaaaatacacattatcctgaaacataagcaacttatcattcaaataaaatgatgcacccattggtttggctccatcatactagggtttgagaatgacctaggatgaggagatgtggttttattaggagcaagaatgctaggagaagtagatggaactattttttgtttagttgaggacttagggccatgaggattggatggtaacgactcgagaggttccattgatgattccgcaagtgagatggttgtggaacgtggttgaacaaaaggagtagacatagaacgagtaaatctcctaggcaaactagaagacgctaaggacatacctaggtccggtgtggaatgagtcaagtcagacataacatgtgaggaacaagggctcacgactttggacaatggtgatggtccaccaccagaaaaggaagtccctttgaccttgcgacacactttcttccctataacaaaatctttaagtacatacacaaaagagaacaaacaaggaagatgaacagtaccacagagtggttgagaattttacttaacgaggaaggaaaaagtaaatgtgaaatgaaaatcaaagtcaaaatcaaaatggtaactgagatatttattaacctaaagtagataaaaaatgactgaaatacccttcaacccattaatgataacccaagcccattaacaccaatcaaaaaccaagaaaaaatcatcactaaaagaacaacatatgaacacacggtaaaaaaacagtggaattaaatttgtattacctatagtgaaaattaacacaaagtgatcaacttgaaaacattgaaagatacaaactgcatcagatacgagacactaatgctcagcttaatccaaataaagacacagacaccaaacataacaaatttcatatcagcaagagaaattagtcaactgtggttggactaatatgatgtcaagatcacatataaactcagaacaagaattcaactagagatgcaaatagtaatgtcgacataagtgtgtgatgtgtcctcatgtgagccatcaaaaaattaatctagacagctcactcatcatttgcctaattaaatgatattgtatgttaatgtgcttggtacgagagtgttgaactagattttttgaaatgttaatagcacttgtgcaatcacaaaaaaaaaaagaactaaagaatcttgtcgaaaaccataatcagttaccattttctttagcaaaatgagttgagtacaataaatcccaactacaatagactcaacttcggttgtggaaagttagatgaatatttgtttcttactcaaccacgagacaagattattcctaagataaaaacaccctccaatggtacttttatggtgatccaaacttctagcccaatcagattcactaaaaccaacaatcgacatgtttgtatctctcgactatcataagacaaacttagaagtactagacatgtacttgaataaatgtttacatcagaaaaatgggattgtttgggattggcttggaaccgaccacataatctgatactaaaaaaaatatcagggcgactgacgttaggtaaagaagattccctatcatgtctctataagagattggatcaacagactcaccagactcatgtttactcaacttagttgtgctgcttattaggagcatgtttagtgtgatataagccaaacttcttaagcatctttttgatatatttggacttagaaatgaaaatgccctggtcaatttgtttgacttgcaatcctacaaagaaactaagatctcctataagactcatttcaaattcaaatgtcatgagatcaacaaatttggcagccttcttatcacatgtagacccaaaaataatatcattgacgtagatatgagcaatagaaattccttgttgcaaatgcttgataaatagagtattattagtagtgcctctcacaaaatcatgagaaatgaggaaagaattcaacttgtcatacagagcttatttgagaccatacaaggccttcttaagtttgttaatatgataaggatacttgggatcctcaaaaccttggggtttattcacatacatttcttattgaagaaagccattaagaaaagcactttacacatccattggtgcaacttaaacatcaagaaacaagccatgagaagtaataatcaggttaattcaatccgagaaattgatgcaaatgtttcctcaaaatccactccctcaactttattatatctccaagccacaagccgagccttgttccttatagcagttccaaactcatttgatttttcttgaaaattgactttgtcccaatgatattgactacatttggtttagtaaccaagatccaaactttgttcctctttaactaacccatctcatcttgcatagcattattctagaattcatcttgaagagcctcagtgacattttgaggttccactaaagagacataacatgcaaatgctatgacaattaggacctttcaacaagtcaccattaatgcagtagtatccccaatcactattgtaggtgcatgagctttatgtatctaggatggagggcgtttcttatacagtcgagcatgataactatcaggatgcctactggacacttgatagtccgaagaaatctcagaagtgtctgtagtaactagaacatctgtagaagcactagtagtattcttagatgacactggcacatcttcaaatgaaagaggccttaatgatccagaaacttcttgaaagttagacattgaatgcatcattggtatttgtggactaagaggatcttcatagcattagcagagtctaagacttctagatcatcaaatttcacattcattaactccatcgccgtggaagttcttttataatacactcagcatgaacgactatttgtcgaaaatccgagaaaaactccttcatcacttgtaatgtcgaattttctaagatgatctcgatcaatcaaagtatagcaaacacaacaaaaattgtgcaaatgactcaaattatgagtctttcctttccacaactcatatgcactttaagtagtgcccgtcctcaaatgaagacgattacaaatgtaacatgttgtattaactacctcagccaaaaaatttacaacaacatccttagcacaaagcataactcttgccatctcctgaggagtcctgctttttcgttccataaccccattgttttgagggattttaagagctaaaaaatcatgactaatccccattttatcacaaaaccaagcaaaaattacattttcaaattcgttcccgtgatcacttccgaaacgatatactttggcaatttaacatctttctcagtttgtaatttcaactaagaaggcagcaaaagtatccaacttttctttgagaaagttcaccttagtgaatcttgagaagttatcaacacataccatgacatattattttctagaaatactagctatttgcataaaacccattagatcaatatgcagtagttccagaaccctcaaagtaagaagggcattggtaggaggatgagaagattttatttgtttcccttgtttaaatggtacacataatcaatgtctttccaatttaagttcaagaactccacgaactgatttaagagtcacaatcctttttagatctctataatttaggtgaccgagtctataatgccataggttaggtttgtttaaaaaaactctatgacattttattttgttgcttaggacataataatgaccaacaactatgttacctgtaaggattgacttcccattagatgagaataaacactagaatttagtaaatctaacatcatagttagcataacatagttgattgatgctaatcaaatttgttttcagcccttttacagataaaactccagtcaaaggaaatgcatctaagagattcaaatctccttgccccatgattttccctttattcccataaccaaaaaacacaaatacttcttttaaatcatgaaagttatgcaaagattcacaagaaccagtcatatgtcacgagcaaccactataaaaataccaatagttctttttcatgaaagataatgaagtatgagcaataagagaatgattgaaacctttaggtttccatttcgtagttgtacatgttgtggagctagaggaaacttgctttgaggagtttgattattgatgatattagtcaaataggttttgagtttgtgatatctaggtttgatgtgacctattttcttaaaaaaatgacatgtaggaacaaatcgttctgtctatctaaaaccttatttctcaccattagattttcctctatccatatcgatgttagattcacctaagttcttatttgactcttgtttgttgatttctacagcaacagacataaactttatattgccactagaagatggagtagtattttcataaattgacaggtcttgaccctatttttacaacaatttatagctaattgaagttctatcacccaaaggtttctggctctaaagaacctgatttaatgcgatagtctccggaggtaggagggagagagagagagattgtttggcccgtacaagttttgcaattaacttgtatattttactatctttggagcataattttgaagtcatttgcttgagtttatcctcaagtacatatttactctcatcaagcaccttattcagatcctaaagctttttaactctcttagttatataagtccattgtgtgaacatctcttcataggctttattcttttctttaacaacaaattcagaattagaagaagtcacatcttaatcagatccttctatcatagtttcttgagccatgaaagctatcactgattattcttttttggcctcatcgctaacttcttcctcttcaccatcactccaagtaacaataagtgccttctttttctttagagtgtttgcacattctatttgaatatggttaaaaccagcacattcatgacattgaattactttgctcttttttcatattgttgaggatgcttgttgggattagagaaatttttgcttgtagaattctctttgttcccaaaattgtttttcttgaagttcttcttgtgaaatcaagcataatttttggtcagaagaacaagattttcatttgtaaaggattgaaataagtcaacctccttataatcttcttccctgtcaacaatcctttacaaatgaaaatccatatagcctctttgatggggccccccttaagttggtattaaagtcaacagttataactaagaacaactttcttcatattcatatgatgagtgaatagatggagcaactgactttaacagattaagtgagtttaatcccaactattctacctgattagactcacttaatcaataatccaaatgaaatgagtgaggccatcaaatgtcctcaatgctcaacaagtttagacagtaccgaaatatgtctctagttacacttttagttaaaatatctgcagggttatcatgtgtgcttattttcttcacttgcacttgcttggatggcacaatatttcttacgaagtgtaacttgatatcaatttgctttgacctctcataaacattggatttttcatgagatgcaaagcactttgat

SEQ ID NO: 186546 - DNA, 4443 bp, Cannabis indica
aattggtatgtagaacctatcattctggctcttccaaccacatcacaatctgagtgcacagcagagaggcttacacatggagcaaggtacaactccaaagacctctatgattatttaaccattgtctcatttttagtgatccataaatgaccctactttcaatatacagggtagagccatatttgctagtggaagcccatttgacccagttactatgaagggaagcgtttgttcctggccaggtttgtcaccctacttctgttccaatctccataattaaattttacaaggcaatcatggctaactcaccttttaattgtctcaacatccagtccaacaatgcttacatattccctggttttggtttgggtttgatcatctctggtgctattcgtgtacatgatgacatgcttttggcagcctgtaagattccactataatttgtattgtttgaatatttagcagtggagatctcttagaatttcagataaacctttactaatcatttcaatttctgtttttctgtgccgacagctgaggctttggctgctcaggtgagcgagaagaactatgagaagggactgatatacccaccatttaccaatatcagaaaaatatcagcaaatattgctgctaaagttgctgctaaggtttatgaccttggtaagtttcttgctcattgattaagatgaaatcagtatctcaaagtactgtccgttgaatgttaacaagggtccatttttcttgctatggttgtcttataggtctggcttctcaccttccccgtcctaaagatctcgttcagtatgcagaaagctgtatgtacagccctctctaccgaaagtatcgctgaagttgcaggacactgattttcccttgaacagctagtgctttcatttatagttcaattttttgctggcattgccatatcagctggcaccatttttattttgctgtattagttttgataagttccataagtaatgaataaaataatcaatgaatttcaatattgatatatttgagatctatgagaaagcctacataaactgcacttctcaagccccttcgaagaatattcactagataaacaaatgaaaaagaattacatgttaaagtgttatttatctgaagttctaacgtcaaaggattagcatggctaaaattctatcccaagtacgtccgcttgatgattactgtttaaaactctattgtatatgagcacaatttcaatgttgaatgctaattgctaaacaagggtgtattcacaaaagtagatatacattcagatatcattcacaaaatggattatcgcatattatcagaaacttgggaacttcgaataccccaaaacagcctaggcttcaaattcttgtttgtcgctgtaaagagccaccccatctgggtttcacaagaagcacagtttgttattgtccatgcatacctgcaagaaaatggaaaaaaccaaaagtagatcacatcagcaactacaaatttctaattcataaactaaggccagaagaaatggagaatcatttttctagtcacaccatatatgatacatcaagtaggggtgcgcataaatcaattcaatctaaatgacaatcgatcgatccaacccaaacgacaatcgatcgatctagtcacaaccaaccaccaaacattagatatccaattataatcagatcagattagatgttatttttgaatatccaaatggattgaatcagacgttggataaagtgtccaaaaattcaatacatccaacatccaatcaaactaattaatattttcatttactttagatgagtaattagattttttatgttatacataataaaaaaaatatatttatatataaaaattaacattaaaattttatcttgaatctaattcaatccaataaaatactggatcaaaaatattgaatggacccaatctgatccaaaaatattaggctaaaatattgaataaacctaattaaatcaataaatatgcatggaatacctccaatggatagaaccgatccaatcatggattgattggatgactgaaattaatttgatcagatcagatagtaaaatctaatatccaatatataattggatcgaatctgaataggtttaaaaacattgggtgtggtctaatgaacactattaagcagcaaaaggcatttcaaccaataaaatgagtcaatacatacagtaatacttcaaagtaaaattcaagagacttcccagtttccttgtaagatagaattacatacccaggaaaccaactgtattctctcactgccggtcccataagtgccaagtcatttgctctgtagagagtaatgacctcatgcacaaaaccatgtggatttacataagcaccaagaggaccatcactagacatcaccagcatatcacttcgccttgcaattacagtctgcataacattcaaaagacgtaatcataaccgggcatgcagaaattgcacatctgtcatagtgtgtctaagcatgcgcatgcatcatgcatgtattatgcaccattcacgcagtcagaatttagggtatattacctgacagtttctacatctaatgagattaacactctcaagtagctcaatttcccggcgcagcctatatgatatgccatcaatctccaaaagctcttgccttgtagattcagacactggaattttactcccaatgtaaaatgacaaaagatcaggcttcttcacgaggccttccagacttggtgctccaactatttgtttccacatatctgcattatacaaagtttacaaataaatatcattcagagatgaaaagttataatgcatccagcccaatatatgttctgatactaagatcccccacccaccaccacaaaaggtatcactgaaaatatgcatgttttgaaaccaagtgccccacctaaccccacaatatttagggaacagaaaactataataattcctgtgcagttacctgggagagactcggatttcatatcagatcttgtgtatgcaaacgagcattggaactattcctcttgggttaattttaaataaacaactaactttccatttgaatccataaaactcatacacagacaacattcaataagcttaagctacgtggaagtgtcatctaaataactgaattttatccatttaaagtcaacgagattttaagatctaatctttccttgtatctttatctttctgtcaaattcagattatttttttcataaattgtatataaagtatgaatggtataataagtcaaaatattaaagatacatgactaacaaggatcacaaaattaaactcagacaaaaccaacaaaaatatgagtaaaagtaaagtacctgaagccttttgagcaagacaataagaatcatacatgcgataaacccaaaatggccagaatgttcttggaactctccgcaactgattaacgttgctatttctcaaacaactaatgtgttgttcctgtctctgtgaatgtgttcttaacatggaaatttttcccaagccagaatctccattctcaggttctgaatgtaatgactcactagaatcagagttgtgatcagctctttgaagttgaaggtctgacttgtcatcatcgctactggatgattcatccattgagtcatatatagaagaagaaataattgcagactggtggattctcctttctgtcagtgacagggaactttcaaagctttcatcagaattctcctctgaaccctcaccatccatagatctgtccagcttaacatgagaagcatttaatggcagtcgatctcccaaagcatcccgtggggtcctcaatggtaagtcttcctcaatgatttggatttcaccacaaggctaaacaatgggtacttttacatcacatcagacaattgtcaaatgaaagagcaaaaagaagagacaataaataataaattaataattctaaccactccttctgaatctatgaaacggcgtctcaaacggaatctgcgctgcccacgagtgacaacattcaatgaaccatcctctaatctccggtactgtcgaatctgcaaaagtgaatcataggttgattaagagataactggcagaaccaagcgacaattagagtgcaacatgtccaaatcctttagttatttcaacttccatttccaacagcctaaagaaacatgaacatgcatattttacatacgatgcaccaacacaaatatcaaagtaaagcaatatccatgttgtccctagacagtgagaattagccaagaaaaaacacatcatgaattatgacagctcaacaaatcaattttctcaagacttcacatagcatgataatgatcattaatgataatttactttttgtactaatttggttcttaaaatgttattgagcattgaagaacaatagcgcatattgtagcaattagcatttgtttt

SEQ ID NO: 186547 - DNA, 4112 bp, Cannabis indica
ttttttcttaatacttttttttttctgtttactcatgaattttgcatataaaatagggtaatactaacataatatccctttgaaaagtaagaaaagggcaaaaaaatctaaaaaagggaaagtacagttagcataaagaaaagaaaaagaaaagttatttaacggcgtcaattataacggcgaaagtaaagaataggttagggccaaagctgaatcaaaatcccaaatccctaaaaatccattatcgtcttcatcatctgaaatctgtaactctgagaagtctcatctacttattattattattattatttatttaattttcccactccaacttttctttccttcataaattttccctcgatccaaacattctccttaaatcatccataaccattctccccattcttcctccacacagacagttactatccctctctttctgtctctcttcttccgtttttcaccattccagaccctccgcttacccccgtgcacaccagagtcgtgaaacccacatgcacatttgccgcctgggcgtcgagattcgtcgctacgggctcaatgttctccaccccattcgttctctccttctctctcttgctctctcttccaatcctcttcctcctcgcccctagattcctttctccgcttcagcaacaaccccagagccctgtcttgatatctccctcagacgagcaagatgaccttgctctcttcaatcgggcttcgggttctgccattaacagcatcaataacaataacccttccagattttctcacctctccacaggctctaatccaaagcgcaagatcgcttttcttttccttaccaactccgacctccatttttctcctctttgggatcaattcttcaaaggaaattctcatctttacaatatctatgtccacgccgatccaaccgtcaacgtaacgcgtccccatggagttttcgagggtcggttcattcccgccaagcggacataccgcgcctctgccacacttatatccgccacgcgccgtttacttgccaccgccatcatcgatgatccggccaatgtctttttcgctgtgttgtcccagtactgcgtgcctctccactcgttcagatacgtttaccactccctagtggtctccaggtcgttcgattcgtcgtcggctgagaccgacgctgagttgactcggctaggcgtacgtgccaagtacaagagcttcattgagattctctcaaagtcacgaaatctctggaagcgttacacggctagaggaaggtttgcgatgatgccggaagtgccctacgaccaattccgtgtcggatctcaattcttcgttctgactcgtcggcacgctctggctgtggtcaaggatcggactctgtggaggaagtttcgatcgccgtgctataaggaagatgaatgttacccagaagaacactattttccgactcttttgtcaatgacggatccgaatggctgtactcaatacacattgactcgagtcaattggaccggtacgaccaagggccacccttacacctacggggcggctgaggtgtcgccggagcttattcatcgtcttcgagaatctaatcactctgaatcttacttgtttgctcgtaaattctcgccggattgcttgaaacccttgatggatatagccaagaaagccattttccgggattgaatttttttcccggctaactggtaagtgaaaatctttacactttctgcattttcttttttgatttggatttctgcttgtatgtttcaagctgaaaaagttgtaaaatgggaattgtttttatcagaaactgtgattgtttgatctttaacaattcatggttgaaattggtttagtttaagttgagagatcttattaattaagaggcacaggaatctgtcaataaatttgatgattctttcagagttctttgtagtattacaaatgagaattcttagtttaaaagaaagatacatgtgtttggccataactagatgatttttgctgaaagaatttaaatttagtatgcaatatggtgccagaatcttaccaaggtctcattttgaagtaactaagggcacccttttctgataagggattatgttattgttggttaaacttttttaagccaagaaaaatataaataccatttctttttcttgtccaattttcttgtaaatttgagtataatatgtttcattgagtatatagtttttaaaaatatctgaattatttgttgattgggaagcattgttgctattaggcagaaatgtgaaatgtgcttttctgtttattctgcctgcaaattgatagccgtagcctactgaaaattctagtgtctatgcaatgttaggtggaggagctacatgctttaccccattattctacaacagccctttttgttttgtcactcaaagaattccccttatcttttccatctcgaatcacaattttattttaaattagctttatcttcatgttttcatgttactgcctaggttccaagggaatgctaacattgtggtttcaaatttgttttaatcattaatccttattgtagctctatcaactcatagaatgaattatgttttttcgtttattccttcaggtaaagaagtcaattgtgcatatttatattggttcttttctctgcggagcaagtggagctgaaagaaaattggatcttcaaactgggaatctagtttggaagaggcataaagaggtgcccacaaccaggtaacccagaagtttcaactgagagttagataagattttatgaaataaccaaatggtgggattaaaagaacagtgataataggggggaagtagaaaaggcaagaattaagaagaggcagccgaagcaaccaagtgagttaccttttacttttgttaaagttgtattcttttcttgttttccttagattagatatccggatggtgtagcacaagtaggtttattttttagacttttgttaaagggtgttttgtacatatataagggtggagtttggttgcattccctttacttcacaagacagcaaaaccaaaaaaaaaaaaggaaaaagaacatttaaaagcaatgtaagtgaacattgttggccttgaagtttgaacagggttaatgaagaaaccaagttgaagctcattctttcatatatattattttcttgtctttcattttcccacttaaaatcttcatattgctattaccttcaccaaccccataaccaaaaaaaaaagttaccgggaaaatctgccaagaaagtggatgtaaaagagtcatgagctggtagccgacaatttaaagaggtattattattccatataaatcaatggctgcagtaggcttacccaccaaggcttgtttttttttttttagttgtggtggcccatctatatatgtaaggttgcatgtcatgttcactaaaatgtcgataatatttattatataaatacaaaaatatgtcttggatttgccctagatgttagcacgtttgtcgttgttaaaattctttcttcttctttctttaagagtaaatgaaaatatgaattatttctctgtacagtgtcacggacgagtgttctttctttcattccaccgcatatttattgagttatttttctgtttctcaccataattacattttctatctcactttagtactgttgtgcttattaacaaagaacacgtttatagtgctatggggacacgtgtgtgtgtgtaagtgtattagtgttattatttatagtgtctgttgtgaacaactggctgttaaaggaagatgattgagcaaaatgtcactatttggatctgaacacatggagggttgtgttgtgttgtgttgtgccaacccaaccacagcataacacaacacagaatggtgtactgtatttgacttgtgaatttaataacactgtttgtatttttgtcaaaaagaatctaacagccagctgaccttaacccaacatgggacactgtgcttattacttattattagaagaaatgtgagagttttgttttctatatgtacatttatagcagaagaataaaatacaaaacctaaagtttggctttgaatgaacagttatttatttactatcaatcaatatcaata

SEQ ID NO: 186548 - DNA, 2300 bp, Cannabis indica
aataaaattatttataaatattatatgcgaaaaagagtctttttaaatatttaaattaaattaattatttaatttttttaattatgattaatttaactaaaaaaaaaatttgacctatttataacctgcccgcgatatagattatattaaagggtaaattccacgattccaccttttgtcaatagatgttttcatgaattgaccaaacttttttgttgtgagataatactcttcgtgattcataagccccgtgacctggaaatttgtttccattacaaattgataaataaaaaattatcatcattgctttcattagaagcagagaattaagagaatctataaaccctttttgacccatcatcataaaggatattatataaaactcaaccactaattaatatattacagtttcatattattaattagacgtagctgaccaaaacacccctttatgtatctcatttccactgtttcatccggttataaataaaagctctgagttttcatcctttgtagtagtactaaagaaaacattaattaatgaaaactgcaatgtactttgttaataaatatttaattaatggaaattgatgtttctatggcatatgtactgaaatgaaatcttttagatacaatatattacataagctcctaaagattttgatatgctacaaccaatttagtcatgcagccagaaacatatatgtatatatatacaaataatttccaataattgtcacattttatttattatatatatatgtagactctgcaaattagtagtgggtattgcttttggaaacttttgtaatacctttgatggaagtgttatgaaaagggtgtgaaatttaaggtgttatgcttttagtccgtcttcaaaagcaattggatcttctacccttatgtatagtcttttagaatggtaaagtggcactaattaagttgctttgaaactacattttgccattaccatttctccacttttaagttaaaagattgctgaaaatagctagctagtactctttagaaattaatcggttcacagtttcaagaaacattgacctaaaaacatcaaatcatgttattctttccttaattcaatagtaacaaaatggtaatgacaaataaaagggtataattggaaactagtcatgggggtaggcacaaacaataagattctttcaaaaacaaacatccgacaaaaacaatgtagatgcgagatgtgaagtggatccaatccaaacttcatcttttttttttctttttaaatgtgaagaaagaaaatataataataacacaaatatcatagtccattcaaatagttagatatcgtggtgggaataaacaactcaaagaaaatgggatttggtggaaaagggtagaaatgaaatagattccttcattctctggaataggaaatatggaatcaaacggctgtaaatatttgtagacatattaattgataatttaaaatactattgattgaaaaagagcatccttttctgtttgtcctttttttttttttttgctaacatttttaccaactgaattctcaagcaacgttgaagttaacttatttaagggctcttctcaaaatttccaagattccttatctctaacctaattagctagctaccattactcaaacttcaaggggtcccacgactgcttttgagtctatctccatcttcaactttaaatacaagcttttatttcaatatttgtcccaattatagcttgttgtatctttcttataaattttttaatagtttatgatattgaaacaagtttaattttcttttttcagtgatggaggcacattaagtatgaagaggtgtagccctcccccaaaacacaactctctatgtattaaatatgtaaatcaattatatataaatattatcaattttccctccaaattaattgttccacactgcctcatgttttatactatgttaataggaagcagagagaggtggagagagaaagtagaagggagaggcagactgtattgtttgataggagggagaaaggggaattttgagagaccttctcccaaaaatctaatctttccatctttaaaaaatttaagaaaaatacaaattaaatacacccaaatactaaaattatcctttaaaaaattaataaatatttacactaaaaagaatatgtagtgattggtcactaatagaggaaataagacatctttagctcaacccctataactaccaacggttttacttaactgtcagttatgacagttaggatcaggttctaacatcaaggctataaatagccaa

SEQ ID NO: 186549 - DNA, 3771 bp, Cannabis indica
atttctcagccatagcatctaattgggtcagtgcaaccttctgggcagattgttttgagccttgaccacctcctttctcaagatattgctgattggactcctctcgctctgtaaaatttctttgctggcagaatttctgtcactatcttcttatccttcaactccaactgtttagcttcttttgattcttgggccaaacgagcttgagattcattgtagtagtatattccagatcgatactggtccccaacactcaccaccctatcacacattaacattacttttcaatctacaaaatgcttaaaatataagaattattttgtttgcagaagccaaatggagatttaagatgggataatcataaaatggacatgtaagaaaaattacaaggaaacgatttagagatgaataaaacattaatcataaatcattttcttctttatttaacaaataattgacacacttgttcactaaaacatgtaaatacatatacacaatacatagaaaataaggacgaaaaaaaaaaaaaagtcaatcatttcaccaggccatattcactcaaattttccactttagaatacagattctgactaagaaaattatagcaacagtgaaattttcgaaattgggagcaattaaataaactaataaaaaattaaaaaaaaaaaatccttcaaaaataaccatgaaaatacctgtcgattgagggttgtgggatcatggcgaccccaaaagactgaaagcaaatgggtataggagcatactttcgggtcgaattggatccgaacaacttcaacgtgattagttgttccagaacaaaccagcttgtaagtcgggtccggagtatgaccctgagaatatccaacttccgttttaaccactccattcactcgctgaaacgccagctccactccccagaagcatccagctccgaactcagcgaactcgtgactcggatcgttcggagtgtccgaatccggagccagagccggattattgacctcagtagtcgccattattatgtttgtttttcgggattattaaggagtaaaataaaataagagaagaactgaatttatggaggattaggattgaatgaatgtagattttataatgggtaagattcagatcaacgaattaagtcctctttagtgtcgctgtcaatttgcagaggtgaaagggtgtgagattattatggttatggctatggcggtcggacctcaacttgagtctgtgtgcgtcgctgtttttggcatttaacgataaaaacaacaattaattgggttgaaatattcaaacaaacgactgtgtcaatgagaacgatctcgatcacgacgaataaaacgacatcttagaataacaaacaatgatagggacaattgataaaacgacagatttgaaaaaacgatgaaaacacgtttggacgacaattcgataaggcacaaaagtgtacagtaattggcggcaaaatcacaaccacaaccatgggaaggttcgctgaaggaataaaatgccaactaataatacctaagcaaaatcacaaccacaaaaaaagaaaataaaaatactcttctaccatactttccttctactttttttctgcctgatctttacttctctctggaaaaaaaattctgagatggctcttgaagtgattggtggagcttttctctctgctttgttccagacgatgtttgagaagatggcttctccggagatggtcagctttttccggagaagtaagctggaccatgggctgctcaaagaactcaaacttctgctgctgtctgctaattcagtgatggatgatgctgaggagaaacaactgaggaactctcttgtgaggaagtggcttcatgaactcaaggaagctacttatgatgctgaggacttgttggacgccattgctaccaaagctttggaaagagagataaaaagcagtgtatcttcaagcaggagaatcaaggtaaagaaacttgtctcatctttgttccctactgcttctgcttttgataatgtaatagagccaaagataaaagagattcttaaaaggttgaagtttattcttgaacaaaaggatgtgttaggtttaaaacagggctttcaaaatagagtttcacaaagattaccagcaacttctttggtagatgaatcatgtgtctatggtaggaattatgacaaagagagaattggtcacttgcttttttccaatgatgatcatattggagacaagatatctgtaattcccatagttggtatgggtggaattggcaaaactacacttgccggtatactttataatgatgagagagtgacaaagtttgatgttaaagcatgggttactgtctcagatgatttcgacatcactagaataacaaaaactattctcagtcatgtggttcaactcaaaccatgtgatgagacaagcgacttaaatcaacttcaggtgaaattgaaggaggttttaaaggagaagacatttttctttgttctagatgatgtttggaacaataattatggcctttggagtgtcttaatgtgtgcttttgaatctggagcacaaggaagtaagataattgtgactactcgcagtgatgaaattgcatcaatggtgactactgctcaacctcttaaacttgagatattatctgatgaagattgttggcaactattcgagaagcatgcctttgttcgtgtgtctgaggatgcatatcaaaagtttgaattgattggtagaaagattgttaaaagatgtcaaggtctcccgttggctgtgaaatgtcttgctggtctattgcgctctgaatcaaatttggagaagtgggagaagatattgaatagtaacatttgggagttgcccaatgagaaaaacaatattcttccagctttatggttaagttactaccatctaccacctcacctaaagcgatgttttgcctattgctcattatttcctaaagatttccaatttaagaaggaaagtttaattttgttgtggatagctgaggatcttttgccgcaccaaaagtataaaaatctcaaacaagttggtgaagaatactttgacgatctaacatcaaggtcgttatttcaaacctcaatggtatattttggtaagccaatgcactgctttcacatgcatgatcttgtgaacgatctagccaactttatatcgggagagtattgtcttgtactggataatacttgctctagctcagttgctacaaacaagagtatccgtcacttatcatatgatgagaaaagtgtctatgacttaaatatcttggaagctctatgtcaagcaaaatcactacgcaccattttaggattgtcaagtgtggaccaaaaatattatccattcagtgggttaaataaattaccatatgagttattccaaacaacatcatttccaacaacactaagagttttgtctctgtggagatatgcttatgaagagttgcctgattcagtaggcaatttaaaacaactaaaatatttggatctatcctggagtcgtttgaaaagacttcctaacacattgtgtggtttgctcaatttgcagatactactattgtttttttgtagtaatctaagattgttaccaaaaaatatgggaggtctgatcaacttgcaacatcttaatattagacgaacaccattgaaggatatgccacaagacctgtgtaaactgaaaaatttgcaaagcttatctgattttgtcattggtgagcagagtgggtctaagatcaactgttgaggtttgaacactta

SEQ ID NO: 186550 - DNA, 5110 bp, Cannabis indica
atgccttctgaattattgagattgttggatttaaaaacttttatctaattttagtaaaaaaaaaatataatatggatgaaagtttaggggacatgatttagtatatatcaaagttcgagtggtataatttgatagatataaaagtctgggtagcatggtttagtacataaacaatcactgaaatagtaaaattgaatgaaattaaataaaagtccttaaatctaacaatctcaatagttcaagggaatttctgacgctcagaaaaattcaaagggcatgatttaatacatgttaaagtttaggggtaaaaattctaattaattttttttttttgtaaaagtaatatatttgatatttttattattttttttaaaaataattattttactaaagttgatccttctccaaaacaataataaatttactaaagttgctcccacattgtttgtagaacatctctcatcttttcttttagtttattttatagaattttacattatgtgttaagatattacctaaaagttttatttattttaaataattttggttattaaaatggagaattggagagcaagtgaatatttaagattcccaactattttgcggtaaagaaaaataaaatttttgagcaaatattatttctattgaagataagattctgattttgagtcatattactagaatttctcatcctacaaatgcgttaggaatttacccattaacaaaataatcaaaattattcctaactaaaattaagatcataatatagataattaaatatatcaaatctataaaaaccacctacttgtttaaattatttgattaattagacagtttaaacaaatccatattatttccaacccatgcatgaattgttcaaaaagtaacattaaattattgaattgtttaggtggccaccgatgttaactgttaaattatatattattttatagaggggtaaaacaataaaatagtaataaacaaaataataaaagattaaaaaagtcccttaccaaaaaaaaaaaaattaaaaagtcatagtcttatcttattcaaatcaataaaagattctttttaaaaataataataataataataataataatatatttttattttaataataaaataatttgaaacacaaatacttaaatttaatttttagttgtagatatatatttaattttaattttttacggtaataaaatttaaattatatttctaatattgttaagtgtcaaattacgtgacaatttctgattgatttaagtaattaaatgttttttttattacacaaataataatggtatttttttaataaataataataatatttaacatatttatttattaatattgtatattggtagtgtccaatattttttttataaatatcataattagcaatattttatacaattattttttaaaattatatttaatatttaatatttaattaaactaataagaagagtacaacaattttctttagaatttttgtggaacatattttttttttaaatgagaacaatatgttagactttgaattagtttgacctcatatatccgcgtcgtgaagccgaccatctacgtggcaaacaaccactccttatctgccacgtggtcccgcccaacatcttggaccctatataaaaggcagctccaaatatccaaacccatttctgttgcgcttttcggatccgattcagatactcacacaaccacccttctctctctctctctctcatcgaagaagacgatgccttattgcgaggttacgtcgcagaaaactgacccacacacgcagctcaacaatggagtcaagattttttacagaacctacggtcacggacccactaaggttctgctcattataggttcgattattcaaactcaattatcgattcttcgttgtaattattctcgtatctgaattaatttgtcgtctaatttttctgggttgttgatttaatcaatggtcaggattggcgggtactcatgaatcctggggacctcaaatcagaggattgacgggaaccgagacgcccaacgacgacgacgaatcgccggttggtgattgttcggacaatgaggctagtttcggcggtgatggaatcgaagtttgtgcttttgataatcgtggaatgggtcggagctctgtgccaactaaaaagtctgaatacacgtgagtttcaattcttccaaattttgattagttttattcaatttatgtttgggtatttgtgttcatcttttctcttagttttttttttattgtttttctaatgtactttataaaaattcaattttgattggtttgctgtaaattacaattagcttgctttatctgaaccctttagggaaatttttaactttttgaaatagaagagttggtttcctgctcactaaattgtcttttcttgagtgtggaaaaaacaagggaaatgactgttataacaattcaaacctacttgttagtttatggaattatgacctgtagctaaaagtaactgaagttggtggtccatgatttttctgttgcagaacaaaaattatggcaaaggatgccattgctttgttggatcatttgggttggacaaaggtccatgtttttggtcattcaatgggtgagtccacttttaacatttgtacttatgctaaattactctacagtttacacgttatatatgtgtatataatgtacgtatgcattacgtgtgtatacatatgttacattttgagtccaatctgctgtcttatttaaatttttgtttgattacaggagctatgatatctacaaaactagcagcaatggtgcctgaaagggttctttcattggctttgctaaatgttacaggtggaggatttgaatgttttccaaaggtatcaaaaaaataaaaccaactctgacagacagctgggattcttagaaaaccagttacatgatttaacaagtagacacgagtcacgacctaataagccaaaattcaatttttttgaggatttgcatggttgttcaagttatatgtcctttgaaatgtatctcttattggatttattttttcttttatttggagagagagattgtggattgttattgtttactagtggaagatagactctgcatagctaatacactatatttttacttatatgtttatgttgtacagaactttgctttttttaaacttgattttcattacctgtacacagattatttattctttccagttgagcttgttttgagtagattattaaatttaactgatcttctcgcagattgacaggcgatcgttatctattgcagtccgtttcttaagggcaaagactcctgagcagagggctgctgttgacttggatactcactactcaacggtaaatgtttctcttgaatctatgtcactgtttgttatagagaagagcagacaattcaaagtagcataaacaaggctcacctttacactaataacaatgtgcaggagtatcttgaggaatatgttggttctaccacaagaagagcaatattataccaagtaagaaaaacttttttatatctcttgcaatctgctgtaaagtttctatactgaaaagcagaatccaataaattcacctgaaatttcgtttaatatgataacatgtcttctgcaggaatatgtgaaaggtatatcggcaactgggatgcagtctaattatggttttgagggtcaagtcaatgcatgctggactcataaagtgacaagaacagagattgagttgattcggtctgctgggtttttagtttcagtcattcatggaaggtgcatgatcaaactctatagttataagtgcattattttcatcctatatccaatacttctcttgtgcaatgcagcaatggatgtcaaacactttctagtctataaaggctatatagttcgtggaacatgacattggaattcaaatacatttaaataatgatgttttggaagtttctaccaacgtctatgtatctatagatcatcatttccggatttcgtttgacatgctctttacaattactatgattgcactgagtattttggaaatgggatttctaaagggatgcatgaatgcccctatggccagtattctgttgtgtataacataaattacaaacaagtaaccttttgtttgtatcttggattttaggagcggaaaatatgagatcctttggattttattttctcatgtttggattcaaatacaaattttgagaatgcttgttctagaaaaaataaattttgatgtagtataattttgtaaaattttaggaaaatattatccgacaatttttctctacactttttgctaacgaaaattttccttagtaaaatataagatcccaacaaaagcctatgcccctacattaaattaaaaaaattcatgttcatataaagagttctcagattgaagattttcataatttactactttgctatattaaattcaaattttcatgtttttgttttggaaatgtaggcatgatgtcattgctcaaatatatcatgcaaggagactggctgagaaactgtatcctgtagctagaatggtagatcttcacggaggccatttggtgagccatgagaggaccgaagaggtaagcacttctctagatgttcgtttttcagtaactggtgaattgtcatcagaattcacactctgctctactcattgctaactgtgaagtgaaacctgaatacttttaatttcatttcaggttaatcaagctcttctagacttgatcaaagcttcaaaaatgcagatgaaaccgcacgagtggacaaatttgccccaaaagagacgcggtaagcatttccaattataacaattctttatacgagttcctttattatatcatgaactaattgacatcctctgattttctcggatcatgaatacccaccttaatgagcaatatttaaacggagctagtgcctagtgatctttgactttaacaatatttacaataagaccaacataagatcctaacttattccccttctcaagtcccctaccaatctttatatactatatttttgtctaaaaaaaattagatttttatctaggatggatggagaccagaagaagaagt

SEQ ID NO: 186551 - DNA, 4309 bp, Cannabis indica
agcaacaacaacaggaagtggaaacagaagttgtggtggaagaaagtccggtagaagaagcatctgctccatttgaaactgcggctaatgctgtacaagaaacccaatcggtggcagtggaagaacctgttggagaatctgttaagaaaacatatgcttcgattgtatgtacttagtacctgggccttaatgtttaaatttcactattttattgtttgagtatatatattaaattatttcgtttataaatgattgcaaattggtagttgctcgccaaagggcagtctgcaccttcaaatgcacctccagctgcacctctcgttgcaccttcagtcgcacctcaaacttcttttacgggaacccaagcttcttcagattggaaccatcagtatgttgagcaacaatcgtactctccatcgccagttgtgcctgattctggagtggaggcagcggatgaaggctatggctttgatgatgaaggttaaattcttttctctttgtcatcttatttttgtattaatgttgcatttctagggaattttccaagtatgatattttagcgtatgagaaaggattgagtttctacccaaatgtgtaaattcgattaagatctgtaaagacttcgacaaaatgctttgaaaacttgatctcttctatttggttgagatggctaatactgcaattagcttgttttttaaagttccgtattttgaactcgttaaaaccaggtgaaccgaaatctgtctacgtgagaaacttgtgtcctgatataactgaagaggagattgaggaagaatttaagtactttggccgcattaagcctgatggggtgttcatcaggagccgcaaggttgaaattcattctatactttttagacattttacctaatatccttcaagaaactaaaaatttaattgatttgtgcaggacattggactctgctatgctttcgtcgagtttgaagatattcttggcgttcacaatgcactcaaggtttgttcaaatgaatgtcccgttctttcagacagtattgttatgtgtttcacacaaattaaaatcttgtattgtttaggcatccccaattcaattaactggaaggcaagtttatatcgaggagcgtagacctaacagctatggcgccggtatttcccgaggtggagctattggaggaagtatgtggctatacttctttttcctcatcattttattatcatttcattttgtatggcaaaaatcctttattcgcttcatgttctgtaattggcgccactctaagatcccgataacatgtagtaacttgtgtaaaagagccgattattagttttcactataaacaaattaaacccttcaaactactcttttgttggtatcatatctaagatgtttccgtatcatcttgcatggttttcggtattaattttgcttttttcattggttgaccaggacggggaagaggcagaggtggttaccaaccagagtccactagagggcgttttggtggtagaaatttcggtaggggtggaaaccaggacagtgactacaacagaccgagaggcaatggtttccaatctcgaggttctcgataaaaaaccagaggggacgaaatcccttgttggtggttgatgatgaagcattctagggagcggccgattcccggatggaatattttcctccctgacggtttctaggaaaaaaatttattagaactttttgagtggtgttttacttgaatggtaacatttaatttttactctttagcgagtgttggtttgttttaacccttgaaatggtttttatcatgcaatttcaaggggggccttgtgttctgtttttaacatatacatatttaatgatttttgctcatcacattgtgatttttgtttactctgattttattatgctctgcattgcatatttctcaaaggctttcattaatataaaagtaatttgtatcataaattgataagttcaattctaaataaatactttaacattgaggaccaaggtgaagtgtaattttataattagttagtgattttttataatatttattaaaagagtattattattaggtgctaatcgtgtctaatacttcttagatgtgtcgtcttgcaattaactagtaatatttctataaagttatcttgatatttatttgaaccaatagcgatattgacacgtaagaggatgataaacactattgtaacgctttaatatttctcttattaaagtaaaacaagtgggattttatattaagttgcaccaaggtgttaacacgataagttatgtttttggaatttttggtactaaactgttttttttgacatatatgattttggtgttgtattgaagggggatttaaggtctttacatactaatggggactgtaattactgaatgttccagtcacacatattaatagaaattactcttagtaatacagtgacacattatacacaataatctccattaatttactcaagtcacatgtacggatttgttgtacctatatgcatttctttcttctaatcctttttgtctcttcatttggggttaacacacatttttaaggctatactataagaaagaagatcatcccttcttttctttctaagcagaagctatggttccttgacgaatattagcagtcatggcgcgaagctctcctgccatatcgtcgtcatcctcctcatcttcatcatcttctgtttcccaaaggaaatttgcatatgcagcttgaacatggctgagattcaaagacaaacaaagttccaaaaagtcaacacatttgaccaaatcataagaaatagaaacactcaaaagtcaaaaaatttatcttgtaagaaaaaatcacacaagtactttgtgtgtacctgtcttttggagaaacttgaatagctctttcaaagtaacttgcagctctttcttggtcatggtgtaattcccatactatttttgcatattgtgataacatatcaccttctttaggatctgctaagattgcccttgagtaatattcttcagctcctttaaggtctctctttgcctgtcaaagaaacaaagtacaattaaacaacttgtattcatgttttcgatattcagatagttttaaattaatagaatgttttgaacccttgatttttatatcgtaaacaagatatcttaaataactacaataagaaaactcgattataaaaatgagtttttacctcatatagaaactgagcataatttctaaggaacaaagggtttccaggattttcctcaaccaatttcttgtaatactcttcaaacccttgcttatcccattcattcccacctgaaccatatggattaaagtctccattaccaccaccattgccattaccaccaccgcggccaccgccgccaccaacctcaacaacccgcattttatgagacaccctcctctcattttcttgttcaaaactactcatactccaaatcttgtccatactaatcatatcatcctcattaaaattcatcatcatcatcacattctccaaaccaagaccattgcttttcatctccctttgatcaacatcttcttctaactcttctctttcatcatcatcatcatcatcttcatattcattcttaccattagaatttcgaaatgagaaagaaggtatggtttgaagcatcaagcacttgggcctccttggaaacattttggtaactggtaactcgtaacctaataatccctctaagttaccttcagattgagttctttccaagcaatttttcttaacttggctatcaattggtgaggaatttgaagaaactgaagagagatttagatacccattttgaagaaaaccaaatttgttgttgggactattgtgactattattattattataaatagtcataatattatttggactttcagcaaaagattggagaagggatccaagaactggtgttgatgaactcctaagcagcatagtttgaatcttatcttgttctgtaaaaacaaaaaatcaaattttgacaaacaatctcaaacattatcaaacaattaaagaaaagattcaatttttaaggtaaaaaacaaacatacccttttgagatttcctcaaaaaatcagccaaagaaaagattatccaaaccaaagaaaaacccttttcttaaagagatattatttgaaaggtgggaatagatatataattattgtaattatatttaaagaaaatatctttagagaaagtgggaatcaaggcaagaaaaaatatctcttccttcttggctggacccagaaaagcaagctcttttatttatttatttatt

SEQ ID NO: 186552 - DNA, 1919 bp, Cannabis indica
atatatatatatatattatgacattggagaagaagactaagcataagagtgtattagaacagagcattaaaagaaaagttttctgctattgaattttaactgatttgattaaaatgttacatgcctttatataggctaaagaggagaatggacaccttaactactttaactaacttaaccgtaattaactaactaaggtaactctactagaccctcttaaggtggagtgaagattttttattctcatcttggttacaatgttattaaactgagaaggaaagagtgattttgtgagtatatcaactaagttgttttgtgaggagacatggttcatcttgaggctacaattgttgattttttctcgaactatatggcaataaattttgacatgtttggtgcgctcttgtcgttggttcatttcaggcgtctaatcatcagtttcagatacttctccatccctcaaatggctcggttgagcgtgctttggaggaggtggattaacatcgtccatgacaacatcctggccagaaggaagaggtttctcgacagcagttttccttgtagccaccgttgttgtagatgttaggtagcttggattttttctacaactctcaatgaaagtagcaaaatagttaccgagattctcgaaaatgagattaagtaagagcttaagaaattaaatgagcggttaaataaaggagatagagatttttacgtgattcggacattaaaaatccttagtccacgagtcagtatattggcctttagaggctttgaatgtattataagtgaggttttacagctaagaaccctagttcttgctatagtattttcctttctaggtttttcttagtgaagaagaaatcttagagaggtttttctcagaagtgtcctttcctttttttattcttacatgaaggactaaaggggtttatataggcttagattcaggttcgggcatacccgtgactagctagggtttcagtattaaaatagggctattattggggtaatacataatacacgaccttaaggcccatgacaagatgctatcttttgggcagaggcgtccgtacaatggaaaacccatgtgatttggacaggtttcacgcatgggttcaactacagtagacaagaacgtcaaagggatgtcgttggacaaaaatgagcatttttctccttgcagtacacgcaccaccatatcttggcagaggggacaacatctgacttggcaggcccagctgtcagatagtagccacgtcatcatatgaaggcttttgggtgcaccttttgggcttctcctttcgaatacgcctccttaaccctctagagggtgttgttcactccatctcctagaaggttgaaagggcctccgagatcaggaggatctcatttctggaggcgaggcttctggaagtatgaagggctggggcctacctctggtttggactgggcctttgcatgctggaaggcttaagtcgctcatgatgtggatcggttacacccttaacacgctgcgtgtcactcatctgaaaacttggataacaaaggtgaatccatgttggatgtatccatgccctaattttgtcatctttctctgtttgctctccttcattcttttgcatcattatcttttgagaaaacgcatgtgatttgactcttccattatttgtaattttctttcttgagcctcaatagattgcttattaaattcagacatcaaatcacataaacgagcacttgccatttcaaatgccttgttcttctttcgtgattcctatccttcgaagatttttttcccaagagatcttttgatacttgggtcattgatatcatttctatattgtcgctggtaggagtcttgagaattaggagtatctggagtttgagaattcattacagtggataaattattattt

SEQ ID NO: 186553 - DNA, 4680 bp, Cannabis indica
aaggaggtccaacattaattcacgaacattattcatagatttcccctagaaaaagagaaagcaatagtcaaatggtaatttcattagagaattcaaaaatataatcgataatagtatacaaatagtatcacctgttcttataaaccagcaaattcatgtacacctattaatttctctacatttaaaagaaaaaaaaaaacttacattaattaggctatgcaactttactgaattgcactgcaccattttgttttttttttcttttttgtcgttaatggaaaataataattccaagtaaacattttcattttcagatcaaagtaggcaatatggatgtaaaaagtgggaacaagagaagaaaaatgacaatagcaccaagagcaacagccatgcacgtccattttctggagctcttctggtactccctagcctcttggagattatcagtcccacgcctaacgaacgagctagcatgcgccacgtggctctctatatcattcaactggtgaccctgagattccaccagagccgccatgtccaagaaaatttgatgaagctcaatcaaattcttctcaatctctttaacagcgtcgtgtcgttcttgaatctctgaaatcgtgtccaaaatctgacccctgccctgttcctgaatcgccttctgtaaaaaactctcactctctccactcgatataagattctctatagtctcctcactcgctttctcccctgttatggtgaagtaccttcgttccactgtctctttatactcacactgcattcgattcctcaacccttgaaaatcgtccatcatagtcttcagcttcttccccaacccgctcaccaccgaggttcgggtacggtcagccgatgacccgggtccggacccgggaagatttcgattggctgcgtttgaacgttctaaagcttcgagctttccctttatgagtttgactcttttcagtacctgttccacgtctgtgtccattcttgaccgaagctccttcatggttttggcgttgtggacgattttaccctcctcgtttgcatcctgtagtttcttgtaaagcttctcaactgatttcatgtcttccttgacattttccacatcttcgaagaatttgtcgagattggcactctctttcccagcttccaagtcatctaggtacgactgttgtttcaggtccgtatatcttttgaatgagtttgagaataaatcgttcattttgatttatctgaaatgaatatgatcttcttcttcttcttatgcgaaatgggtttcttctgtaacgtgaaattaaacacacaacacagctatatagatagcagtgattttgtcgcagtactaggaatgttattaaaaactattgtaataaattttatgttggtaagtaataataatgaagagaaaaagaaagagaaagataaaacagtgatccagaaatggacatgggatgaagtttccttagtttttatttggtggagattggattaagagggtattagatagaggggttggtggtgttatgttaggattatattaggaccagccaaattatcccgttttgaagggtacgtacgtacgtacgtatatgtatgcctatgctttttaatcctcaattaactctttctatttttttgcatagtcaggaactgtctcgttgacttggtcattttcttttcttttctccaagtctcaaccacaaagctgtagcataatataacttcggttgggttggggatcatttagtcgtgagttatcctcaagtttacaaataaggttaactttttaaaaagtcttgcatttttttctttaaatgaaatggtgtcttccatttaaaattagattaatgtcatatatataaatatatgatataattctcttgtcgaattattttctgacagattataagtacctctttcataattttttttattatactataaggaaaacatgatttgattttgattcatatcaatttttggctgattttgtttaatgtagcttgtttttctattattattaatatttttttggcttcctcttttaagtgaaattcatgataagtgattttctctcttttttttttttctcttccagaaatgaatttgtaagcagttttcaattttgacatctttgtaaatcgcataactgtaatataaatttatgtacaaaaatatcgagtaaacaaataagctaccccgaatgtaaaatcactactttcattgagccgaaaaaacaggcatttggtgcgtcctctatcacagaaatgaaggcttcaagtctagctccaaaaaaaacaaaagaaactgcaatagcttcaacttgcaaagcacttcagttctgttgtagtaatcatcgtctccctactactacttacttcaatacaacttgggcctacaaatactataaatgtagagagaaaaatatcagagcacacaattcgtttctccataagccctcttccacctctcctttttatgtacagacctctgaatgagagatactactgtggatgaatgcagaacccaagttgttcaataaagttaccactagttgctgatcaatgcaacatagtatatagtatacaagaaacaagaaaccgccggttcatccagctggggttgatgatactgcagctttcatggacaatgctgcagaactatcttcatctgcattgtgatgattgctactaaggtttatgccgttggtgtgttgctctccaattgtctcacctccatcgcactgcatcacattaccagatggattttcaccgaaaacagagcttgaaccagggggtagtttaagatatctatgctctttaatatatttctcagtagcatcatggagcaacttcatcatgctgccagaatctgaacttggggatagttcttcttcccgctccggctggatattcaggtctatttgacctttaaatggtgaggtagacaatttcaccttactaggatcgtcatctgatatttcaaggacatcaacattctgtttaggactatttcctgcattactattactggtcactgtgtcatcctgcaacttatacggcaagagtagctgctgctttttgcgtgtagtttctgcttctttctctgattgcttcttctcacggcgcatcatcagagtacggaagcgccgtttcacggttaagcaaacgttacaggtacatgacggtttgtgcttggggcctttcccacttgggggctggatgcacacaatgcatgagcaaccaggtctatgtcgggggtgttttgtggtcgcctgagctgatgctggaagggagtcaccttctcccaaaatagctagattagcaagggtgtcaagaccctcaagagcttccacattctccacatcctgtttagcggccttcattttcttagaagcagctattcaatcaccgtaggacaccacaattttagttttagcacaaaaatgcatattgcaatattcagaacaaaacttttaaatgaaaatagcatgaggtaccccacagcttaaacaagtaaaactctacattaatcatacaggatggggaactgaaaacagctaacaaatactgtctccggtaatctctacctgaaacagtggatggcagtagatcttcgagttcttctgatgttaattcttgagctgcagaacaggaagctctgcaagcaattgttttaacagattagcaagaataccataaacagtaagtttgaaaacataacaagttcgaagtttccccaaaataaatgccgtaaaagcagcaaacaataaactcttaatagctcatttgaaattgtatctttgttcttaagagagtttttgcgtccctagttgttgggggaaggtttcattgagaaacttcaccactttaaactgcagacttgtgctttaagagaaaaagatgcatatatattacgcctgatgatattgaagtgagataagcttaaggagaagaggcacataagcatcacgctcgataatttaaggagtgagatgtagagtttatgcgccaaaaacataagattaacataaatgcaggattggcttatacctttgtgggtcccatgaattatcagaacaagtccatttagggggaacaggggcatcagcaggcaatttgcgcaatttgaaacagtcttcgcattgagcccattgaaccttttcactgatacagatagatgaaaaaacatttaagcttgtgttaacccatagccacaaaaaaagcaccagtctgaagcatgaaatgataaagaagcatgaattgacaaataagaactagcataagaaaatatatacaaatatatttatatatcagaactcaaaaccaagtaatttacccattattagttgaaaaaattgttggtttcccaagtaccggggcatcctgtaatgacaataaccagaattagtaagaggactctacatgctagatcacgagtttaatatttgagaacacacacaatattaataccgcaggaatttctcatcttttaaaaatgtaagtttggagtttaacactgtaaagtaagtttaaagggcgggatgctggatctatatgaagccacccttgtatgcttgcttcgccaaaaaatgaatgatagccgatggtaatacaataatgagcataataaaacttggctgtccatataatgctttccatacttctaggaaataatcaa

SEQ ID NO: 186554 - DNA, 957 bp, Cannabis indica
atgattgggaggtttcaagcgatgaagctaaacctcctacaccatccgtgcaacaccattattatccgagctgcattggtgggagcatatacaaacaattcatttgggaatacagtagaggattaaggcattacttgcctttcgattggacatacatagtcaatgtaggtgtcccaaacaccttgccagaggctgacccagagccttttaggagacttgctgatgaggcagagatagccgttacagtttctgatcatccttcatccaaacatccacccaacttaagaaatgtggcttggacaaagcaaacttatcgtaggattagcctagatgactctgagtttgtgcagttaatgacgatggtgcaaggacacacaataatagctctgacagaaaagacgttcttctggctagcgatattgaagtgcaagaggtccaagatcaagacaagtatgataggtttgttgtcatgcctttccatggctatgcaaggtataccgaggatgggtagcctatcactgctcagggcgatgtactggaggaggatcgccactacacagacaaggaaattgaggaggcccaaccctcatactattaggaaaagcatgctctgatgtggatttccccccctctgagctgaccaagaagaggttgaggaatttagataagaagagactgcttagaaatatggcagtcttccttcccgttgacagacaattggaaaatgaccccagagagggcttgtgcacgtggtccggcctgcatgctcaacagggttcccttcagccactttatccataatttgtgaagtaataactattacaaaatctgcccaacgcagttcttgttgaaggggattaagtacatggttgcgatgtacatcttgtatgcataacaaggatggggggagccttcgccccatgatataaaatggttctttgatctgaagtccaatcc

SEQ ID NO: 186555 - DNA, 3071 bp, Cannabis indica
tctgccccattggcaagcttacctgcccatattatacaagacactcatgcttgcgcttgacagttaattattttacttttccccattaagtttcttctcataaaagcaaaaaaaagaatgtaccatgaactcatgaagagggacggtgggttaaagtcccatctctaagtttgattatgtgaaatgttacactaaaaacaggtttaataccatagtcttagctcacctcatcaaaatcaaacacgtccaacaaggcagcaataaacacttcctttttcaatgatatattaagggccactctcaattgccatttttggttgatagaaatggtttgtttagtgccaaaaatgatattaattttcatttgcgtgcacgatatggatgtacacgttccctttaattcatttttttgttcttattttaaataataatattttaaatatttatgattggcaatctgaatatatggtcaaacattataaatagtttcaagtgtaattgctaactgtttgtatgtatagcgtatcagggctgtagatgacagatttttaaaccgataaggcactttcttttgaccttaaccctactctccccattttaccctcacaggaacaagcttaatacttatacacgtcaatggacatcttggtaaactaaactgccccaaagctgggccatccattatatatagagggagaatatggactaaaaaacattaagtttataataagggaaagtaattggactcgggaggatgtcgccggccattgaaccacaagctccgctacttccgaaacagcaaacgcagggggcgaatcatgcgtctatatctggtgctgtgttcaacatcgccacaaccataatcggtgctgggatcatgtcgattccggcaactcttaatgttgtcggagtaatacctgcttttacgcttattgtcattgtcggtctattagctgaagtatcagtggagttcttggtgaggtttacgcagtccggcgaatccattacctatgctggagtcatgaacgagtcatttggccgactcggttcggtggctacccaagtttgtgtcatggtgactaatctcgggtgtttgataatttacctcatcattatcggtatgcttcaattgacaagcttatgagtaatagaaacttgggctgttctgatttaggatttgtttagtttcgtttcaagtctctatgcttactgcgatacccatttatcagaaattcaagtagcccaacccttaatttgatttctatgagcaaaatcacatgacgatcacagatttaatatatgtggaaagattttgtggtaatcatgttgttcatgaatgcttttgcatttttaattgcaggggatgtactttcgggaagtcaatctggaggaactgtacacttgggagttttgcgagaatggtttggcatccattggtggaactctcgcgaattttccatcttagtcattgtcgttttcgttatgcttccattggttttgctaaggcgtgtaggtcagtcaaacctactgcaattttgctctgttacttcatattgaataaagttgaattgcgttatgcttcagaagtttttgcctgaatttgctgactttttcatctgggttatggctatttttgtcagaattgttgaagttcagttcattcgtatcagtgcttcttgccttggtttttgttggcatatgtactgtgatggcaataattgcacttgtccaaggcaaaaccaaggatccaaaactagtacctcatctagacgaacacacatccttctttgaccttttcactgccgtccccatcattgtagcagctttcacttttcattttaatggtaaataacatgcaagaagcaccccaaatgtttgttcatatataggttgcaattattgtgctaattctttctgaccaattcgaacagttcatccaattggtgttgagctaagcaaaccatcagacatgctcttagctgtccgaattgcattagttctttgtgcaacagtttacttcgccatcggcctatttggctacttactcttcggagattcaatcatgccagacttactagtcaatttcgatagaaactctgctacagcaactggtgcagtgcttaatgatgcggttcgactgagctatgcactccatctgatgctggttttccctctattgaacttcccattaagagcaaatatagatgaatttctcttccccaaggaatcccttttggcctcagacaccaaaagatttttggttctcacaatatctcttttggtcttttcatacttagcagccatagccttcccaaacatttggtatctctttcagtttgtggggtcaacatctgcagtttgccttggctttatctttcctggtgctattgctgtaaggtttgttatcgtttcttttcacccactctttgtttggaatgacattatgctcatttttatgttcaagttattttgttggtgttgttttgatttcgaatcattttacaggaatgttaatggtgtgtccacaagaaaggacaaaatcatggcaacaataatgatagtcttggcagtagtaacaagcataattgccatttccacaaatatatataatctgcttggagatggagaaaagtcatagtattatttttttcatatatattggttgattgaatgattgttaattctgttgttgttggtgtatcaagtacgagcattgcttttatcttcttctttttcaacgtataattaggataaaaaaatcttaatagttgatttgattgttgattgtacaaatagatatatttataatgataattatgattgaaaaaaaaaacaagaaatgatgtttttttattgtattatattttacttacagaatacagatccaccaccctttgcaacaccaaaatgtgccataacaatgttgttattttttttttttttttttttttttttttttaaaatttacgttggaaaacctctttgttggaatcaaaagcaagctgccacgattgggggtagcttccctaatattactctggctccatttagcaatagcttcaattggagat

SEQ ID NO: 186556 - DNA, 2030 bp, Cannabis indica
gtatcagttttgacatggccagcaggccttgtcatcatgctgactcacaatgcattatttcttcaaattgaaacagttttagtcccatttttctttttctaatttggtcatgcctagtaggacttgcacatctaatggcaatgaataaaaaagacataatcttgaccacagaccaagagccactagtttaagcatctcatacttcagtattattatgtctcttatactttttttttggttctctccacaacaaaaattggaagaaggccactcttgtgttatgtcaccattgaaattatatgccatggtggaacaagatcttcttataggtgtgttggtgaaatgtaaccataccaatcaaacctacttttcacaaaaagaacctattttttcacttgtcagcaatagtagtagtagtagtaggcttagaaaatgaatcaaagggtatctaagctagttaggtctgataattatattaattaacctttacctttctatatgtgaagacagattttattataatcttttcttgaaaaagctcaggatgggctctaagattctgtcactgagtggggaggaatattatcttattcttcattaccatgaacaaggaccctgtcaaaataccaaagaatcttcatcatggttgagcataaatttgactgagataataaaaataaaagctttacaaataattgattccaagtataaatctttacacaaaaacttggggtaaggtccatgtgaaactgacagtgatacaatgatcagaatatgaaccactaattggtagagatttttgtagaatgaatgcaacactagtagtagtaattattgtttttgtgatgaaaaaaagaaaaaaaacaagaaaagttgaatttgaataatgaaatgaaatttggagattcagttttgagttatataaattaataaggctaattaagatttttacccctcaaattttgacctgtgtcaaatcatgccttttgaacttttttgaccgttgaaaattcttcttgaactattgagtttgttagatttaaggacttttgtttaatttcattcaattttactatttcagtgattgtttatgtactaaaccatgctccctagactttaatatttaccaaatcatacccctcgaactttgacatatacctaaatcatgctccctaaactttcatccatgttagaatttttttttactaaaattagacaaaagtctttaaatcaaacaatctcaatagttcagggggcatttttaacgaccttaaaagttcagtggacataatttagtacatatcaaaattcggggagtaaaaattctaattagccaattaataataacccattttgatccccttctctttggttatctgtagttgctaattggtggcactaactttgttacttttttgcagcataatagtgcccaccaaattgtttgctgcacaaatgattaggtcccacccactaaccaaacactttctagggcaacatcccaacatatttagaaacatgtatacacacacatacatatataaaaatattttgtacatataaagtgacccacaaaaagtcacctcagtaaatgacaaatatgccactttattcaaaaaaaaagggatgcaagttgcataggaaagcacttaagggaatacatgtttaagttctgatgagattttttttaggctgatttaagaccacataagcttagtctctcttagcccccacacttttttggctttttttttttttttgttgaaaatattctgattcccttctcttattaagacattatagattattgcccatgcctcactctttgcttgcttataatagaatttggttgcattagtagcacaaattattgattggaaagaaaattaaagtgagttgagttgtttgtttgttttcaagtggttttgttctggtccatattatagaatataatctcttttgttgtgggggcttatttctttattcacctcacctcaccacccacagaaaaaaataaaattaaaaaataa

SEQ ID NO: 186557 - DNA, 3403 bp, Cannabis indica
attggtgctcaattgttgaaaaagatggtaatactgatgactgaactcctcatttccttttcggaaagcgactgaattggttctttctgtgtttggttccgaaaattcaaattaattaatagaattaacaaccagatcatcatgaccataagtggtctgttcgtggccacttctctgctaattgtacttttccctatttctttcttttttttttttttgttcttttaatcatgtccacatgaccatcagtaaaaatgaataataatttgaagttttctttttactttgtcctgaattggatcatttcttataactatagactttctagagtctagtcatctttaattttcattttcaacaaataaagttaaagggactcaactaatgcgagaattttcgtatgcactgaattgtcgcaattgtcgagtggttacttcattgaacaaataagactaatatggttcttgctttaccttatgcatatcattattattttgaaatttataaggtaaatattgtttacattatgcatgaacttaatttaattggataagttttctttatcaattaagggatattttagcttttaagatagagaacgtcatagccaacgtcaagttctcatgtaacaaagaagaatgaagttgactgtacaatattatatcagtcttataatgtatggacataaaaatgaaatcaaaatacatttgatcgtttggagtttggaccaattctacgatgtttatgtggataattgggttattatcaaagtaggccattataatgttgtcctatttgtacactatttaaattaagaaataacagagtacgatacatgtaaagatattcaaaaaccaaaaagctaaaaaaggaaatgataaagtttgatttgcttaagcatcattttgataataatgagagtctcctgaaaattcaaccatgaaggaaggcttgctaagcaagcattatttgaaataattcacttgtaatggccagtgggtgcaacaactcggccaagggttgaactaagttttgtccaggtaacttaactgaccattttcccgaatcaaaacctaatctgccaacctcgaaacaacttttctctcctaatttttccactataaaagaactttccttggtcttcattttcatcaccacactctctcaattccccaagtcattagcttataagctttcaaacaaaactagctcaatactcaagtgtagcaagcgaattaagatgggggcttccttgatgatcaaggccgttgttcctttagccctttggcttctctttgcttcagcattattgtccttggccaatgccattcccaaaactcacaaccatgattttgttgtaagcaccacatctctgactatatgctaatcgctaaatagtaacaattttattgcctagtttcaatttatagcttattaatactatataacaacacttgcagattcaagcaacaccagtgaagaggctgtgcaaaacccataacagcatcacggttaacggtcaatatcctggcccaaccttggaagttagcaacggtgacactcttgtcgtcaaagtcaccaacaaagctagatataatgtcaccattcactggtataaaaatttcttcaaaatcatcgtgtgtgtatgcatgcatgcatgtgccatgcatagaatacatctgcattgtcttcacttctttttaatcccaattataattaatgtctaaatctaatatatacgtgtggggttattaattttcaggcatggcatcagacaaatgaggactgggtgggctgatgggcctgagttcgtgactcaatgcccaatccgaccaggaggcagctacacctatcgattcacaattcaaggccaagaaggcactctttggtggcacgctcacagctcatggctaagagccactgtttatggtgctcttattattaaaccaagacaaggagattcctaccctttcaccaaaccaaagcgtgaaactccaattcttctcggtataatatatataacataaataataactccatcaatagttataattatagtaacaactttattagctaacatcattataattacgatgatcaggcgaatggtgggatgcaaaccccattgatgttgtgagacaagcaactagaacaggaggagctccaaattcttctgatgcctataccattaacggtcaacctggtgacctttacaactgctctagcaaaggtttgcttaaaaaccccttaattttcaaatacacaaaaataataatagtaataataaataactaattgttacttaattatgtaattaattgtgttatgctattacaggcacagtggtggtaccaataggatctggggagactaaccttctgagagtgatcaacgctgcactgaaccaacccctgttcttcgccatagccaaccacaagttcaccgtcgtaggcgccgacgcctcctacgtgaaaccctttaccacaacggtcatcatgctcggaccgggccaaaccactgatgtccttatcaacggtgaccagccaccggcgcgttactacatggcggcgcgtgcataccaaaccgcaaatgcaactttcgacaacacaaccacaaccgcaatcctcgaatacaaatcagccccttgcgcctccaagaactgcccaactacaaagccgataatgccccaattgccagctttcaacgacaccaacaccgtcacggctttcagcaaaagtttccgaagcccgagaagagtcgaagtcccgaccgatatcgacgagaatctcttcttcacaattggactcgggctgaaccagtgcccgaagaacttccgatcccgaaggtgccagggcccgaacgggacacgattcacatctagcatgaacaaccactccttcgttctcccaaacaacatttcaattctccaggcttaccagcagggaattcccggagttttcaccaccgatttcccggccaacccaccggtgaagttcgattacaccggaaacgtcagccgatctctctggcagccaattcctgggaccaaagggtacaaattgaagtacgggtccaaagttcaaatcgttctacaggatacgagtatagtcacccctgagaatcacccaattcatctccatggatacgatttttacatcgttgcagaaggtttcggaaacttcaacccccaaactgataccaagaagttcaaccttgttgacccgccaatgaggaacacggtggctgttccgtcgaatggatgggccgtgattagattcgtagctgacaatccaggtaaataaatttatatgtaaaagtaatgcattttcaaaaaattcccattaacactttctggcttattattagtttaatatatttcaatatatatatacataggtgcttg

SEQ ID NO: 186558 - DNA, 3030 bp, Cannabis indica
ggttttctttcagattccagtgtttggcaacttgggttgaagcctttttcaatcccagctgtccgttttttgttgcaagtagttgttggagatgggaccaatttgacccatctctgcaccttctttgtgatattttcaggataacccatcaacatcagccataatttctatgtctaccctttctcaatttttatttgtttctttattttgggtttttcctaatcccaaatttgttttctcttaaaggttttttttgtctattattttcttgatttctttagttttgtttcacttctgagtatctcaatttgttcttactgatattctcaactaattttcctttgatcttttgaggtttgcactattaattttaacttggctgtttgtgattgagtttaaatcttctctcttctactttttatagtgagtatatatttatatctagatagatagagacaaataagagagtggggggtggagtaagatcttgtttactcaaggttaggatttacttaatcccttaattcaatgtgttaacataagagttttgtaataggaaacttacactgatgattggctaaactgtcatagtcttgataggaatttaggtgaaaaagcatttcttttttccttttatcaatttcgtgccgcttttgatgggtttgttccaaaacaagacatgaaaattggggaattactaaactaggtcgttgttttttttcacttcatagctcaggggtatgaaaaccaacatgaataggcctggtgggtattttttttttctctttaattactatggctggataccaaataatcttttctttgttttaccttcctatttaagttttgtgtttggttggaaatgaagtgaacttatttcagtacggatttcataatatggctgggatattagatttttgccctaaatttagtgctgccataaatgcttttaagttcctgattttattcaaattgacactagctaatccttttcattatattacttgattatattcattactcatgctctttgttttacttagaaatttagtttgtaactggcatgattttgcttttaccagttgagagcctatgtatatgtctacatgtattgtatgtatgaagagactgtaaatactacaaattgtggttgaaatggaaagaattaatttttgtgggccttcacggttagaactgtacttatcagtgaaccagtagatactgatatttttttttctttgcttttcttttttagaatagtaatggcagtatttgttctaattattgttttcatctttgtttgatttctcaatggtctctatcatcacatttcacaatctgaaaccctaattaccgttccacagatttttaccctcacccaaaattaattttccttttattcattttaaactgtcatttattgcacccatcctttttatttttatggttttcagatatttctcatggcctaacagaactttgttgccttttggttcatctataggtcagcaattcacaagaagccaaattttgaattatggagcaaatcaccattgaaaccttcacatactttaccatgctttgtgtttttcattggaagtgatctctggttaatctactctggcatcttctggttctggttgtttccattcagtaaaattctgcctcccacaatttagccagctataaattttgttctcaacaatacccagtattggatttatttagatccaatttcctagcacgatttcagacaactcgaggttttagaattgggtttaacataaattattgagcacttgggcagagtttcccttttctttctgtgggtactacaccagctagtgaatataactaaggctagatgactgtagatgaaggggttagtacctcctcatggactcgagagcaggataaagcatttgagaattccttggcaactcatcctgaggattgtccagatcggtgggagaagatagcggctgatgtaccagggaaaacagcagaggaaattcaacatcactatgagctcttggttgaagatgttaaccagattgaatctggctgtgttcctctaccttcctacaattcttcttcagagggttcatcgagccatgttggtgatgaaggagctagtaagaaagggggacatagtgggcaatttaacagcgaatctaaccatggaagtaaagctagatcagatcaggaacgtcgtaaagggattgcgtggacagaggaagagcacaggtaaatttattgttctagattcaaatatgttatatggcatggtatctagaaaattatgtaaaactattgaaaaagtcatttactctttttgaaggatatgattgtctttgtgttcttattgccttatatagagtttacaccaactgtatcttactgggttaaaagttccccttttctggtttagggtcataagttttttcccccccataccactaatttatactaagttgctttctagttaaaggaagtactatctggtgataagaggtagttaagtttcagtgcttgctttttattacatcagcttcaacagtcacatctcaataatttagtgtttagtcactaagctcaaaggttatacagtgaactgctgtgtggtattgtgttttgtgaaacagtaattgttagatagccttttggatttgtgatttgaatcacatgctaataattgtcttgatgaaggcttaatgataggtagttaggttgcagtgcttgatgaaggcttagatatcatagagctcttaagtgcttttaatgactagctaataattgtctctttatcagtgttatcatcttggacttttgaccaaataatatatactttctacagcatggcagtcagactacataaaatagaataggaaacattacaatttaaaaacttatgaatcaaacaagacctttcaagtctttttactttcccttagctttcattactcatttagttataactgaacattatacatccaaactttactgtttaactgtatattgctgtggtga

SEQ ID NO: 186559 - DNA, 923 bp, Cannabis indica
ggcctcttgagttgagaggctttgggcaactactgtctcaccctaaagataaccccgtaaaacagattaaaattaaccctatctaatttaattattcaatttttttttgagaaaaaatttaattagtcaatttgatttcttatatatatatgaaattaattgacatattttcattgtaacacatgaataacagctttggatctcataaaaaatgtacaagtgaaagcaatcttaggacctcatagttcatctcaagctaaattcatcatcgatttaggtcaaaaagctcaagtgccaataatatcattttcagcaacaagtccttctcttattccaagccaaaactcatactttttccaaacagcaataagtgactcatctcaagtcaaagccattaattcaatagtcaaactttttggatggcgaaaagtggtgcccatttacactgccaatgaatatggagaaggcatcattccttatttagttgatgccttgggagaaattgatgtcagagtcccttatcgaagtgtcataccgccattagctactgacgatcaaattaagtttgagctttacaaactcaacgcaatgcaaactaggatttttgttgttcacatgtcgtacgaccttgggttaaagttgttttccatagctaaaaagattggaatgttggaacgaggctatgtttggataataacacaagatttcactaatcttttgggctcatcattagaatattcttcaaatatttttagttcaatggaaggagttttgggaattaagacttttgtgccacaatcgaaagagcttgacaatttgaaaattcgatggaaagccaagttctacaaagataacaatctcaacaattttttcgatgctactaaacttaatgttatgggctattgggcttatgactcagttcg

SEQ ID NO: 186560 - DNA, 4394 bp, Cannabis indica
atatttacttataaatactcaaatttttatatctcactcgatagataaattgatataattttaattttacatagtttaaaaatttaaattataaaattatatattttatttaaattttattattatttaacttatttataattgataaatatatgtctattattttttttttaataaacatatctattattattaatagtaaattttagtgttttataatatgtcttgccatacttttcgaacttgtcttttgtcgtgtgttttggactagtctattcgtgataatgtatcgtggctttcatgttttttgtactttgttgtgtattttggactagtctattcgtgataacatgttgtgcctttcgtgtttcttgtactattgtatcgtgtcgtgtttatgtacattttttttgtgccctattatgtcaatttatagtatcggatcgtgtcatatcaaagctcttttttttttttgtatctagttgtacgtattttttgaactcataccaattttataccgtatcaaaaaatccaacccgtatttacacgacacaatagaaataacataagtgcaacttctacattaaaacaaaagatgacctggtttttaaaagaaaaaaaaaaccaaaagatgaccaagaccacactaaaataaattaatatttaattttggccaaagaacacacaaaactaatcaataaagactagtgtatagtactgtattctctacttccaaaagttcaaaactttttgttgtcgtttcacacagaccgaagcaatttaaggcgaaaaaaaatcaataataaactattaaaaaaaataaaaaaatcatttaatagaaaagaaaaaaaaaaaccctaaagaccaaatagataagatcatcataaaatgagcacactaatttttgttcaatttccatttccacccatgtttgctgtctgcacacactgatccgtcgtcaaccgccgctcaatcggcacggccactcactcgcacttcaggtatcgtctctctctgcacctatatttatatacattttatatacatgatgtgtatttgtttgtatatatatacatatgtactcacatttcatctgaacttgtggacagagcttctgctgcagcgcgtgcttcttacttctttctattcacaatccattcctatcacaggtatgttttctttctttagttgttgatatgattcagttaacatttatatatatatatatatatatatatatttatagatatagctgattaggaagaaatagttggagaaaaagaagatattaattcttgatgataatgttacttttatgtgtttatttgatgaagtgagatcttacattcttggtcaaattgagcaaatttatttatttattttaatttttggcccattatgtatatatctgcttttttactgaaactgattgaccaaatcaagtgtggtttttaggtgtggtatttcttcatcaagtaattaagattaaaaaaagttaaaaaaaaaagaggaataaatctaaaaagaagaccatggatccataattatgtgggatcctgttatcttaattaatgaatataatgggattctacatttagaagtgagaaactttactctgctaagaaaaaagaagaagaagaagaagaatgagtctaaaaagtaaacatggatccataattatgtgggatcctgttatcttaattgatgaataattattggattccacatttaagaatgatatttagactgctaagaggtgtaacaaggagccacggccattatctcttctaaatttgcattaattagaaagagtgcgggctggaatagtgtgtcaactaatattggggaaaaataatcagtaaagtgactaaagtcaactaaaatctattgatttttagttttggaatgtcttgaatgtgaattatgttgattctgatttgtatttgttacagggataaatcaggttgctactagcaaaaaggatttcaccatggtttcaacatctccatgctctgtattgaatgactccataggctttatatgaaggttagtatttgatatttacatttttgaagaattttgttggactgcatattatgatatgtttcattacatttatgtatgaattcggatcagtttccatgttattgtacttatgttttgtatacagataataaactcacatatatctgctatgtggcatatataaactgtttgaaagggaagacacttgtgtttaaaatcaacattctgattgtttctatcttttaggattcattacttacaaaataagcatagttgcaacctgatcttgactatggaccaggttagtggttgattctctatctctcatcttctgtagtttttattttaaattagtcttttttcttaattttgctctgattggtaatgtttgtttatgtgtagtacgaaaaagttgagaagattggtgaaggaacctatggtgtggtttacaaggcccgtgatcgtgttactaatgaaactatagctttgaagaagattcgtctggagcaagaagacgagggagtgccaagtacagctatacgagagatttctctcttgaaagaaatgcagcatgggaacattgtcaggtatttaaactgaaattcattagtgttttggctagttttaattaagacgtgtgcaagtgccgagtatagtgcactttttgtttcctttcttctgcttctttgttcttttagataccaatttgcattcctacttaatgtttggacaccaatgaatccattattttaaagttgataaatataattatgattaccactgaaatgatgacatacatggtttggacaaacagttctctgatccaaaacatcttttaggttctaattattttagctagttggtttttagtgtgtcctagttaattcagtaaatgtttgtgtttcagatcctaaaacttgtgagcaattggaagagatgtttcacaatatttttggaataattcaactattatgtaaaactatatagctgtggcctataagcaaggaaactttttcaatttaactgtacttgtacttctaaagttttctttttaatagattttgtttcttatagaaccattttgttccagcactttttaagcaatttcacttcatctaaagagaggagcaatggaatgttgttgatgggttatgggtgtttggttgacacttggcaggttacaggatgtagtacacagtgagaaacgtttgtatttggttttcgaatacctggacttggatttgaagaagcacatggattcttctccagacttcgcaaaggacctacaccagataaaagtgagttttcttttcttgttaacaccatatgtactatgtgtgatggtttattgtttgaacttgaaatttagtactttactcaaagttgtaggtataggcttttgattattgttggttatgtttccttatgtcatagttgtatattgtttgtactttgtaggttgtagataacattaatttgaatgaaagtgttttcttgttgattggtgctatatggaataggaacttcatatatttattttgtatttctgcagatgtttctttatcaaattctccgtggcattgcttattgtcattcccatagagttcttcatcgagatctaaagccacaaaatttattgatagatcgccgtaccaatgcactaaagcttgcagattttggactagccagagcatttggtattccagtcaggacctttactcacgaggtattattaattagcaatggatttaggtttcctaacatgctcataattcttttctactagctgagattaataaaggatcaacttccattcccttcaaaccaaaaagtaataaaagaagtaaatgaggttatggaaactcaatctgactatgctatgtttaaaagtgtatttaattagtagagatcagactgctgctgtaaatgtaaagcaggtggtatatggaagcttgactagcaagtttaatctactattatgaaaatgattttgtgaagttctcttaagaaacaaatcaggaggggttttgtaaaattatttgtacatttcaagaattgtatgcattggcaaaagcatcgtagatgaggctgtagaatcttggtttataacaataaaccaaaaatttctgggtaaacaacaatgattttttttatttttggtaatgtgagtatatatttttgtgtgtgtgtgtgtgtataacttgtgtcctttcttgaataagatcttaatgagatataagataatgaacttcttcagtgaatggttgtattcaagtattagggtaaataattaatttgtcatggactgtgtaggtggtgaccctcgtggtacagagcaccagaaatattgcttggatctcgtcattact

SEQ ID NO: 186561 - DNA, 777 bp, Cannabis indica
tttatataagtgggggttgatttaaaattatcccaattattgtactacagcacactttttggtctgtttcatttaagtagtgtgtaagaaaacacaaaacttattattactgagttataacattagtgccactctctttattgttaaaagagaatattgttgggcactactataaaccttttgtttgaataatacaaaaagggaactgtacaaaatgtttggctttgccgactgagaaaactactctacggtaattattcctacctcatcatcttttagtttaacacacaaacatatacatatatacatacatttacatatgcccaaacacacttgatgatgaaaaaaatatatatcttgaaggtagagcctcaaaaatgacatatcagagccaataaaacaaactttttctcccctaaaaaacatattatgtacactccagaatatctttcttaattttgatatatatatctatagatagctcacagttcaaaatagctagttaggttgtttatttattattttttgttgagattatttatttattttaaaagaaaataattgtgattcaaataagttgttacgtaaatttttgaatttgtaaggctcacatgaccagatattattaataccatatatattcatccatgctgccaattcccaaaagaatgtcgtttaaatagtgctattaattaatagtaccatttggaactacttatgggacatatatttagtgagaccatatgtatacaaatatgatatgtatatttatttatt

SEQ ID NO: 186562 - DNA, 11331 bp, Cannabis indica
acgtgttagcttcacctagtataaattaaatattacgtggtcggtgattttagattttagcgatattttttaaaaattattatatcaaattatatgagacccgataattaattgtaccaataacgatataataccaggaaggacgctaagcactatagtgatatatgttaggatttctcttatggttgtgaataattacaatttacatgtccatcatggtatgtattgacacaatttttcgtcattaattgatctaagaaggttgtaaataaaaagaataaactcagactatatgggtcgttaaatgataaacttgtttaataaagtaaagaatcacaccaaagtttttataatggttaactccttttgatttagtggtaataggttaatccacttataatttattatatcaatgctcaaacacactagagttatgttttcaagaatgtgtttgagtaatcacaactgcgagatttcttaatggagatctctttggattttctctgaatgtttctctccaaagatagtcgacaataaaactcaacttgttctatatcaacggtggctaaggtttctaaggaaacaataaggagatttttctctcaagtatgcggttgttgagaaagtagattgaatcttcgaaaaacgatcaaaaagagagagctccccctccttaggtctagatcataagcttatatagagctagggttaaactagtcactccctcacattctaggagaatggttacaaatatttattttagtttcgcatttataataaataaatatcatcttgacttgcagaggtggctaagcctttgaaaatcttctaaaagcttccatcttatgttgataatatgttgaatgaagtctcactctaggggaaacaataaggtactagaaagtgtcagtggtcttgtgcctctccttgcatttccacttgggttggctttgataatatcttggaggtaagttggcacttgtagggttttaagcttctaaaatttccaagaaaacctcattttattgaactgtacatgagcattattgacactatctttggtcagtgctcgcataggattaattcccatttctctaccaaagcatctttcaatgggcttccctcatgtgttgtgtaaccactaacattggaaggagtcattagtagcatggcttcctcaatttctttgaagtgggtgacctctgacaatgaaaagtcatgtttgtgtagcatatatatatatatatatatatatatatattctcctcctgatcatatgccaacattgacattaggaagtttcactggtaaaatgtggctttggtttctcttagaatatgcgaacattgatcaaggataggccttttggttgcatatgtaataagttatgttgctttaagtgttgtgcctatgcaaccactaacactttgaaagtgccttggattgtatatatatggtccttatcttctagccccaatgattttatcatgtcttatttatctcaaacaaattaagtttttcagtcatgatttgttggaattcttccttcttgaaattttggtgaacaatgaccgtgagatggttaatgtctttgtgaacactgacaatgttgacctttgtgtctttaaagtgtactcgcgcggcttgcgaacccttatggccatggaaaataataatgagtatttattattactttattatttcaaaatttgagtttaaatgtgtaaattgaaagtgtaattataatctatattgaaagttcttaaacctgtgatgcttactattttcagtttatttaatcatgtaaattaagatttaacataagctagcaaacatcacatcaagaaatttttacaaagtttattgcaactgggaacaaatttcaaccaattactccttaagtttatttggtaataactccactaatcgattgtgtgatttataatgaagcaaaacatatttttttttttttttttaaatttttgcaggtatgatgtagcccttgcgactaatacaataggtatttataatattttgaactttgcaaagaagtgtttgaaattaaagaagctactccatttgtcaactggttagtaatatattttcattaattgttgagtatataatttagtcttacatgtaattttctatgactataaatctaatcatatcataacaaaatttgttacaatataagcatcatcagtaaaatgtcctaacaaatctaaaatgtatatctaactaaaatattagtccaaaaatatgtgtttttttgtatagataaaatagttatgtttatcattaaatatagattatgactaattttacattagtcacacttgtgactaaatattactttttaatttataattcagcttatgtgtgcggtgaaaaagagggaataatatcagagaaagcatttgagtttggtgaaacgctaacaaaaaccttcaccaaacttgattttaaaatagaaaaagaattggttgcacatcgattgtctcaacttcgagaaactaaagcttcggaatcagccattaatgccaatatgagagagcttggaactgaaaggtaatataatttcttactatttaaaattataaatattaatattatatatattgacatcaatagagatgagaaaaattcaaaattaaaacttctttattttttgtcatgaaaagaaaaaaagtgttctactagtccatcagtatacttattgtttgtaataacaataagtttgttttctgttagaaagttagttaaacaatttctgttattttctctttctctgtgtattacttgtatatataaataagagcttagttcatgagagggtgcagttagttgcattgttactctcttatcttttctttattctattttctactctggtgatctgcaccacaccagtattcttgtttcttttttttattaataatatgttgttattaattatgatgtagtaattttaatagtactatttgcgtattaattaaataattaattattagggcaaaacattttggatggccaaatacatatgtatttacaaaagcaatgggagaaatgtgtgtagaacaattcaaagatgatgtccccactatcatcttacgtcccacaatgattgtaagcacttataaagaaccatttccgggttggattgaaggtctcaggtatatcatcacttttgttatatatgcatgcatgtaattatatatatatataacaaaatatttcacctgttaaatttaaaaataaaattcaaaatattaattacgtataaattaatactcacgcagaacaatggataccttaattgttggcattggaaagggaaaattgccattcttcttgggtatacctactgtcgcacttgacttggtaaatactcttttattcattcagtgacattgacatacttatttatttatttatatatattaataaaaagccggttcaacaaaattatatataaatattgtacatgcagataccaggtgatatggtagtaaatgcaatgattttatcgatggtatttggtgagggtggaatgatttaccatgttggaagctccatcaaaaatcctgtttatatttctgaaattcgtaattacattcatcgttatttcattgaaaatccgctctttgatcataaaaaagaaaaccccatcacagtacataaaattatacttcttcaacatatttctactctaaacatttacatcgccattcgatacctcctacctttgaaggtatgtaattaaatatgtacaattttttaattaattaagaaacaatatactaaaaaaatttgtttacttgtaaacaaaacagatactggaaatggtggtaagcttaccatatttgagatgttacaaagatgtttatgccaaaaacatgaggaaacttcaaaccataatgcgtttcatacaaatttacaagccatatgtcttattcaacatgatgtaagtataagtatatctttaattagttttattaattgtaactatatattaattaattgattaattatataattaattgttaattgcagatttgacgacacaaattgtgaagggctaagagaaaataaagtaaaagggagtaggaatttggagctaatggaaacattcaattttgatcccaactccattgattgggaagactatattatcaatactcacattcctggcctcataaaatatgttattatttaacttgtataaatttatgccaagttaatttcttatatataggtacactgtaatgtaaaattttgaatttacatcaatttttagtattgtgtgccaatacacaattacaaaatttagtatttttattaaaaagtaaaaaaacaataaatttattattaattttattatattgtattgtgtaaaataataaattatttccctgaaaaaatctaataaatatgcatagattttgttcaaaatatcaagaggtcactaagagaaatggacaacgtgaagacacctcgcagcaggtctcaagaccaaggtcgtaaggactcaggaccaacgtcgcaaggactcatggccaaattcatgaagacttatgaccaaaatccccaattaccaagacgtacgggtcataatgttgccgaccctcagtgctcctcattgggctgaccctcggtgctcatcacaagggccgacccttagtgctcctcattgggccgaccctcagtgcttctcatcagactgacccttagtgctcaccattagaccgaccctcagtgctcctcgcaagggtcgatccttagtgttcaccaccaaaccgacccttagtgctccccactgggctgacccttagtgctcctcattgggccaacctttagtgctcatcacaaggctgaccgtcgaagtccaacaagaccgtacactcacgtggacttgtgctagaacacgtgccatcagagctagtccaggaatatctactgtcattacctatatttttacatttcaatagcttctatatggagagagtggattatgctacaagagtttagcataaattaagtgttcctaaacataaatttatatattggcaagcaacaaataaccactagagatcatataagtaagttgttgtcaattctttctaatttttgtccagtttgtgataatgccaaagagactcattctcatctctttatggactaccccttcaccattaaagtggtttctgaagtaagcagatggctgggcattctcgggtggcggaaaagcttaaggactggtttgattggttgtcaacccctctcaaaaatttgcaagacaaagtgatcaatgctatcttctcagccatagtgtataatatttgggtgaatagaaatatttgtatatttgaattgagttgtaaaactgctgttagtatcagcttggagatttaaaaaactgttaagttgagagtcttgaactttgttgttagtggtaaaaacaagctagattcttatatctataatgcaatacaaagtgatctgaccatagtgatcataatgatatgtgagtcactcagatttaagcctatagccacaatcctcacgatgaatctctgaagatccaaccttgggttgaacaactagttaagaataaatgggaattagatctttaattcttcatttgtgcatctcaaaaatagcaaaactctagtagtataactaattaaaaaaccaaaggatgaaagcaaaattgagattgagaaattaaaccaagtggaaaatgagttaaaagctaaacatctaaaagtaccaaaaaaaattgggatacggattggtcgagtgaaaagacaaccttggatgacttacgcattactcctgctgagattacaaataataatattataagcactatgcatgtgtgtattggtgttttattatttcctatatatatgcttaataataataataataataataatgaatggaggctttactattgtgaaactcaatgatacagtaactcgtgacctggttttggaggaaggtgtcctccaatttgacaaaaaaatagtcataattcgcccatggtcgacagacttaacagctataaatttggtgaagtcggttcctctttggatccgattaccagaccttggtttacactactggggcacaaaaagtcttagtgccattgtgagcaatttacggaagcctataatgacagacaaaattaccaaggagcgatccatggtaaaatttgctagagtgttggttaaaatggatatctcagataagctaagagtgatagagttcttgaatgattatggtcgtttaattgaacaacctgtagagtatgaatggcttccagttcaatgcaattttttgtcgtggatatagtcatattggggcatattgcaggaagaagaagattaatgcggaggagaataagaaggagactaatccaattcagaaagaggcagccaaggtgtctgaaactgaattgaatcaagctcctcctatagatcagaatcgtggaaaagaaaagccaagtaaggacggtttcttcaaagcctgttgaggttatgcaggaggttcaaggagatggtttggaaaactggaaaaacctccaagaatatagcaaccagtaagaggaaaatggagattagaaaagctgatgcagatgagaaaggaagtaattcatttgatattctacaaggccagcaagatggtgacacaatggcaattattcatgggggagattgataatggatagctgcaatataatgagttggaacattaggggcttcaacagtaacaagaagcaggaggctgtgattgatttatgtcgaataaagaaagttggtttaggggcaatcattgaaacttaaatgagaggctctaaaatgactgaaacaatgcacaataaattcattggttggaacttttactctagtccaatcattgaaggaagaattttggttgtttggaagaaggatttcattcaggttaaggttttagaggaaactacttagtttgtccattgttaagtcaaaatggcttgtcataacactgagattttggctacttttgtttatggtgctaatgttggagaagataggaagagtttgtggaatagcttggcaaatctctctattatctccaaaccttggataataatgggagattttaatgctgtaatggattttagagataggagtggggggaatcggattacaagagctgaaattgaagatgcaaataattggttagccttgggtttggcagatgctctaaggaaaataggttctcacttcacctggaccaataatcaagggggggagatagaatatactccaaaattgatcatgtttttaagaatgaagaataatttagatttgtttcccaattattttgttaatatgaattgtgagacttcatctgatcattgctcttgtatagttgcttctacaattactcaagacattggagttaaaccttttagattctataatcactggattgagcatgataatttgtaaaggtggtttggaaagttggggtaaggcgattaaagctgttgggttacaagccattcatctaaagtgtctttggctgaaacatgttcttcgaaaattcaataaggcagtgggagatgtacagatcacctaccagcaggctaaagagaactacttaagtttgagattacaaactcaagctgatcctgggaatctttctttgttggaggctgaaagggcagcatctgaagagtttagtgaaagagacaaaaagctggatagctttcttaagcaaagaagtaaggtcaattggttgcaaaaggatgatgagaatacttcttacttttatgcttgcattaaaaaaaaagagaagaaaaccggatagcttactttaagaatcagaatggagaggttgttgatgattattctgaagttgttaagcattttgtggatcatttcaccagctttatggggagtgctagaccagtagttcagccttcttttagatgccttgactatggtaaaaagcttacctttgaccagcagctatctttaattcgtcctttttctaagaaggagatcaagaaagctatgttcagtattccaagcttaaaattgccaggacctgatgggtttagctcggagttttacaagagaatgtggcctgccttaggagatgaatttttttcagccatacagaatttctttaacactggaagcatcccagcagccatgaatgaaacaactatctccttgatcccaaaaactgatgccccctctagtggagtcgactataggccaattgcttgttgtactactatgtacaaatgcatctcaaagttgttgtgtactagacttgttgaggtgttactgggcttggttaaccggcaagaaccaaggagccttcattcaacagcgatcgatagctcataatatcctaatttttcaggatcttatcaagaattacaatagaaagaatgtttctctgaggtgtgctttaaagattgatttgagtaaagcctatgacacggtggactggaattttttgaaaaactggctgattattcttagattcccagatacatttgtgaaatggattatgacatgcttgaaaggaacatcttacaatctaatgatgaatggtagacttcaaggcagattccaaggtaagaaaggtctcaggcaaggtgatccgatttcgcctctgttgtttgtgttggttatggaattccttacaagaagattattgcaagaatcaaatgaaggtaccttcaagtttcaccctctctgcaaaagcctcaaactaattagcctctgctttgcggatgatctaatcttattttgcaaaggcactagacaggttgtgagtcatttgaaaactgctttgaatgattttagtgagtctactggtttatcaattaactctacaaaatctaacatctattttggggagttgatgagacaaccaaaattgagatttccagattgtttggcctagaggagggtaaattccctctaaaatacttaggggtgcctctgagacctaccaaatggagaatggaggactgtggagttattgttgacaagatcaaaaagaggcttcacacatgggctacgaggcatctttcatatgcaggtagacatcaactcattcatactattttacttggtttgaggaactattggatgaacatctttattcttccccaatgtgtaatcaaagagattgagaaacattgcagattatttctttggggacaatctgggaatcgttgtaaagttcattttggctcttgggagaaggtgtgtaggcctaagcacctaggaggtctcgggttcagggaaggaactaactggaacaaggctattttggctaagtatatgtgggctattatgaagaagcatgaagttttatgggtcacatgggttcatgttgtctatttgaaaggagatgacatctggaactacaagcttggccaggatacaagctgatattggaagaagctttgccatttgaggaaagacttcaaacaacagcagattgtggctgctggaaggaataacaaattcagggcaggttttctttataacagcatgatgtcttgtgaggaagttctacaaagctgtttggaactgatataacatccccaaacacaaatttatcctttggcaaacgatgcacacctaacttctaactagagatcagcttgcaattcttcacatcaacattttgcctccagattgtctggtgtgggggttggaagctgaatcacatcagcatctttttttttattgctagttttctaagcatgttgtgcatactattttcaaatggctaggcttttaggcttggaacactcagttcacaagctggagaactttcctgtccataacaggttacaggttcaaggacaaagtggtggttatgctgcttgctgcggttgtctatcatatttggctaaatagaaacaaatgtacacatgacaatagctcttatacgattagtcatgtagttaaggagattaaaaggattgtaatgtatagattgtatagctatagacaaaggaggattgactccaatagccaaaggctaatgagtaggttgttaacttgatcatgtgttggctgctgcccgagcctatgttttttgtggggctttgcttgtaatcttgttggttgattaatgagattccttctcctttgataataataataataatgttttacgtattttgcatgatatataataaaataaaagaaatgttattgttcgtgtgtgtgccaactaaattgattaatgatataagtgaagtcaatattacaaatacaactcaaataggccaaagtaatagcagttatcttactcccctttaattaaaacagaacactatttttttacaatgaactttcattgaatataatcagagtttaatacatcatagagaaatggaagaaaatcatctatccaaactaattcgccatccacactgagtgcacgaactgttaactcatgtgcaaccatattagctgagcgacgaacatgaattagagatgcctcaggataattggatagtaaactagcaatatcatctaaaatagagccaagttcattacagaaagaagatcttctagcaaaagctgaaatcaaagctaagcagacagattcaaacaaactaataggtacccgatagtaagagtccaatccaaagccaccactaaagctacagcttctgcaactgcaaaagtccttacaaaaccataaaaaacatctaataagggcattatactaaaagaattattcctttaaaataaattaataataataaaataaactattaataccaaaattatcatactattactggcaataaaattttatagggtgatagattaaggttgaaagaatcctagtaataaaacataacactattttaatttatgcagtcaacctacaacaaaattattaaaataatataaatacaataacttttcaagcacacatcttgagtgttagatatttttatccaatacgatgtttaaattctaaaatcttttcttctctaagaaagacagaaaaataagtttataacaaaatgagctctaaaattattacttgaagttttaataccaattaacttgaacatttatgagtattattataataaatataaatcatccaataaattcaatcatgaacacaatatactaattaaagcatttatttagaacatcaaaacacataaacaacatgtgaagactggtcaaatacagaaaaaaaaaatatataatattaaatagtgtgggacccacacttacataaaaccaaaaatttggcccccccctctctctctct

SEQ ID NO: 186563 - DNA, 1042 bp, Cannabis indica
ttatttccaggaatgctaaagacaaccaccttcacttcctctttagtaaattcctgaagcaacatgttcttctgctcaatagataatctaggaccttttgcaagcaccccaggatgaaccttccttctgttttccactttagaaccaagcaaccctttataaaaattaaggaaaatgcagtaatttgatttgggtcatgagttctacttctatccttcagctctatagagattattctattttgccttaacctctgcttgatgctagaattgaagaaagcagtgtttgcatctccatctggaatccaagcagatttagctttctgctgaagaaaggaagtataatttttttgtgcttcaattagcttatctgtgctagcagtgattcatttaggggctgctggtgcactttagtttgcagctcatcaagctcctattggtgtttagcaaccatggcttgcaaattattaaaccccgccttattcagctctttcaacatcagcttgaattgtttcagccttgtgacaagctgaaacataggagaaccggttaacttttgaccccagcaatcaataagatagcttttatattttgaatgagatcgccacattcgaaaatatttgaacgacttcttgccagcaataccagcaggatgaaaagtaagtacacatggggaatgatcaaaggtcccttcattcaaatataccacttcagcatgttcatattaaccagtcatgattggctaataccagattgatcttagaaaaaattatgtcctctccttactatttgtttgaccaagtgaagtaatttccactggttttgatgtcttccagctgacattggttaacacaattcccaaaatctgagtcaggataaaaccgtaccttgttcccaattatttcctcctgtgctaggacatcattaaagtctcccgtgatacaccaatcttccttagtgctgatctcacaaatgctcttccaaagatttcttctttcagcctgattattagatgcataaaccactgttaagtaactagaaaa

SEQ ID NO: 186564 - DNA, 1542 bp, Cannabis indica
taaatagagctgcattttagtaattgagtatggatatggataatttggattcacaaaagaactttcatggcaaagtatataacctatgtaaaagttgtagagacaatgttagctgggtggaagtaattaggaagatttttattctctattggccttttaaggattaatattcttttgcctaaaacttatttattgatgttggaggattgcaaagctgcaaaagtttccaatataagattaatcaaatggtcaattgtcttgagtgcctcttattctcttttatgctatatgaaattattctattttactttttgtcagacagataatcatttcatttttattagtgctttatgagtgtgtttttattttaaattgacattgtaaattcttgctcaaggttgctagtagaatgctttaccaagtactgtgtaataggggaggctatacgacatttccgtgcccttaagaacattgacgggggaacaatagttttacacaataaaggagactttggagatcctctttctttgtatcttcgtgctttatgtagagaaggtattcacatacttatcttttttcttggattcataattttaatctttgaagttttcctttctttaaagtattatgcttaaagaacgtgcaatcaaattggcgtaaaaatgggttgcaattttttgtttagaactagtatttgagaggcagttaagttacttttaacttaatatttctaattttattgtgtagatgcattgctcacagcaacatttaagctttcacacgtattaagtcagatgactaattaagctatttgatggacatttctttcttaaatctcttttattgtaatatttatcttttcatcgtgttttaccgggattccccctccccctcctttattttattttgttttagttcaggatggacctgttatgttattttacctatgttatgtatgtttcggttaaacatcaataaaatgtcttagaggaggtattgtttgaatacagggagaattgttgacctgctagaagctttagaagctatggccaaagataatcaaccaattccaccacgagccatgatcttgagcaaaaagtaccgcactctcgtaagctcatggattgaacctttgcaagaagaagctgaacttggatatgagattgattatgtggccaggtgtgcatatttaaatattatatacatatatatatattgatacttgggaggggggtgggccaggtgtgcatatatagaatacttttgttgatgtaaaatttcatttgttgtttcttcaattttttttttgttcgcttcatggttattcaagtatgtcctaattcatctttaaaaaaaaagtatgtcttaattcacattttttttttgaaaaagagacagaggccattgtcttagactagccccgacccgatatatattaaagtcccttacttgtggcggaagaaaactatggttagaggagtcttagcataaaacatactaaaacacagcaaaaaacaaggccggacccaataaaacagtact

SEQ ID NO: 186565 - DNA, 5533 bp, Cannabis indica
tttttttttttttgactttagtatttgtttattggaattagttgacaaaaaaaaacataattaaataacgaaatttaatttaggtgtcgcaaaacgggtttcgacatactacaaagtttatgagttaggctcgaaaaaattaggcgcaattggaaaaataggtcgtgcgacttgatacgaaataaaaacggtcaaatacgagtgtcacagtgggatttggtgactatttgtgtgttgtttgaaattgcacacttggcatgtcgctcgtttagggaacagctggaagtgtgattcttgggaattgtacttcgaaagcgtacatgatgcctctataagggtaatatcctccgaaagatattatttagattttttttagtatttctgggccctcttctagaaatcttgaaggctggttgcaccaacctgttgtaattcattccagaaaagagttcacgtcctggtttcagcttgcaacaaagctaattattgttcgtcatctacttttttggtattggaagcctcctctttggacctcttgatgaaggtttccattagtagttatttgatgttagtcaaggcactaactttaaggtttatcttcctagttgcagcaaatttccttctaaaattagtttacaatttattccagcaatccaaagatcttggctttacctttctgaaccattcctctacagaccctcccaatgttaatgggaaacataggcatttggcgtcattactaaccctcatgactatcataacccttttgaatctagacaggtgatcacttggatctgtgtcacccgtgtacatagtcatttttggcagtttgaagttttttgggagttcaacctctagtatattcctcgcacaaggctctcaatcctcacaatctgattttgagtcatctcccttctatctctgggagacccttgctatgtcctttcgaaagataacaagtttggtcaggatcccctcatttaggataccctcgaaggctggtgcggcttttttcctctaatcaaggtgtgcccttgggtctccatgtttggcattgagtttatgtcataaatcgaccgagagatttttcctagcagactccttttatttttctagctcttgatgcacatatacgctcctccagtctccacagtcataaggctagtttttcctttgggaaatctaccccctgcagatctttctcatttgggagatcaaagcgaacttttcatggatcatgggcctatttgttatttccaaacacagtcgtgggattttcctttggggcaggcctctctagagggtatatggtgggactaggctccctattcttttatttttggccttattcgggttgagagggcttttccccagtcttttcttgtacaaacaaaactatagttggatccacttagatgcccgcattttccgttgctctttttatggcaatcaatatttcttgcattctcttttttgctttttttgttctaccaactcagcctcatggtcatcaaccttttgccttagctgaactagctatgtatagttgtattcatcgtattcttcctactcttcttggtttgtatcgtcggggtcatcggtatttcctcctccttcaacatccaccctagtcgctacctcttcttcttttaggtcgttaggttgttggggacgtgaaatgttccttgtcatcaccactgtaccatgaggttattaatgatcttgtttttaggcaagcttcctacaactttcatttcattgaaagcacaaaaatattgaccaaaattttcaacaatcaataattagagttgtgtgaattaataaatgaatgttagaagagataatttttacgtagttggggcattaatgaaccttagtccacaagtcactatattaatgagagtgtttattacaaaatatttttcaactgatcccctttttatacatcattagggtatttataggctcattatggtgaaaaggccgctattgttgtgtttgtatgaactatgctttgcacagtttcctaaatttgatcttagggcatgattgcctacttttataatgtatttgggttgtctatagacgtttggtgggatttgacttatcccttatttatgacttgacaactcatttatgcaacaatcaatgtcaattgatgtatagggtctcgtaaaatcaaaaaattatgggtttaaacccttaaacacgtatcttcagtgtaagttgtcagatgattttccctatagtcgcattaattgtgtgcacaatatttttttcctcaagtagtgtgcttaactccgtcagtcctcccgtgcccttcttcgggtcaatttcacttgcgaagaagaaaatataagggatatcctttatccaactagaccctcccagaaatgactaatttgtaattacttatttggaataatagactccgagagtaattaagttagtgtgtcattgttttattgtatttatggacatttgaccgaattcttaacctaattatacttattttagagaaaagtatggacacacttgtattagattttttacttaaaaaaatgatgtagtgacagtaggagctccactagtcctttgaaattgcattgtgttcaagaaatagtgaggttgatatagaacatgttgggttgatatagctagctcaaagtgtaaaagagcaggcatggacttataatctttctttcagtgtatgaatataatgtttactgtaacatcctcattttgattggatttgtacttttgtaggcatctcattttgatttattatttgcaggcttgcaagcattgtttcattatagtgatgcaaggatggcatcttcagatatacatggctagattagagagcatacccaaatatattttgagctatgcagattataattcaaaatgaagagcttggaagacttctttgaagaaatgaaagaaattggagaagaaataaaatttgtataatacatttagtatttggttttagttttttttttttttttgtaaatataataaatttatgtgtttattggggatgttttgtatacatatgacattttattgtaatgttaatctgtttaaattaatgaaaatatttataaattttattttatgaatatgtcgacaattataaatttttaaaaattccattttctaaaatatcatctagtacatttttctaaattatattaaaattaattttttaatttaataaataaataatatataatttaataatattttaaaatattttttaattatttttagtgacattttttcaaatgacaccaaagagattatagtaacatttgtatctttgctcacgcgggtctattttacatttttaaaaaatatcactaaatccataaatgttactaaaattaagcaataataacatttctaaatgttactaaatccctattttggtgtagtattacatctacttaataataatttatttaaaagaaaaaaaaaaaaaacagtaccaatgccactatttggcatcaatctaaaattttaaaatgacatttatttctttccaatagtacctttatattttgccaattaaattattcacctcaacaagcattctccaatttttttagcatctctaatgaaaatacacatattatcctaatatatatatatatatattattttctctcccattcaaacacatttttttacaaaaattactacaataataaacaactctaaaaattatccaccataattcagtatactattttttaattaaattttataattatatatactctttactaataaagtaactttaaaagaaaaaattaaataatgtcacatcacccttgcttattttaaacaataatattaataaaattaatttaaaatattaattaaaatacacatgtaatgtaacaaagatcactccataaattcaattgtgcttttagttttggtatgcatatgacatggtttcatgatggaattgctatttccaagtgtcaattgggctccaccagtgctgaaatggaggctggggtccatgaagaaagtatatttagataaatatacaataataattaaataaaaaaaaataaagaggtcataatcaagagaagaaggaatgcattttcaattataactaaccccaaaaaaacaatctttgatcaagatggtccaactaaaccaacccaactcattatatgtcaacttcaattaacaaaattcaagtgtagtggacgcaaagaaaaacacaaaagattaattttctccaacatgattttattaacaacccttttcttaacatcatgaaaaagcaaaaatcaaatgaaacaaatgccattagcaacaaacccctcttttatttaaaaggggacactcttgtcaccttctttacaatcattccttctttgttttctttttggttctctattaatagtttgtgctcttcaagtgtttgacaaaattttctacactaaacttcttagcaaaaataatggacggagaatatcatcaacaccaagagcatgagcaagagggcaacctagttgtcattgggcgcgccgagattgacactagagcgcctttcaagtctgttagagaagcagttgctctatttggagaaaaagttttagttggtgaaatatatgcaaacaaactcaaagaggtttatttttcttttcttttatcttcatttgtgtttgaaagttcaaattgggatattttcattttcaacactaggaatatttgacatgaaaatgtacaagtcaagtaggacaaatatgttgaattgattttctcatatttgtaatttgtaatgggttttttatgcatggaaaaaaaatgatactaacaactatttattgtaatggaaataatatgcaattttgatgtgtgtagattaaagccgaggaagctgagaaaggaaatggtcaatcaagaattggagctttaacattagagcttgagaacacaaaacaaagtcttgaaaaagctaaagaagagaccaatttaatggcatattgcataaacacattaagagaagagttacaagaagcaaaaagagaactacaaaagttaaaggcagttaatcctgacattgaagatctcaaattcatagaaaccccgaaaagaatcgaaatcaaaaccgaaaagagtgaagatgatgatgatgatgatgatgatggtaagggatattttgatcataataggaagagaaatgtgaagtttgcaagtccaccttcactagctcaagttattgttaaaagtaatgagtttggtggtgatagaagatctccttctatgaagaagaataagagaaagccattagtgcctataattggatggttgtttcacaacaagaaaaagggtattcaagagattgatcaaacttctacacttgatgctcgttgttgatattgatatatcattttgtgcacaaacacaaaagttttagtgtctttttttatttttggtttgaagagagaatgaaaagaagagctcttttcattttcacataaggagtttttttacacttgcc

SEQ ID NO: 186566 - DNA, 1623 bp, Cannabis indica
taaatttaaaaaatttaaaaatcatttggggaaataacttgtcgcacaagttagtaggccaaacttcgtacttaaaactttttgaagtataaacttgaaaatcactgtacaagaataagaaatgtaaataaaccttcatgaagtcttctcttgagttccttaagtctttgagttcacctcgaatcacttttgagaattttggtaaacttaccatttttttatgagctagatgaatttcattactccaaaaacgatttttacaaactaaaaagactaaataaatagcctcaagaactaaaattctatacatacagtttactaatgtatctcttttctctcttttttacaaagcctcaaaccacattacctcttccttagttatctttttagaaccaagacatgaaattctatctttcgtaatccccttaactctatacactaactgttcagccatctgctctttcaccagccaaaccttttcatttcttgccacccaaatactgtatagaatacatgctaaggctgctgacaaaacctacttcttgaacttccctatttttgctttctcaatccatattagtagcctttgtaatgaatttgtacaagctttccattgcagccacttctttacctggtccaagcaatctcgactgtagtcacactcaaaaaatagatgttgaagcaattcttcatgtgtgccacacaatacacaagtggagctatcaagtatgtggaatcgatataatctatctctttgttttaacctgttttgcacagcaatccacataacaaaacaatgcttaggcaaactatatcgacaccatacttcgttacaccatctaaccttttcctaaggagccgaagcatcttgtagccatcgataatttgatacttttgtgcagtgaactgcattggatcaatgatttgagtaactttgtttttaacctccacaatttttctccagtaccagctactttgagcattagctttatattgccaccaatttccatcttgtaaatagacattgttgaaccactttagccacaaactatcttttttggaagttatagcccataaatatttcatcatagctgatgtgttccatgttgaaatgtccttgaatccgatcccccaagtggatttagtttgacatagtgtgttctaagccactactcctagacccgaggctgcaacttgccctttccataagtaagcttggcgaatactctctaattctacaatgatcttttttggtaatatcataatttgacttccagtatttgtgaatttccattaggaccgagttgactaagactgcacatcctacgaatgataaattctcggtactccatggtctaaatctgctagtcattttcttagtaagagatttgcattctgttgttcatattttctttgcacatattggaatattgagatacttgaacgacacctcactcctacaaaaaccaaacacatctatgattctttgacactctttttcctctattccactatagtagtgctgatttggctttatttggctgaagccctaaactatatgagaatagtttaaggccttgtaaaatataatagatgtttataaaatctgttggaaattatttt

SEQ ID NO: 186567 - DNA, 4662 bp, Cannabis indica
tttttttttattattattagtaagtaatgaaatccataagattagcaataaaagaaagaaaaaaagagacaaaggttgccgagttgcagacaagtgaacagcgtgtctagtagtttgattcatcatcatcatcgtattcgtattcataatcgtaagtaaagtgtgtctattccccaatacacgtccacttaaacacctgtactgttctgttctgttctgccttttgttctttttcgttacattcgaaaatcccaaacatttttcaagtcccatttattaaattaataaatttgcctttacaacattacatctcatcagtcatcttaatattaataaaccccaccacggaggtagatagatagagacccataatacacccgttaatacagaaagtgagaaactgttgaaaggcatggacgtttttgagttatttcaacccaaaaccaaaagtcttgttctttccttccacctttctccgatccattaattaaacaacagccttttgtccatttgtagctctgggggtttgcaaatattggtaaagttatttcctttttgagactaatagtaaggttgttgaggtttggctggagatgaaggagcccgaggaagaagaacagcctgcgttcgagattggggtagtgattccgaagaggaatgtgaaggcagaggatttgaattctgattgtgtggaggttcttgtacgtgaatttaggaaactgggtcttatagttgagagagtcattggggttgctgatgagtttctcaaggtttttattattctcaattcctttctttctccattaaagcattttcctttttcttcatggaatggaatattcacttgtgatatatataaatgttttccctttattgatttaataaattttctaaaggaacatattatgctttcgtaattggctaacggtaaagtttctaaattttaacccaattattttagttagctgcgcctttggagactttggggagagcggcagtcagtttgcaaataaagaaacgaacccatattggtaatgattaacatagcatacaaagatcatctcaactcttttatacatgtactatgttgttacaattttaaaaatttgtcctgttatacctttcaatttgcataatattataggaaatatgtgaagaagtttatccaatacctgatttcaggagtggatttgcaatttgaatgggaagagtttgaagcttttgtgagacaacctgatggttcattgttcagttggagtgagcggtttcactgctatcagcacttaatttatagaattgtaagtcattcaatcatccttagtatgaaaaatactcatttaccttcagtattatagagtttgatctgctccatctttgtattttaatcaatatagaatcattcaatgatccttctttcatatgaagacatccattatttattaactaatcaccatcattactttagacatggttattcttctccttattgccaccttttggtgtgatgtatctaataattgagctttagatggtgactaatcaatacttactaactttaacttgaatcctttaatgatgattagatgttttccatgttgtcattgaatctgacataatttgaaacattgaattgttatgactgtcatattatgtatttgtatgcatacttttgtctatgatcaataaaatcctatcaaggtagaagtacaaatttaatatgagcttctcttctatttgcaaattctacaaaatgtttaacaggagaataagagccagtcagctataatactaaaacatgatggtaaggaattacagtgggaaatcggggaatgtttgctgcagaagttgaagtcggagagcattgttaaagatgtctttccattgcatggtaagcattatcctttaagctatgcatgcatattcgatatcaacttaactgaaaatgagtgaattttttggttcatagatgaaataaagagaaagaaactcattcacagttgggccttacattggcgggacttcacaaggcagccgatagatgagatttactcgtattatgggacaaaggttagtaattatgtagtaaattattatgagcagattattgaggtacttgtttgcgtaacatctgaacaacgggaattttttcacagattgcagtctattttgctttccttggaatgtatacaagatggttgctgtttccagctttctttggtcttacgttgcagatcattgatttcgggtaattctgctagtctacttcttaatatcctatggactgttatcacatatttgtgcatctggtgtgatatttatctgtaagaatggtttcttgctctcttaggtcattgcagttactggtgcttcccattttcttcataagcattatactatgggcaatcatgttttcccagttctggaaacgtaaaaatgctgccctactggccaggtatattttttgggtgaaccgcctttccatacatttcagtttactttgtcttatatttatataatgttttcctttcatttcttattgtccctattggtttgggtgttgtagatggcaaattagttatccgattggagctgatgatggatgtaaaattttgggcatggagtggggttccttacagtcacctatagaaattataagaaaatggggaactgacaacacaaaagagaaagaagttttccaaaggaatgagtggtttggacgaataaagagattcagaaatgatgccttcgtaatcttaagtattatatgcctccaattgccatttgaactggcctatgctcatacttacgaggttatggagtctgatcttttgaagtaaggaaccaggttatcttggcaatgttttcgtttcatactttccaaatcaacattcaatatttctatttcatcagtttaggctcttcgttcacagagatggactaagttgcttctttgttgcattctaagaattagtgcatataacattctttgtttcggctgtgttgattcttatctgtgtcacgagaattgacgtttcgattccctttgttttcagatttgggcttacaactatttatctttttgccattcaatatgttacacaaatcggcggtaagatctctgtcaagctcattatgcatgaaaacaatgaaaacactgaaaaaagagctgacagcttagtgtacaaggtatttaacagaaagtcgggttttcctcctccataaacaatcattttcatatacttaacaggcctagtttccttgcaggtttttggtctgtattttatgcagtcatatattggtattttctatcacgcgctactccaccgcagtttcttaactctccgccaagtcttgatacagcgcctccttgtgtctgaggtaaactacatagatagattttcctcttccttttctttcttcttcgcattcctttactaatgtgcttgaaatatcttttactaggtgttggaaaacctgttggagaattctttaccttatcttaaatatagttataagaaatatagaatcaggtaagctttctatttgactatcctcctggtacttctacattgttggttgtaactttctttgcctaaacttcagctgatgagtatattatgtattttttaaattgtttcgtatctagacgcaagaaaaaacaagagaagggatcaccatgtgggaagattctattttcttccagagtagagaaagagtatttgaaaccttcttattctgcaagcataggcgacgagcttgaagatggactctttgatggtgaaattcagaaatcatcttaatacattctaatataatgctaatcttggttcttatatttctaagagtatgattcctataggtagaggggtgttcatgtcactttcagaaaacaagctttcttggagttagcaactgagataataatcagcaaattcttatccttaattttattgtatgataatgtggatcctgggtgtaatatgaaaattaggaatttcatgggataattggatacgtgttttgactaatcagatccttgaaccacttgcagactttttggagttggcattgcagtttggactgatcatgatgtttgcttgtgcatttccactgacatttgcctttgcttttctggtatacaattatcttaataacacttgtatcaccgctcaatctggttcttgttaaattttgttttctgaaactccactccttgcagaacaacatcactgaaatcagaacagatgcagtaaaactacttaccatgtttaggaggcctgttcctcgtgctgctgtgactgttggagcttggctgaacattttccaggtacttggcccaaaataagatattctacatggctagtatgtgtagatgtttccattgtcgtcacattacaaggttctgaactgcatatatttcattttttcacgttagtataattgtcttgacaaatgtgaggatgctatcatgctatccaattttcagtttctggttgtgatgtcaatatgcaccaattgcgcacttttagcatggttatacgatcaggaaggaaaatggaaaatagaacccggacttgctgctatccttatcatggaacatgttctcctcctgataaagtttggattttctcgttttgttcctgaggtgacttttctcctctt

SEQ ID NO: 186568 - DNA, 3805 bp, Cannabis indica
gagagagagagagagagtgaacagggcttggttgtcttaaatgagggtcgcgtagcagagaaagagagagagagagtgaaagggtgcagttgccatggcggcgttgcagagctctaattccgtgccattattgattccaacaacgaaagagtagaattgaacacacaaagacccaatttgctaaacaaacagtactgctctttcatctctcattttcttattttattaattaaagaactttttttttctttcgtgtgttattgttttctttcttccttccttttctctttctcttcttctgaaatttggtgtcaaaaagctgcaaaagctccaacaacaagatcgataggagagtcagactactacgtctcgacccagaatcagaatccccaaaatcaggtcaaaaccagaacattatatacacaccgttagtgctattcacttattactttctatacttacttactactactactactgtgtaacactattacactatatatcacacacacactacatacttaactcgcgaaaacccggagatcttgatcacttttatttaattttgtcctttatttcatttcattttattttatgtacttcattttaatatatatatattaaaaaataaaaaggacagtaagagagtagcactacttctactactactactactaaacagcttgaggtaattgtactgatatggattttgaccctaaattgaggttagtattgggttttgggtgcaagaaattatggctgggttcttttgcctaggcggaccaagagatcatcatcatcatcctcatcaacaatcatcaaccccaagcagcaaacaagaggatcaacaagatcaagtggaaagagaacgaaaccttttcctttacagatcagcaactgattcagagatctgcaccaacaacaataagcagcagggtggtggtagttttgagatatggccacaccatcatcagcatcaacagcctcagaatttcaacaactacgttctctcctttggctcaagtcctagccgagctaacaacaacaacagcagtagtagtactagaaacctaaacgacgtcgtttctggggatgacccaactagattggggttcacagttatgaggccaggaggaatagtaggtggtggaagtggttcggctggaggtatgaattgtcaagactgtgggaaccaagctaagaaagattgtatccatttgaggtgccgtacttgttgcaagagccgagggtttcattgtcaaacccacgttaagagcacctgggttccggctgctaaacgccgagagcgacagcaacaactcacggctttacaacttcaacaacaagaccaacagtttcgagttcttgacaactcaaaaaggcacagggacaatcaaggagcctctgctgctctaattccttgcactaatactactactactactactcgtttaccttccactacgtcaggtaattaattattgttaaacttgttgtttacaatacaaacaataaataataataataattaatattattgattttattcagcttctactactactactactactacttcttcttcttcttcttctgaatttctggactttttctaaacaaaaagaaaaaaagagaaaaataagaaaatatatatcgtttgcatgtgagaaagtccacctccatagtttcccacttgactttgctttttatcatataattttagtttttttattctttttttttctacaactgtttgtcggtaaaactgacgaaaaagtactagtatgaaaattggtttatatatgtgtgtatgcatagatctaatgatgatgagagcttactacatgtacatataaatatagagttaagtgtaataatagcacgaaaaattggttaattaatatttttcttttctttcttaatgattttttttttggattaattagggttggaacttggaggagcatttcctgccgaggtgaactcttcagctgttttcagatgcgtgaaagtcagtggaatggacgatgtagatgagaactacgcgtatcagacggctgtgaacattggagggcatgttttcaaagggattctgtatgaccatggtcccgaagctcattacaccggaggaggagatggctcatctggccggggaggcggaaacggagaagacaatactactcatcctcatcatcaacaccttcatcttataacagcaggaacagcctctgtctccgccgccagtacagccggcggtaacccatctatttcgttacttgacccttcaatgtacccaactccactcaacgcttttatggccggtacgcaattcttcccaccccgaggtcttaaacaaaaacaaaacaaagagaaaagaaaaaaaaaaaaaaagaacaaaaaaaggtctctcagtttcatcatttatcccctagctagccttaaggggaaaaaaaacacttgatttgtcggctactgatgatctctcactattattattattattatttagtattcttattctggtttctttaagttttcttaaacatgcactgaagtagaagaaggcctatataggatgtgtactagagaatagctaggttgttgatgaggagaagaatatatctattgtctggatatttggcctaattgttttaaaatttcaattcagattttcattatggttataatatatatcttctatcgatgaccccattctcagttttagataaatctttctattttattaattaaatgttatgatgatgatgatgatggtgaggaggacacacgaaattttttagttttgtttcttattgtttgttttatctatgttatctgatttgttagattatataaatatataattattttcttatctgggtccatattaaatacactttctggttggtgctgaactcgaagctgctttttcctgtttatccgattacttgccggatgaaattatggaatgagtaggtttcgtttcgtgtttggttaagcaaagaatttataatgaattttatttatatatatacctcagaaaaatgttcttcaataataaataataataataataatatatttagtaggtgtgtctcgtttctgtgtgaagatatgaaactcgatcaactcttggttttgttaagataaaacatttactgtacaccacaaatccattacaaaatattggcaaagtagtagtagatcgccaatgggcattgtctgaacatctcagtctaaaaagtgaaataaaagtttgaaagaaccttctcagtataccactctttcttttttctgaataaacctatttagttacgtaaatgcataatcataaatagcattcatgccaactacttatctgcattctgcaacacacaataaaatttagtattcgaatggacatgcatggatgtgaccctaaagagtgtttagccataagatgatccctatgcactttgaaatattcatatcatcatgtgctatactctcctctattaatatttgtcaaaacaaaaatatatacagattaattattatatataaatatattattatatctgtttatacacatataggatgatgaggaccggcctagtgtacctaaactaatactgatcccttatagcataataagatcgatataatggtttccattatagattaccggatttggtacatatatgaaataatacgataaggggccataagaacctaggttactttgtttcgtaacatttgatcccaagggtatcaacatgtgcaatctttctgtatttgtggttctcttggtgatattcatttattg

SEQ ID NO: 186569 - DNA, 1105 bp, Cannabis indica
aaaacattatatatccttgtatatatatatggagccacttagtacttaccctcctaagtagaactcctcgcctaaggcaagggaggccatgatagcgacaactagggtctgaacaggttgatacacagccacgaacacagggcctcctctgtcgatacaccatatctgtacagcgaacgcaatccctgatgccaccactccctgcaaatattaatccaataaattaacaacaagttcttttgtcatttgattatacataaagagttaaaactaaagatttaatgaacataaacaaaaaggttaaattataatattaattgtaggtaccaactctctatgtatcaactagatatgtcctactactaataaactggttagttttactgttaaagtgaaacccccttttgtttatgacctggctatctgctgataataacaaagttagcagaccacatcattacacacatatatatagtttatactttttcagatctaatattcattaggtattataaagtcttaaattgacatttttgagataattagtaattatagttaatgttttcctttaggtaaaagctgattctgataaagagcaacactccactcatcatggctttactctctcatcatattattatttatacaagtataaaagtaggttttcttaattattagtcaaattgacccgtgcttcagctggagtactagtaattataaataataataagtaaaatagtattattattattattattaccgcgtagaagatggtgaaaacttctccaccagagtgaaaaatccaggcctgagcgtctctctcaacaatggcagcaataatcacgaactgaataagaccataaaaacaagtccaagacgtaactgagagacgagctgggtacttcttcaaaacaggggcttgcaaaacaagccaacctgaccacgaaaggcagtgaccaataaggtaaacgcaacccaaggtccagctcttgccgttcgcaccaatatcaccacctccaacaactggaacagagtagtgttgtagtaatggtggagatgggctgtagattgttggacccttgtataatgttatgactgaggctcc

SEQ ID NO: 186570 - DNA, 2423 bp, Cannabis indica
tgggtttctgacatttttgctttagcaatgattttgttctttttggacacaccctttctgatataaagattagttttgtgaaattgggacgtgggttttctagctactgcattttaaggattggttatttggttaggttaaagtaatagctttgataagtttatccttaggagtgagatgattcttttgggtgattgaaacttgttttaaggattagggaatctgaacactttatttgttgttttttattgggtaaatatatatatatatatatatatatatttcttgggctttcttattatcatataagatttcattatggtgaattctaatttttaaaatgccattttgttcaatctcatatgcatgtggtttgaaatggcttgggttgttaataactaatggaatcaattgtcatcaggagaagtgattgaaggtgatgcaatattaaagggagacaaactcattttaagaggcttgatgttccatggttatcatggggtgaaacctgaagaaaataaattgggccagaaatttttggttgatattgatgcttggttggatctccgctctgctggtgcatctgataatctatcagatacaatcagttatactgatatttatcggtgagtaattagtttaagtcttctagtttcatatggaatttgtaacacttcaacttgtcaaacctttatatgtgaatgattcttatgattaaccaacttcatgtcccaaagaataaagttaagcaagatggttttcatgtatgagcttttgtgatgatttttatgtttggctagcttgttggggtttggagattttgaatacaacctggtactgacctcttctcaaattagtggctcggctaactgcaatctctgctgatttgtaattattgtcatatttctcttagtttggctttgtgatctttgtaatgatagattttggtttgctggttttgacttggtataacacacagcatagcgaaagaaatcgttgaaggacaacatcataatcttctggaatcagttgctcaacgcattgcatcaactaccctaacaaaacatccccagatttctgctgttcgtgtgaagcttgggaagcctcatgttgctgtgattagtcctattgactacttgggtgttgagattctaagatacagaagtattgatgtaccaaagtaagatacatatctgatttgcatacccatatacacttttgagaaaatggtgttgtcttgttttttattcttgttattgttcatgaattggaatttatagtcatcattgagttcatgatttcattctgctgttcatgttttacactttcttggatacttccaatgcaaatcaatggaagaaagcaaaaacaaacagaccgaacaaaacagctatagtatttattaaaataagtcttttgttgatgcaagcaatttattcttgtaataagttgggcaaataaggttatcagcaaaagaggtttttgggggtgtattttggaactcaaggaatatggtacctaagtagtatccattacaactccattcaagttccagaaattgttgtttaattatcggtgtaacaccatgcatgtcgataagcatgtatgctgtattgagcggtgtaactgtaaacacatgctcaaaaaagaacctatgaaatccgagttgaaaagggtgaagctttttcgatcttttgtcattggcagcgttttgcaagcgcattctttctgctgctcctaccatcatctgtttcctgctttcgacagtaaaatttcaattaacagaaacaagaaaggaatgtcattagtctttaacaattgtacaaaacctttttattagaatgtgaaagagtgaggaaggtggctcatccgctcattcatattcataccactccttaagattctcggagcaatcatgagagtatgttatgtactaactaattaggctctctcagattcttaatattgtctataaacttaaactaaacaattaattgatacaaacagagataaacaaataaaaggaatagctttataggataaattccttaaattaacaaagaaaatgacataataaaaatatgataacaaaatgacagctgtgggatttgaacccacgccctttcggaccagagcctaaatctggcgccttagaccactcggccaaactgtccgtgtttagaaagggcgttcttttacttactaatcttttctaagcttatttatataagccctgttgtggttaaatttggccaaaacaataacaggataaaagtaatcaaatggtttgttttcctttattcttaggattaaaattgaaaatgtaaaatctactaaagacaatgctataatacatacatattcctacaaaattaaaatattagttcggaactattctattcgtttgaacatattttttttcg

SEQ ID NO: 186571 - DNA, 1797 bp, Cannabis indica
agagagaatttaggatctgatttggggtggtgtttaggttgttttcctcctactttggggtggtgttttacatggtgtttggcctttcctttttttggtttaaggtggtgttttacattgtgtttggcttatttttcttttgctttgaggtggtgttttagctactttttggcctgttatttttcttgtttggggagttgattgggatactgtttgggttgtttattctgtagttttggattatgttttggaaggagtttgggatctggtttagggttgagttttggaaggtgtatgggatttgtttttggctactgtttggcttgattttttttctgtggttttggattgcattttggaaagagtttgggatctagtttggagttgagttttgaaaggtgtatgggacctgttttggactactgtttggcctctcttttctttggttttggatggagttcgtaatctgttttgggctattgtgtggggttgtgtttgggcttccgttggttgtatattggttatgaatgggccttactcaaagtggtttaggttgattcattatgtgtatctgttgggccttcttcttcatgatcaaaatcaacatctaggcccccaaagacatcttcaatatcctcaacattctctaaaatttgaacacttgaatcactatcactaagtagcgttcaacatttggcatgtcaacatctgacatgtacataataaactcatctgaatgaccactatcatgttctaagtaatctatcaattcctcctcaagatccctaattgctaccttgctcataacatagtcttctggtttgacacttactcgagcatcaacacttacatttgtatcatctggtaactcctctattatgcatcttttcaacttagatccaactggtgtattgtctactgttatcttaggaactcgaccaccaacaattgataattcaacattgtttactctaaaagtaccagataaatcaacatagacctcaaccctcttatatatcttccttctcatgtccttaaacatagccaacaagtcattgtcagtcttaagctcaaacccattatttagttgtttgtctttaggcttaaactaaaaatgaacaaaaccatggcaccactgaatctccaacaaaaatcctttcagttccatcagattaaacatatcactgtggcacctgtcgaactcgatcacagtgccaccctcatattgttttaagttatttttattgagccattaacccccatggtgcatatttatactaaaatataaacatgtcaacaacaaaataacaaaaatttacaataaaataatgaaagtaattgtcataaagcttaaaactatgtgcaaagattctcacatgccagtcaaagcctatacctcaaaagaaatagtaactttgtcatgccccaacaatctcaagagatcaaataaatgtgtacaactaccacagtacattcaatccaatataattataaaactccaaaagtaaaaacaattttcattcaatcaaagagagataaaaagataaagagacagtgaaaacacaaaaactattttcattaaatagaaagaaaaaaagtaaaaaccattttatcaaaatagaaaaaaaataagagtaaaaaccattttattaaaatagaaaggaaaaaaataagagtaaaaccaatttctttcattgtaaatacaaataaagtaatcgaaaatcaagaagaagagaagtacaaactgtaacaacatacgtcggcgtccatttttcgtactagtttctaggactccac

SEQ ID NO: 186572 - DNA, 1075 bp, Cannabis indica
ctttgtgaatggtcacacttcagcctcttcaactcactattaaatgtcagttctcattgtgacaattttaaaacacattttatgggagatcatgttgacggttgcactccccccataatttcactttttgctctttttatttccccgtgatgattttattaggaattaatttcccatttaattaattttgggagaaaatcaaataaatgaggcctatataaaggcctttcttcttcttgaatccctcatttttgttttttcttccagaaaagattctagagaaaaataagaaaaacttcaagaaactcaaagcttttcctcgtgttcttcctttgtcttccactgcataagggaaaaccaacagtcgtcttcatcaacgtccaggctttgccccaagattcacctagtgagtaagttcctttaaccttctttttttctttaaaagatctgtgttttttattttacactatttttggaggttaaaaagcctacatgccttgggtttagggaaacccaaccactacagttgcccaggtatgttaggataggttaatgtagggttttagctgaaaaggttgaatcttgactttgtttcccacatttttgattatgggtcttgaagaacacaaagaaccacggtttatggcttctttttgtagaattatcttaaatctcttagggaacctggccggcctattcgaggtgtttttgtcgctagccgactgattatatgttgcccatatggtctttatgttgtctagatgtttacctccctttccctctttgcacagatgaacctgcgcgactattggtgaggtgaacactggatagacgtagatcttctcaaccttctctttaaagatcatctcgcactccacgcaaatggttcttcatctagtgattctccaaacagctcttcaagcagtttttttgacttagaagtcaacggtggttctcctgaataagaaatccaacaccaccaccacactgaatggattggaagagaaaactatggtcgatccatttgggagctaaactggggttggaaaaaatttcttctagcttcttggacata

SEQ ID NO: 186573 - DNA, 3544 bp, Cannabis indica
ttttttttaaaaaaaaaaaaaaaatttaattcatgtgctcctatgtctattgctatctaagtataatttcactacctactgtgatttatagaaagacaagggcttttagttgaagctttgaccagtttcattgatcactaacaaacaattttttgggtttcaactgaattacttacaccttaccatgggatctttgggtgggatgatgagcggtactttacattcattatatgcaaataaagtgcatttaccaatctcttctactgtgaaggtaacttgggaaggcatcttagtaatcgacatcctggatatgataaatcaggcgaagttgccacgaattccacgcttccacctgtaactgtagtgaagaaaccacaatctcaagggaaaacatcacaagtggactatgatcatttaaattggttgctcgttaagtggcttgttttagcatctctgcctccttcgacgttggaagaaaaatggctggcaaactcttacaagtttttgaatccagcaattcaactttggccagctgacaagtataaaacagtatttcatgatgtcttcagaagcatgcaggaagatattagagcatctttggtgcatgtttcttctaaggtctccatcacacttgatttctggacttcgtatgagcagatatcttatatgagtgtaacatgtcagtggattgacgagtattggaccttccagaaggtattacttgatatatgtcatataccatatccttgtggtggtgcggagatctatcactctctagtgaagatccttgagatgtacaacattgaaaacagagtcctttcatgtactcatgataacagtcaaaatgccatccatgcttgtcatagattgaaagagagcttagatagtaaaaagatgggatcattctgttttatcccttgtgcagctcgtactttgaacttgatcatcgatgatggattgagaacagtaaaaaccaataaatctcaaagattcgtgagttcgtacttgggtttaaatagcatctgcagagctttctgacgagtttagtagattaagcaatagcttgtcaagaaaccagttggaaacctcccctagatgcttcaacaagatggagtggaaattatcagatgcttgatattgtcagaaaggtatttgctgttgtgctctaaccactatgcactcttgctttaagacacgctgattcgtataagatcattttgcaccatacatgctttcgtcttttttgcattcgttgacaataccaatgaaattgctgagttggcaatgatgatttctagttgttgcacggctaatatttgaaattttgggatttgtaaattgaaaaatctaattgtaaaattgtactgactaaagatgacctggggttttacttaggctgggaagtccatggatgcacttatcaggaagtacgataatacgctaggcagcaggttgttactgacccctgccgagaaaaatgcagccagcattgtccatgatcatctggaacctttctacaaaaccaccaacaacatgtgcatgaacaaggtactcacaatcgggctgattcttttcttcatggatcacatttctgagacgattgcagcatgtagagaagttcgtcactatccagactggctaaagaattctgccgaagaaatggccaagaaagctaggaattttaataaccaggtgtgtaatatatttacttatatgagtgcaattcttgaccctcgaatcaaaggagagctaattgcggagagcctcaactcggagaattttcttgaggaagcgagaaaccatttcattagaaattattctaccagccatttcccatccatgactggtggatacggtgctcaagagatagaagatggaggcagtgtctcttttgcagaagaaattgcacgaaagaaacggagagcaagtatgagcaatagtgtcacagatgagctcactcagtatctatctgagccgccagcaccaataccaacggacgtcttggattggtggaaaggcaacagtgcgcgataccctcgactctctgtgatggctagagattttttggcaatacaaccgacttcattggcggcagaagaaatcttttgtggcaaaggtgatgagattgacaagcagagactttgtatgcctcatgatagcacacaagctcttctttgcatcagatcgtggattttagctgggatgagattgaaggtcaagtctactgaaatagactatgagagattaatggaattggcagcatctgctgctacaacagctgataacactacttctgcctctgataagaaacagaagtaattaacaagtttctttattactttgaggccataagaggccaaggtgatatttgtcatattcggttgacttccagctgggaagctcaattagttaaatcgtttcataaggttgtatttaacaggtaatatttaagtgtcaatgtacatatcagcgatgaggcaaagtcgtaggttaattttatctcctgatttgaagttttgaacttaagtgcaacacattatttgtttcttgagcaaaacacaagctttttaacatctcaacattcccacaagtggaaagtgagggattagttagattttacgaccagctctacaaacataaaatgcatatgtatggaatcatttatcgggcataagaatttacacaaataaacccttggaaacaagggcataaaaaaaaaatcactatataacatacaaagttgatgattgatacagtattgcttgcttccaagggtttatgtaacaagcataaaagacatactttattcatcctaaactgattaatatgtattccagaaatgatcttttccatcctataccagaaattcttgttcaaaacttgcaaatgaagaaaaagaaaagtaacccagctatttgacatttggataataccagccatgttctagggcaaagaatcattagaggaggtctcaggcattgtagtaacaatttctgaagttacatggttatctcttgcatgacagtaaaacctggatgacgaattacttgtatcttaatcatgtaaaaatcttgtctaccctgttctctacaaccatagttctggtctccaatacttgagcttgtgcactataacaggtacacttgtgggaggaatctacagtacaacaaaaagaaacagtaaggaccagtaagttgatgctcttatgctgtgtacctaagatgaccgcttaaacaaacagcttaaacaaacatcggaaaatatgactatgtaaaattgtagtgtgcatccgtcgaatgaaatgctgcatttaataaatagtatgtgtcagaaagcatcagtgattagaaatgaattgctaagactcgctatcaaagataaattcgtcataattcgtttacattatgatgagatgcttcaggttttcactataaacgaataaaaaacaagcaaagaaatcactagcagacttttcattagtttgaaatgttcactaaataataattcaaaagttacacctggatgatggtttcaatcatctaaa

SEQ ID NO: 186574 - DNA, 2618 bp, Cannabis indica
ttttcattccttccaacgaaacgccttatagtatagtactcttcaaaaatattatataattataatatctcacattattatttaatatatatcttaatatttaagaacaataactttttagttttaattttttattaaaaaaataaataaatagcatcaatattactgtataacgttcatgtaaatttttaaaataacatccatctctctctaatatggtataacatcttaatatttttccaactaatatgttcacctcagtaagcatcctttaaatttttactattaaagatattttaaacaccactggtaatttttagcatttttctagttaaaattgtacgtgtggcttaatgagtttgattaagaacttgtttgaaatgtgcagaccgacgatattcattgaaataatacagagagttgggtgcatggtgaaggatgataaaggcaagctttaccaaaaaggtggttgtggaggcttcggaaaaggcaatatctcagagctctttaagtgcgtcgaggagtatgagaagacattacttaaaaccaaagtggttacctaatcactctatttattaattccataataaattctcaatttgcttgctataaaagtaaggtttattatgtatatctagctagtatgatgatggtgctgtctttcttggaataattcaaacatatatataatgattgaggtgttgttgttgtacctaattatttgttgttgtttttgtattataaacatctcaatcctaataaataattgttatctaaaattaatggagaggggaaggagctagagacccaaattacttgtctttttgttcatgttttaaacatttctgccaactcttattgtcttattatatattgtcatcttattatccaaaagctttcaaataaaataggactgttattacttcagatttatgcatgaaaataatgacactgagtcactgacaagttgaacatgggtgagaataggtaagggtggcatttggtgtcggtgttgagctaagttcttaaatttattaaaaaactataccaactcatcaatcgagtacacgtgattcgtgtcatgaaaaataaatacagataccaacaagtcttgcatgttgtgtcaaactcacaaaatctaatatatggtgctgaggtgttgtgagatatttattaatttttttagtgtcattgtgtcctgtgagattttcaaatttattttactaaaaattaattgataaaacgctaacaccaattattattaaaggttatcattttatcaatattgataatgagcagcatcaagaatacatgaagagtttaatatccattgtcaggacactgaatctaatgattctcttagaaagagcactttagttaaatcatatataagcaaacttattacccagttccagcccatataaatatatataaatagaaaataactaattaactttgatataaattaaattatctctttaaattttttctatcctattaaaattattagatttaaggacttacatccaattttcttaaattttactaataaaatattagtgtgttgattgtttatggttaagccaccgtaggaggcagataaaaaacccctgaactttaacatgtataaaatcgtgttttttaaactttagcacgtactaaattatacctttaatttgaacttcaatctacgtcaagtgtgcgttacttaaattaaacgaaaattatttagtccaacaatctcaatgataatttaagagaaatttttaactacctaagaagttcgagaaacatgaattaatacattaaagttcaagaaagaaaaaacctaatttgccatcaattataattcatcacaaatgttaaataatatccttaataatataggcaaagtttaacctccttaataatattgttaatatgaaaactttcttgctggtaatagcttaatgtgcgctcgtgtagtttaacctcctacgaagttaaaagcttcaaagaatacccaatgcctcaggctcacctaaagtgattataagaagcaataataggtcatggctgaatttcattgttaggtgtgcaactaaaatctcacattatctaaaaatagaaagaattataagtatataaaaataaatatttaatattatctatgctaaaaaaaattgtaaggatttagacccaaaacaaaagattatatggtaccaatatagagatacacggtgtcctacaagtcccaagtaaaccaatggcagaggaatctcttcctatgtcgagcccaccttgtgtcttgtgagttatatctaggcagaggaatacttgtaaaatattactaggttttaatcagttctaagatttatatttaaaaaattaatataactagtagtagatttctggccagataataatatagttagagcatcttcaatgtgctcaatatttatgattgtcaaaaatacacacatcattttaattttttttattattattattttctttattccaatctatataagatttaacaactttttatatgaaaattactcaaatagttaacaactctaaaaattatctaccatactcttacatgttactatttaaataattaataaaattatatt

SEQ ID NO: 186575 - DNA, 6353 bp, Cannabis indica
agacaactaataaatatttttcttaaattttaattttaaagaaggccaactaataaatgtttatcaatgaataaattaaaataatatctggtacttaattcaactcatcttattttcggtttttgtttaaacgtaattttggtttttcagtgctctaagttaaataagatcaaatcaaaaagtatctaaggaaacaatctcgaggaaataaattgaaaaatatcagaaaatttaaaaaaaattaaacgtacggttttaagttctaatacaatagcggttgatcaataatctctacactgagagtgcaaaattttaaaaatggcctgttagaaaaacttataacttattatgatctgcgtggccttcctcttttgccagttccagttttcccctgagctgcaggtgctgctttagagcttttgtctgctgaaggaggacggcctcggcctcgcttttctcctgcagtcgctggtgctttttgagcacctcgacctcccccagaaaccttcccaccccgttttcctttatgactatagccattgactaagccatcactgttatcactgtcttcatcatcatcactaccatcgtcgtcgtcttcctcatcttcgtcagatgatcttttgcattcttcctcttcttggcgctctcagatgccttgcctgcactcttcttttttgcagctggctttgcagctatagtttgggttggaggttcttcaatccctgctatgagagataattagccaggttaaattttaattgagttcctatcaaattttaattgaaaatttattgaaaaattagaaatgattatgaaaatattatctaataatcaaagtgccctcgggttctgcttgtcagcaaccactaaatgcaacgtaccttcaccaaaagccttgccatcatatatatcaagctgcgaaagaacacgaaacttggaaatgtgagacatcgttacatacaaaaattatggtggaacatgaccaggaggggggaaaattactccccagaaagaccaaaataagagatgatcaagaattgaaaactgaaattaagctaatttgtgactagaaagaacatgcaacatggctttaaaaactaaaacgagaagtacccaagacaagaacgagaacttaattagtagaaccgtgctatatttgtagttattccgagaagttacctgcgatagttggtcggcaacatttgttctatcaactacaaccattgagtgactcaaaccacatgcaacactacacagaaacagacgcatacaacaatttattaataagctccagatatagcactcgttatcggtataggtatacatgaaagcaacatgaatgcaaggcaaataatatatacctgataacatgcataccctcaagaatgtccaccttttttggcactgcagaagatctaatgcaacggaaacatataagcaggcattaataaatagacggatgagaaacctgtcagaaagaaacggtcaccaatgataaattacatacttctgacccatgggaccatatcccagctctccgttctgagcatgaccccaacttatgcaggaatgatcagctccaacaaagtggtgcatattaccagaatccatgcaacgtaaattccagccactgcggaaaaaagaaggaatattatttaagccatcaactggagttgacatccttcaaactacacaattatataaggtttcaaaaaagaaaagcacaaaagtagaatagcactaccatatgttccacaccatccaacaataatgaaaaagggactaagctctaaaataaaatgaaaagatgacaacacaaaggaagttcttaaataaatataaaggaggtacataaacagaaccttagatccatgagtggtttaggatacatccaatcatcgcctgtagtctttaattttccccacatatataattggcctccagctgaagaaaaacaaaaagtaaccaatcagatctattcaccctaatcaatttatacaagcctcaaaagtagtatgatcatgatattctggagattttagatttttagttaatgtcagggttcttacaaataagctttattatgtcaaagcatttcagatttttattgatgatatcaaagaaaacaaaaaatgttcgaatattctcttctctgtcttctcctagtctctcatcacttaattccgttattcaaatattctatctttttcttctaaagtctacatcaaaagatgtcacatcatgatgtatccatcccttcataattcaaatgtagtaacaaaaactaattaccagcagtgcatgcacaattaacggaaccggcagatataattgcatcaggaggtaaaacattttgcctctggaacgtgtctacacggcgaggcgcccactcatccttctgttctcgatgtccaagtctaaaagtggcattcaataaattatatacacagtgagaagagaaagaagatgctccaacacaggatgtaatctgtttaaacattcacgtcaaatctaaaaatctgtaataaataaaattgttaaaaaaaatagtctcaactttgcatcaagaatggtaaaatttagcaaagacataataagagcaaaaaaaaagaactaaccttccgtaaccaccatatccccacctaaacattcaaccagaaaaaatgtcattgagtgataagttgagaaatgtaaataatctgagagagagggtagagcaaattatatccaatccccatcacaaaatacaaatacataaaataaataagaacttacgtgtaaacgtgaccatttgcatccacagcgactagctccccaaaagaatgtaaacaagtataaaactcagtatagttaagattgaaaacaaaattaacatgtggggagagagaaaaagaaaatgtaaatacctgtatggtttgttccacatgcaaccttaatgatggtttcaccagaaagcgaagctattggtttagggcgaggttgggcttcataagcaagcttcactgagctatctttagtattgtactgcaaaaaataaacaataacatgtgagggactataactagtgactccagtataaaggtgtgcattaaacatttgaattaatattcaaacaataaagtgcaagaatgtctacaaaactctagaaacgaaattagaaaagggaaatttgaattaatattcaaacatttgggcaaagttgatacactaaacctaaatatatcaaattaattagataggacactttttcattaaacccaacaatatcattctcataactcacatctcctctctctcttcctctattctctctgtctctctcgctctcttcttctcacgcatacgaagacccccagcccactgacgactacaaacccaagacccatgatctccgaaccacgaccaccacgccatgaatataagttttccatttcattttattgtattctgtgtgatttagggttgaaatgtatgattttatttataggtttattgatttaaaaataaattgtatgattaatgtctgttatctgtgagttgatattaatttgggatcgaaaaacgatcggatctgagttatgggcagaaaattggtttttttgtgtggccagatggtggtccaatgagtaaagattaaagacaaaggttcgatggcagtccgatggtggctcaatgccttcctaacgagcttaatgaataaagcttaacatctataaatatataatatagtttgatggtggttcaatggtggcctgatactactatttttttatgtacaaaagcataaaaaaaataacaaaaaaaaaatagataccatcagactaccatcggtatgaatgaaaatatagagtatagatggtgaagttagaagagaagagaatggagaaagatattatgggtattaatataaagtgtgttcattttttttaattttggtaagttcgtgttcaaacttcaaaaaatttaatatgcaccaaatgtatgcatataaattcaaatttcccattacaaaacaaaagttaacacatttgtatggtgtctttaagaatacctcattgtcagtcccatgcccaagttgcccatactgtggaaggcccgcagtcctaataagagaaaacaaacaaatcagatataattctgtaaccaaatgttcaaaacgaaaaacattggagttcatttgccctggaaaaaaaatggcaaaaataatctcctacaaaaaccgtacagtatagaagctccttcaaccgaagataaccaaacggtgaaatcagccccacatgcagtacttttcacatcagacacttgacaacgaactggagatgattcaaattctacagtatacaaagaagaacagagaaatgttacatatatatatacatgacagtgtctgtaacaaaactatgcagaaagtacacttacaacattagaaactatggaaactaaagataagcaaactaaagtaaaagtatctgccatcagaacttattgctcctctgtaaaatgttcacaaagttaaacttcaacttaccatttctaacagaacctgttcccagctgcccatgcttgttccagccaaaggctagggactgtccatcgtcagtaactacaactgtgtgactcctccctgctgaagcttgaacgattttgtacctataatgcattaaacagaataagccaatgatacaaaacaaaaaagaaaacatctttgatacaccagagagttaaatgtgtatactcactttgatagttcagacaccacagttggtctatcacgctggatcttatcaccatggcccagttgccctttctgcaaaaaaccagttcccggagttcaataataacatcgaaaagaaatcataagaaaaatcgacaaacatgaacacccaaagactctagtcatgcctcattgcgtccccaagtatagcaacgcccttcaacatccaacgccacacaatgacaagatgctacattaacattatacaggacaaaacaatatcatcaaaaccaagcaaaatcacttcgtattgtctcataagtacccaaataaaaaaaaaatgaactttatttcaaaaaattatatcatcaaacttaaacaacaccaacccaaaacataccacaaccagaggcaacaaaacggatgttgacattgaggagaggtcgaagtcgagtaggagagaccaaattgccttcaacaggtccctttttccgaccaaccgtgtcccatgacgtaccgccgcagaataaaagctctccacccttctctgcctctttctcaaccttcttctccacttcgaccgttgacatttcaagtcaaacttagagggaaagccaaattagtaacaataaaaaaaaaacaaatccaacggttctcgaaggggaagatccaacggctacttttgtatttttgaaaatctactgaagacaacggcttgtgcgagtagatcgggaaatattaagatttgtgggggtagggaatgaaggaagataaggaatggaaaagctcaaaacccaaaccctaattgaaaatgagaagaaaggtagataaataaagggaaggaaaggatataatttttgggttttccgagaatagggattattaattatttgtaaggaaaataaaattaaaaactaaaaagcacaccataaataaattgcatagatacagaaaataaaatattttaaataaaaggaaaataggaataaagaaaaggcgggtgtttttatataaattaattaattattaattacttttggaatgaccactactactactgtctactaccgttgtctgcagaggaagcaatgttttgtcagtaattaattattaatattttataagaaaagagattgattggttgaagttgaagtggtcttcactgcttcttctcttccacttccaacttccaaccgtgtcgcaactctttttgttcctctcttttctaaatctacatgtaacggacttaaccaccaatcaaatcacttcaaattttcatctgtattttactattttctctcttcccaaaatatcctttatcctatattctatgtataaacaattaaagggatatcctcggctttttatcgaaaaaattccacgtgtattttatctaatttttaaaaatcacggtactactactcaaaattttatttttctaaacttgttagacaatttttaatgggagatttaaaaattatgttatatttagcataaaaagtaatttttttggtaaatttacacttaattttagcttcatgcttcaatgtacaattataaattttaatgtaaaacttaatatcaaattaatattttattaaaagaaaataaaatttactaactttataatcaattt

SEQ ID NO: 186576 - DNA, 2776 bp, Cannabis indica
ctctttaaaaagaaattgtttttaatttattcaattaattaaaatctataaattaagctgaaattgcttttttgaaaggtattaaatttagaaaaataattttgtcaaaaataaaaagtaattacattcatttttttttaaaagaaaaaattttttttgtttctctttcttgttgacgaatctatggacagtttcctcttcttcttcaagaattgatggaatgcacattttccactctccatgatttgttcatgtaatgagtaaattaaagttatatcatctcattatctatgctatttgtttgattctctctctttcaatttcaattctagtttcctaatcattatatttgtgtatcaattgaaagcctgacaacaaaacaaataatttggttattagggttcaaattgtttgtgtatgttttggtatttatgattctgaggccattaaaattgtttttgtttttacatatctctaattcttgaacacttttataatttcttggtatctctaatttttgtttatacataaatctttcatatacctgaaaccctaatacaatgtttctggttggattaccaaagagaaagacctaattagtgtattttgattgaattatacttttcaaaaccctctttcttgttcatgatgaattcatattctttgctggtatgtatgttctggtttgataagaactatgtatttttaatttttcttgagaaaagaacaaatgggaatatcaatcatgacacactgtgtatatatatgcaattaaattgtgttaaactgtaaatgtcatttgttttagataataaattttgatttggttgtcaatgcagattatttacaagagtaattttgtgtcagtctgcagattgtaaccttagtgttaatctttctctattgcattgaatttctgaattttgaactcctttgtttgagatttcctttcattggactcgattttagccatctcttattctcagcatcaccacaagagatattctactagccgttaacaatgggaaagcgcaattctcatcggaaaaagggagcagctatgctggatatggaggaggacgacgacaatagtagtgtaagttcttcgatgactattcgttctgatcgtttttcagtgatggagatcgaagaagaagtggaagttgatgatgatagtttactcaacgaagctcttgatgctttgtatgagaagaggggttccactagagaaaatgctctgtcctcaattattgtagctttcaataacagtttgcatcatcagtttatggaaaagaatttcgttactttactgcatcaatgtttgaattcctttaaacgaggatctactaaggagacatgtttggcatcccatatgattgggttgttggctttgagtgttggttttggagataatgcaggtgaaatactggaagaatcaatgtctccattgacacaggctcttaacaagtctgcttccgaaactgtaaagatagcattactgaagtgtttggcgattatcacttttgttggtgggagcgagccagagcagacagagcgatcgatgcaacttatgtggcaagtggttcatccaaaattgaaggccaataatgtacaacttgacaccaaaacctcaggagctacactaagtgctatggtaggtgcatggtctttgcttgttacaactatggatgttggatggaataaggttaataattcgaaagattgggaagagtcactaatttatttatctagtctccttgacaaggaagataggattgttaggattgctgctggtgaagcactggctttaatttttgagattggaggaagttatggaacaagtcaacaaggattgaaggcgaaaatcatgaatcgagtaagaagcctttcagcagaggcagggggaaaaggttgtgctaataagaaagatcttactaatcagaggaatcggtttcatgaaatagtggagtattttgagaatggctcttgccctgaagtttctgtgaaaattggtggtgattctctattgcagacatctacatggtctgaactaatacaactgaattttgtgaagcattttcttggggaaggatttgtgaaacacatgcaggaaaatgaattccttcatgaagttttcgggtttactcctcctaagaaatatgaacatcgtttatcaagcagtgaaaagaggatgttcaagtcgccgaattcagctctcaacaaagcgaggactcgacaccttaacaaacaacggatgttatctgagggaaaaaagattggccatttttcagttagctgtggtgatgaggaggaagcatagtgttcttcttcatatacttttttttttaaaatggaacattgattagttaggagtttagacccccatttgggtctgatgttgaaacacaatacaacatgagttatttttaaagcaatgataacttcattgaaacaatggttcaatttaatcatttaccaattgatgaaataaaatgggcattgactctattgctgtttggttaattatatgatggaattttaatgttgtaactgatagagtaaaactatattgagtataatttctataagcattttaatgacaaaaacatataaagaaagcttcactggaaccattggaagacctcctcagcattctggtttggttgcaatcaagtttatgaatatatttttctatatgctgtattgcttatatatttatgcctaccaacaattgcatatatgaatatgtgtaagttttaaattatttgtttaattg

SEQ ID NO: 186577 - DNA, 2671 bp, Cannabis indica
atgcttaatactactaatggaaaaccataaagtaataactggctaacttacagcctaagagtgcgtcagattgcttcttaagaaaactaatgacagttttagaaaatagtaatgagatcattaaaatgacaaaattcattcagatgggtatgtggtaagttgttttctaaatataaattaacaaacaagagtgaaaacaaacattaaacagctttcattttaggtaagaataaaggcctataagcagctatgagaaaaagtacaataatcaaagctaggttccctaacaccaaactcttcaaattctcttgtgctgtcataaaatagggcagtaacataaaagaaaaagtctagtgtttctttttctagttgggtagttttatttaagaaacttgtcaaaatgtattgttataatgcaaactaattatctaattttccattgactactaaaaattaaggaacccactgttaagaattaataaaatatacgtgttaataattaaaaattatgccaagcggactgaccaataatgtggatagtttgcttgagtttaatatctaaaagccaccactgcacctaattaagaaaaaaaacctaccaccagacctaataaaataactaacagttcaaaaagaagatttcagaattaatttgagaaggaaactttaaaataggagttaactcccaatgcataacaatctcaaacttaaacctgagttgttactactcctattgttaggatcccctaaggtcatgctcaacaacctaatatagaatattatccaccataataatatatggctcatccataactacccagactactagatatagcggtctaaatctagtacacatcaaacagtgaaaacaagctttattgaatacaacaaagagaattaaatataaagagatacttgcaagtcaaaagacccagcagtgtaaaaatgcacatttatattcacatacacacacagacaaaaaagtaaacagtaaaatgcagaaccattgataataagagtttaattcaaatggcttaattaccacaataaataaataaataaaaaaatgagataataaatacctgttcagaacccgaatcagtatttctcttcagaaaaatggcctctcgagccaacaagacctgtttccatatctccccattgccatgagcgttccatttggaaggttctggcaatgaaccaaaaacagggtcaccaggatctttggcaatggtgaaaacccaatttaatatttccctgaaagactcccgactcacctcatcaacaacaccgttcccttcctcaaccgcagccccagaatccaccttcgttacttctttatctgaagaagaagaagcagaagaagaagaagaagaattatcagagctcttcccttcggccagcttcaactccatcaccctgctctttttctcatcttctacctcttccaatgatccatcacttccctcaggtttctttcgctttttaatgagtgaaaattttgtagcgggatctacaacagtcatttcatcgtcatctgtattatcatctgacccaatatcttctattctttctttgtgatcttgttcactcttcatcgaagtatcgtcaaaatacagatagtacgaatcgtccttggacaatgcattttgatcggaggaaggcaagaagccatttaaactaccctccaactccatcaaaaatgtactcacatctgagcagacactagtgtgactgagttccaggtccgtgctaccaacaacaattctttcaagccacctttcgaatgtattcaagtacttaatatagattaattttatggctgcggcgaatttcaaaccgaacccagactcttcagctaccgaaccccacaacccattcttagacacggcattgcagccacctttctccctcacagccaagaatagttcaaacaaatcagcacatttcccttctcctagaatcggaggaataggcctaagagtattgtttccacagatctcctttagaagaagaccgtgaaagtggtaaaaacaacgccgaagtttactagacccttttgaatccggttcaaaatcgaccaacaacccagttggttcaagctcctgtggattcttggaatgatctaaagcagacccatcagctaaaatcgaccaccctgccatgaaatccacaattcagacaccaaaaacaacaaatgggtttcttctcgattcgtcaaaacatcaaataagagtataaaatcaaacaccaaagagataaaaaaaaaaaaaaccccaagaaaaaagctatctctacaatatatacaaatacgtaacgaaataaacccaataaaacaaatgcgattaagagcccttgaatatctaccgatttagaatcttagtcattcttaaatgacgaggtttgggcgggaaacgaaaaatagaaaataaaaattcgatctagggctttgaagagaaaaaatagaatggacccgtcgaaagttttattttttttttcagtcccgctcgcgccctctctctctctctcttaattcagatataatcttttcttgagagagagagacagaaaagaaaagaaaagaaaaataagaaaaccccaaattagtaaaagaaggaaattaggtaccagtattatttgtagtggaagtagtggaaataggaggaagatg

SEQ ID NO: 186578 - DNA, 6904 bp, Cannabis indica
taaaaaagccaaaaggcaagtcaaataacaatcaactaatcgaacgcatattcattactttcagccaagtctagttccaccagacaaaaagacatgcctgcacaaagaaatgaaccaaaaacctcaatgaaattaagcagtaggcctaacccggagctttaaaagaaacaaatgtatcaattgtcaagctaatacaaggaaaaagtaatgtctgttacacacaacatcagtcctaaaagaaaattaacactagaaaacatgacaatcatgaaacaattgcagtataagttctacaataaaaaaattactagatcttagatgcatctatagaaaactaaaattttatcccataaatgaaaactaagattttagcaatattcagacaaaaaaaaaaaaaaaaaaaaagattttagcaaaaacaacattcattctaagaaccctaagtttaaataaaataaactagttttcaaacgttaataattaaatgccaaacaaactgtaagaaaactaataaatatttagaggtataacagctttaacataatcaacgtacaattaatttatagctcaacggaaactgaagaaatccatgaagtaatcaaagagaaaatatgtgcaaataatggaaaaatctatcacattctaaggtagataccttgtcttctagagaagaagaatccccgttcagcatgctgtgtctgttctcataatcctttattagcgctttaccgtcagcattactaagcaaagtataatccaactcccaggtagcttgctcatagccaagactgcaccattttacaagccactcatggtgcccatctagcttagtaaaagtattctggtgatgcccctcgggggaaatcaacaatcttttctgcaataaccgatggggaaccttccattctggcttccacacctaaaatgaataaagaatacttcagaaactaactatacttttttttttaataattcataaacaaatttaactcataataaaatagaaaaatctttaaattaaaagcagttaataaattctaaatcaattataagactacccctaaggaatctaaaacatactgaggcttcaattactcactcagtactcgtcacaattaaaatgaaactcagtaataatcctaagaaacgctaattaataaattgttatataataaaatgtatctatctaattctacatcattcccgtgagttcaatctgaactccgataagttaaaacttctattcatcataaagaaacaacacaatgtagaagcaaatgccatcataaattatattccttgacgaagaggtgtggtctagaaaagaaactctgtacataaatattgaagaagatacaaaggtcacatgtccatgagtgatctgaatttatttctcaggtcacatgttcatcgagaagaggctaagcctcatgacagtaaggtgtacgaggcatcctttgtaatgggttttctaaagtatgtacacctaaacttatttagcagtccaaaactgggctaagggaaaacacctcagtccgtgaattagctatttaaaactttgtttggtagtcatctaggcaatttcctcgtcaagatcagatttcttagtttggtccacatctgtttgagacatgaggaatagcaaaaatcacattcaaaaggcagccatgaagtcatctgtaggttgcttgattggtcatttatttattagaaacctaacccaagccctcaaaaggtagcccaaaattttttaaaaaaaaacaccaataacatcgtctgcttctacaacccaaacaacaaaaaaataaaataatagatagacagcagaactgaaggctttttcaaaaacaggttttcagaggaaaagagactcatctacaatactaattgttgtaagaagaagtcagaaaacagaaaagaatagaaatgtcaagaaaaagagtacacagacatcagaaggtggttgatccagttaatgagatcaaataaagcatagttttccagattcggtgtgagagtggtgcaatgttgttttgtatgctctgagttttctatttcaggcacaccttgtctttaagaggttcttattgggtctatgcaatagaactctctttgtttcaaaagaaaataaatcaataaataaataaataaataaaacagaaaactatatagaacagaacaagaaatgatgaagaattagaaacaaaagagattatagacagactaaatcttaatgagttataaattcatcaacaatcctccaagtactcaaatcaatacaactcaataataagtctcaaatatgctaattaatcaataataatatttaatcatccatgtattttgtaccttcaattctaatggtcactaaaagacaagttcgtaatagaaaaaggaagggataatacaccaaaaataactacttattaagcctaaataccacatcacactcaaaaagcatctcgtcctttggattcgaaagaagaaaaatactgatgtaagaaaatggctgagcgggaaaaggtaaaacatgcaaaagtacaaaataaaatataacatctaaataaagattaaagagaaaacaattttcagggataataaacctggctttctctgttgaatttttcaacaagtgatggagcatcaagaagcagcttacattcgggtacccaaatattgtgaaaatgtgcaagccctttgtatttaacaaaaaaaaccctctgttcttgggatgctataagcaaaaatcacaaatccaaaggaggaaatcagaaaccaataaattgcaatttgcaatcacaaccaaattccatgcaagcaagaacagaagttaacacactccaattctcataccatcaacatctaatacttccacaaccctgtcatcaaagattgcctctactccctccgacactgaatgttcaccatagtctaacttcttcatgacacacataagacaataccaaactccaagaatgacaccatccataggaggatctagacacgtgggatgatagcttcttttgcactcttttccatggcagcacctgatgttgaatgagttttttttagtagacatcaggaaagcaacatctcagagtcaaagtatgttatgctttttctataataaattcaaaaaacatatttttaagagtaacaagacaacagtactatgtctagatgctatttgaccaaggcttttctatacgaagagagtatggaagtctcccaccttcaatttgcagatgatactataatcttcttgaagcacaaaaaggttatattctcaacttaatacatgaataaaagccagttattaagacttaatctaggcgaggggtggtatgaagctgccaacgatagactgtggggtggactcatggcctttgaaaagcgcttacctttctagaggggggaagcttacccttattcaatccgtgttagcttcaattattagtcattatacaataccccaagatcagttgcgtggaaaagataatgagggacttcttttgggagagacgtgacatagattgaggagaacacttggtagcttggtaagtggtgtgcaaaccggaatgcaaaaataatacagattgctatttttgttcaaaaataattatcccaagcatttaactccaaattttactccggtgtttgaaatctaaataaatgacaaagtagaacaaaagcaactagaatttatagaaaataaaatgaaatatagacatagatttgcatagttctcatatattgctaaactatttattaatggccaaagatagttgcatgaatcagtgcgcaaataaaaaagagctactcacaataggcttcccccgaccttgcatttaaaacatgtattttgttcaccaactgtctgaagatctccagatgattccttttgctgcatatgattttcacaattctcagcggtagtagtactagcttcacactcccctctatcctgattcaatttaataatgacgacattcataaacattttttcttatccatatccaataaatgtagaacatctatccacgaatttatatatatgtatatatctttgggtcttatttaaagaaagaaaaaaaaatacaaaagaagaagcttcatcataatcataatcattatatatggccaatgatatatataactgttaagagttttactatcaaatatcaatttctaagaatacctcctaatttctaagaaaagtatggaaaaagacagggtaattaaagaaatcagtttatgggcttaagcaatctccacgggcatggttagaaatactaagtcaagtcactaaaaaagtacagctatatgcaaggtcagtcaaattatacttctttctttaaacacttaaacaatatggttgcaattttaacagtttatgaagatgatatgacaagggctaaagcaattgctatgtaaatttatgaaattatccagacaacacctgtcaaaaaacaaacccacaattctatattggtctccgtaacataaaactgtcatgataaaacccattgcatgctcaaggtgcaaataactattgctccaaattcatagtaaagtgattaaattggctataaacatacaagttacaacctacagtgcactcatgcatggcagcacaaatcactatattccatagtccatagtccatacattaaatttcttttgaaagaacaaaagtaacaaatttcataaacttaatagcacaatcccaataccccaccactcttgattttagcttcaataatagcaaatgtattaagatgtataaataaatcggatgataatagggttagcacttacaataaaatgggaacaagatcaaatacgtgggaaacggataatggtacacaatagtataagtaaataaatgacaaaagaaaaaacaaaccaaccgttgttaaaatggctgcagctatttcttgatttgagttgacactgtctgaggaaaacttgccccctgttgagtctaggttcaccctgttgacattgtctgaggaaaacctgccccctgttgagtcgaggttcaccctgcaagatatataacaaaattgatgaactctgagtagttcctgggttggaaaataagacaagaggctagacacaatataaaaaataaacctttttatgaaacttcaaacttattatccatatgtggatgggcatcaagattattcaaatttagaaatattgaacggaaaaaaatctccttaggtttgcatttgtatctagtatctcaaacacagttatttagctagcttatcatgagattttgtggtgtattttttttaagtgcctcagtttctctgttatgtttataagaaaaagaaatttatataataaggacctatgacaacagtaagaagatcagatatcctcaagaaattaaaaaaaaaaaatccaaacttaaaagaaacaataacaattttaagattaatacagccacatgagtctagcccaagtggtgttataaatggtctgtggttcaaattccatctggtctaatttaacaaatgggcacttactaattcttatttaaaaactaatactaataaataaagattagttggacacagcattcttcaaaattaagaacaccaaatagagtggaaaatctttaaactcagtctcttaagtccattgagaagctagaaatttcaccctttctcatgaagaggccacccaaatccattgtcttgtctttaaactaagaacatttaccctccaaatcctattgttgtactgcattatgagaatctagcacccaataaaagaaaagaaaaatgatgactttgtaaatactaacgaaccttggactagtagaatatgtgtcaagtttctccacaggattagagttctcgtccaacatgttatttttacttggtgaagacatgatttcgtggtcgctttccatcaactctattgggtcaggttcatcaatatcctcctccactgtggcatcaatatcattgaattcgccaatgctaaaagctcccgattcgtcaccaatttcagcttcaccgggcttcatactagagccggaaggctcctctccaccattgttatcttccatcgtcttgttagcttaaaaatttagaatgaaactattcagcattgccataaaaacgataataaatcataaagtacacagaacaaacaataatacctttaaccttctttgcttttgggctcttgaaagcccccatgtaagcatgagcatccaatctcttcctcttctttttcactctatgacattctaaatccggttcttcaatatcaatttcctcatcttctttacctttttcagcttctttagcttctaaatcctcagttaattctctaacactcttctctttcttacttttcttcttcaaattcttcaaactcgagctaatgccagcatttttcgatacagaagaaggtgatgccgagctctttcccctatcagaccttctaagaggactaacagtaggcgtcaatttcttctccggagaaatcatcggaactcgcctctcaagtctctccgacttacgaacactcggagcttccttcgtctcagatacctctctagaagatcttcttaacccaaacgtattctcatcatctttacctttccgactaggtcgagcatcattccccatgctctcataaccagaaattcttcaattcaaagacaaaattcaaaaccctacaaaccctaaacaacaaattacgaaatcaaaggcatgcatttattccaaaaaaaaattaaaaaaaaaaaacctaaattatcgatcaaattaacgtaacagaagaaaattgttcgaagattgagcttaaaacagagagaaaattcttgagctaacctgaacaatgaactcaagattaagaatttgaggatttgaacaaa

SEQ ID NO: 186579 - DNA, 2727 bp, Cannabis indica
aaactccagctcgttcaggtgaattgatcacctcgagtgcagtagctcaatcctgtatgtcttcaacatgtgttgttggatctcaaattgttactacattgaatcaaccttttgtacttaagcttgacgggaataactacacattgtggaagacaatggtttcaactattattcgtggtcactgattggatggatacttgaaaggtaccgaagtgaaaccaatcgagttcctccctacaaatctgtcgacaagagaagagggcgcaacagcaaatccagagtttgagatctggatcgtcaatgaccagctgctactaggatggctctctggatcaataacagaaagtatcgccactgaagcgatggatcctaactcatcttcaagcttacgacaggctttggagacgttatttggggctcattctcgcatgaaagtagatgtccatggatgactaacttcaacaaaaatgtcaatgggctgatattttggccctagcaggtgacccctatctgaaaaaactactagtgtcaaatattctctatgggcttgatattgagtatctacccattatgcttcaagttgaagctaaactgtctacaaactggaaagaactataggatattcttttgagctttaatgacaaacttgataggttaacaacactgctaggagcaactgaaaatctcaatctctcctttccaactattaatgttgctgcaaccaaatatcccaacttctctagaaatagaggcaacaatacaggtcaatttggcacaagaaaattgtggcaactcaactcatcagagaggattcagagatcctagtaggtttagaggtagaggagatggcaggaataacaactccaaaccaacttgtcagatgtgtgatcgatatggccactttgttacctattgttataatcgttatgatgaaacttacatgagttcatacccatctgcatctggagctacctctggcagtaaaggatctcaaaatagaaacatcaatggagcatttgttttcattgctacacctaaaatgattggagatggagcttggtatgtggatttttggagccagtagtcacatcacatcggacaccaacaatatgacccagagaacagactacactggtgaggaaactcttataatgggcaatggtagtcatttcaaattttctcatgtttgtactagctcttgatctctcgtgataataaatgcttatttttaaaaaatgtgttacatgtgccaaacattactaagaattttttaagaatctctcaattgacatccaaaaataaagtgttggttgaattttttgtcaaataatattttgtgaaggatctagacaccaagaaggtccttctcatagggactcttagagatggtttgtatcaagttgttggccaacaaggaaatcccaccaccaactcacattttttttaaatttgatgtctattaaatcattcattggtgtagtgtctaaatcaaatgatcagcgagttgatatatctagtttattttcctaaaggacaagtggcacaagagattggccacccttccagtcatgtattgagttaagtgttgagtacatttaatgtaaagtcaattatcaatggaaaagtgaaattctgtgaagcctatcaatatggaaaattacatgccttaccctttaatgctaattgtgatcgtgctaaaaacctgttagaattgatacagaatcctttggggtccagcaccaattacatcaaatacaaattaaaaattctattttcattttgttaatgtctataatcggtatacctgtatctaacccctcaaaaccaaaaatgaggctctttcagcctttgttcgatttaaaaccttggttgaaaatcagtttgggagaaagattaaagatctcaaaactaattagggaggtgatttttaatccttgcagattgtgttattcaaaatggtatagattttcagtattcatgtcctcacacctcagctcaaaatggtcgagttgagagaaaacatatgcatattattgagatgggcttgaccttacttgctcaagcacatatgcctttaaaattttggtgggattccttctaaactactttttacttaataaatagattacccacgccagtgttgaaaaatcaatctccctatgaaattattcatggaaagaagcctgaattccttaaggtctttggagttgcttgttacccgaccttattagacacacaagtttcaatttcattttgttaagtgtgtaaatttatggtatagtgattctcacaaaggctagaaatgtcttagttccagagggagactttatatatccagaaatgccatatttaatgaggataatttcccctttaagactaaaattctcaataactaacagcatgagcaatcagtgtgtgttagtgtcccttcttggtcagccttatttcaatctcacaaatctcctacctcacaaaattcttagtcatctaagccccaagtggttgcatctcaagtccctagagaagacacaacacctcagtcggattctcatgatcaaaaccaggtaatacaaactgatttctctactacttcacctggctcaattgatagtttacctgtcagttcacaacacagtccagtcaatgatttaatcaactataacaactctagacaatcaggtactcaaactgatgctaccatagatgcttcagcacgcgaaatagtca

SEQ ID NO: 186580 - DNA, 2242 bp, Cannabis indica
gaagagttgactccatcaaatcttgtgaagatgaatttaaagaaagtaaagcaaatgattcctcaaatgtttacagacagcaacgatgcatacttatcatctgatgatgatgaaacagaaaagaggcacgccaaacagtgtttgcttgagaaagctgtgagttatttgatgtgactgtttccatgcatacttgaaactttcctatttattgcagtcatgctttcgattcaaagctttcatcttattttattataaagactaaaaatagattgtgtgaaacaggagcagcaggttactttcttgtcaccagcagaagatgaaagttctagagaagttttttgtcgaataaagaagctgaatcttgtgcctgatattaagaggagagctaaaacaaatagtacgataatttatatgcagaataatgaagatatgcagtatttcacagagtgatcttcttcttattattatttcttatcctaattgttgtgttttgcagcacattttgatatgtctcacatgggagtaaacaggagcctttcatcaagggtatgtagttttctctaatttatgaaatcaagctatgggatcaaaggtttattaatatattatatttaaatatgctaaaaggaatgtattagatagtcaaattttagcgatgagggtgacataagatttcagtaacaagtgatcattgtaaagttacgctgttagatgctgctaagttataacaatgtgtttgcttgtcacagtcatctttccttagccggggaggatcaagtaatttgccatcatccaagaagcaaggatcaacaacagctcgctcttttatctttgaacgagatgatagcaatagtagaagcgcactcacagcatcggaggatgcttcagaaacggtaagtttttccaagaaggaagtgtaggtggttatacatatttgtcatggtaccattaaaatataaaaggggtcagtcattgtatgcattcttaatcttgcatgtccataactttttattggtttaattttcatataggacaagcaaattcagagagagaatcgaccaaaggtaacatcctttaagattagcaactcccaagtaaagataaccaaaagctcatcatctgtaaagaagcaagatacttcattgttggatatattaaagcgaacttctatgacatcgaagcgatacaaaactgatagtgtggtcacccgaaccgattctatgttagcctcattcaagttggtgaagaagccggtgaagacaaatgaagatcgtagtttgtagctgaccattctaaaatgctgtactacatattctactgattcatatgaactcattaaatgtttatgcgattcacattaattggttgcattattgttgttggatgaattttagacaacaaggaaaccataaacactatgtgagtatccgtttaaagtagcaagtactcaagaaatcacaataataataactgagacaagaggagtggttggacaaagcttgtttgtctacgctagcgttatgaagtttgtcattagctttatttcgtggttatacaaagtgtttatatatatatatattaaatgttttttattgcaattaaaatataaaacgaccaaggactgagtttttatttttggctttttctgtaaaagctaaaaaaggcaataatattatataaatatagtgcattggccaaataagcatttatacactcctaagagaaaaaacaataaaaatatctcttcctctataattccagtcgcaccaaaattgcttctgagaaacaaagccaaccgagccaaaaggaacttggcaacgaagaagcaatgtcggcaaatgaagaacaccatcaatcccggcgaatcaacttgagaagaagaaaaatattgaaccagaaatcaaccattactgattgatgaatgattttgcagaaaaaaaaaaaattggtttgaaacataaactcaatgtcgtaaaataattcaaattccataaaattaatttctcctaaattcaataaacaaattcataagatatagatttgtaacaaatagatctcgagttcccaatcaatccaaatcagatataacttgcaaatttttagtagctaatattatacatgttgcattaacgttactttccagaatttcaatcttgaatttattcaattccgatcgcaacgaatcattcaaattcgcaatcatctcgcgcaatgaatctggcaacattgttttgaatttttt

SEQ ID NO: 186581 - DNA, 2992 bp, Cannabis indica
ctttctctttcaaaagtacagattgggtatttatgtggctaacagcagaagatgcttgtaagatttaagcagtacaattttttaaaaacatggaaggttgatattttttttgttccctgccattttggtttgtgcaacctacttaacatacactcttatttaaaagtatactttatatgaaattaagatattattattataatatattctcttcattagcactataagaaggttttgtaagaatgaaactacatagtggccttgtcggctagattagatatgggcataggaaatccaaacaaaagaattatcaaatgttattttgacaaaatttgcttttaagtgttaggtgaactgaaagaaggcttgctagttctgacttgttagtaaggtgatcctgtaatcttgatcaccctgacccactagtgggttaattttcataaatcaaatgaagcaggcagggcttcaagtaaatgctgccccaccatgtcaacgatccactaagattttaatgctggggtttaattaagtaaatgaatcagatttttcatgcttcaaagcagatacttgtgttaaattgcagtttgattccttcttgaagttgcactgatatcatgggcaaaaaacctggtccatagcatttcaccaagcattcttttatgcttttaagactgtggttcatctatacctatactttgcactggctaagaaatggttagtgtctatgttatgatggccaatttttatagggcggtagcattgtaagaccatctccaatggaagatgtaaaaattattcaatatttggcacaaaaattgactttgtgatatgtttgcattaaattttagcattgtgttccaatactcaattgcaaaacttgatgtaaaatttaatgtttttgataagtgagctacattttagtttttcatcatttatttggagatgctctattgtgtttttgataaagctgtgcttctttgtttctataaatgaatattgtcagtcctgacgcctctatttttctatgtttcgaattacaggtgctggatagaggagaaaaaatagagctccttgttgacaagaccgagaaccttcatcaacaggtatggaaattttatattttgtatgtatgcctactctgaattctttgttttttcttttctttttatttttttttttggacaatgaacttagacattaagggttacaattagttaaaatttgtgtaattgcgttttcccaacctctctttctccatcacaaccgacttggatttataacaactgactaatggcatttcttattgttaatttaattttattgcaaagtttagtttaatgttcatttgctataatagttgacttagtctagttcatgaagaatctcctgtttgcgtttaagaaaatgatagttaattcattaacgttcaaatgtgttttttcttcttgggttttatttattcgagaattaaaatgtgttttctaatgaaataataatatggttacaggcacaagatttccggactgcagggactaaaatccgtaggagaatgtggttgcagaacatgaagatcaagctgattgttttgggaattctgattgctttgattctcatcatagtcctctctgtatgccatggtttcaactgtggaaagtgagcatctttcgtcttcagaaggcttttgatatctcaagctgctttacttttgcaattattgtataagagacaaaaaaatatacattctctttgtatgtagttaaaaaaatatatatccaggtatttggcttagacacttgaaacagtgtgaatgataccctatatataagttgttattagaatgctttccaagagaaggtttaaaagtatgaaaattgtcagattgctttgccatagtgctcaattcgtttgttcctttttacatatatgaaaaataaatttattggcctgttttgtataatttgggttaatgtttttcatatttgtccttagttttatagattatggaaccaatatttactctgaaaattctctttgaacatattaacccaatttttttattaggtgggtaatcgtttggttgtgttttattaaaattaaggttttgtattctatgtattctatgctcatctagtgacctagtaattacttttacttttactttaattttttcccccatttgacggtatgtatgaccttgaagcgattattttcttgatcatgattaaagctttatcaatgatgttttagtgaccagattacgctgtgatttccatttgggtttgttattttctataaagaaaactttgggtcaatgtaaatataatcaacggtgaattattccgtgatttgttggattagctatatgagtcgagttaggtaaactgtaacatattttaaatatccagtgttaaaaaatttatttcaattcaggggttccctttcgcaaaactactcaaacaaaccggagtggggtaccagtttacgcttatctgattttttgaaagaacaaactatcaccaatctgatttgaaacaataactatctcccccactttattttgttaggtaaggcattctcattaaaaacttcatacaataaaataaaaactttatggtacactagaagcaccaaatatgaggcttcacaacggcaattatacatttttcttcctttcacgtccccggttcaagccgtgttagaatcaattattgaattcctcgccagtttttgcgctagtccatggttttaagtaggactccaaaccaaataatattctatcacaataattagaatacaacaactaatatagaaaaaaaaaaacagtcacaaaacccagatactcacccagatactcattgacatccatcaattaagtatatatattcatatttgttctttttttctttcgaccaaattccaataacttttatctaatatcatcatcatcaccatcattgagttgattagctacaatactaacataatctttatt

SEQ ID NO: 186582 - DNA, 5424 bp, Cannabis indica
tcgggcacgaatcagatttgttttcagctgcctaaggatgtcatctcgcgtaagatcttcctccaaggcgtgaatgcgtgtagtgcctcttgtataggtcggaatgtttggtggtgggcggccataaactgcctcgaatggagtcatgccaattgcggaatgccgactggtattatagtggtactctgcccaagggagaaatttgctccattgcttcgggttgtccgctgtaaatgcccgcaaatattgttccaaataacaattagtgacctcggtttgaccatccgtttgtggatgataggagaagctcattttcagtttagtgcccatcaacttaaaaagttttttccaaaataactcgtaaaaattgggtcacgattagacacaatggatcgaggcatgccatgtagcttgataaccatggtagcaaataactcagccaccttcgttgttgtatattgattaaggaggccgccaaagtgagcgtatttcgtaaagcgatccacaaccaccaaaatatttgagacacctgctgacttgggtaattcgacaatgaaatctattgataaatcttcccaaatacgttctggcagctctaatggttgtaataaaccgtaaggtgctgtaggtgaataattaatcatttgacaagtgacacactgctgcacaaatttttgtacatcaacgcgcattccaggccagaaaaaactcgcgcttaggcggagaaatgtgctgttcggtcccgcatgaccgcccactggagtatcatgaaatcccctaatgagttgctgtttaaaatgtgaattagggcttacatgtaactgctgattgtaatataacaagccatctcgaactgaaaacggtgtatctcttaaaccccctgcagcccactgctcatgtaatttacgaagttctagacaagtggtgttttcgtgacgtaattcctccaaaaaatcaaatgtagcggctgattgagatgctgccaaaaccaagataaactcatcatcttttcgtgataatgcatccgctgcggagtttgttttgctcgttttgtattcaatgatgaaatggaacccgagtaacttgcgaagaaactgctactgctccggagtttgaataacccgagttagcaattctttcaagcttttgtggtctgtgcgtatcacaaactggcggccaagtaagtattgtctccattttgtgacggcttctaccactgctcgtagctctcgtaggtaagccgatgttcccataaacttgggtctcagttttttgctgaaaagcgcaattggatgtccccttgcattaagactacacctatgcccacattagaagcgtctgtttcaatcacaaactactgtgaaaaatcaggaagagccagcactggagtctcaatcatggttgttttcagtttgctaaatgcttcaattgctgctgtagtccatgaaaaattgtctttcttcaggagttctgttaaaggagctgcaattgatgcgtagtgagccacaaatcgtcgatagtaccctgtcaaatcgaggaacacacgaagttgtttgagtgtttttggttgtggccagtcgaccatggcttctgttttggctggatttgccttgactccgtcaactgatactaagtgtcccaagtattcaataatgggttggaagaatgtgcacttgctggcttttgcaaaaaatttgtgttcccgcaagagtgtaaaaaaccagccgcaaatgtgagatgtgttcttccctgaatttactatacaccaaaatatcggtaaaaaaaacaataacacaatggcgtagtaaaggatggaatacccggttcatggttgcttggaatgtagatggcgcattagtgaggccgaatggcatgactagaaactcgtaatgcccctcatgagttcgaaacgctgttttgtgcacatccctcaggtccatacggatttgatgataacccgcacgtagatctagctttgaaaagatagtagcgccacccaattcatccagtaactcatttattgtgggaattggaaaacgatctttgatcgtaatgttgttgagtgctcgatagtcgacacaaaagcgccaagaaccgtccttctttttgaccagcaacaccggagacgagtaggggctagtactcgttctaatgaaacagcattcctccatttcccgaacaaatacttcgataatatctttctgaaagtaagggtaacgatatggtctcacattcacgggtgaagactataagaaaatccggtagtcagagttgcgataaggaggcaactgttttggttctgcaaaaacattcgtaaattccgtcagtaactcgcgaccttatgggagtgtggtttcgattttttggatgtcgttgtctattttaccatgctcagtaggtagcgctgctagaacaattacatctcgaacctctccttcgcgtaacaaggtatgtaatttagacaacgagagttgttaagtcactggcgtagtcgactcggctagtttcacccttgtaccattccattcgaattccattgtaagagccttgtggtcatgcaaacaagggcctaaggtttgcaaccattgcatccccagcactacatcgagcccccaaattggcaacacaaagagatcaactataaacttgtgtccatgtaaactcaattcaacacccaaacaaacttgagaacaccacaaggagttaccatttcccatgtataccttaaacttctttgtttcagagcattgtaaacccagtcgatttgctagagcttcttgaataaaattgttgttactccttgtatcaataagaacttctagcgattcggagccatgttgagctattatccgaaaactgcgagggtttgtattggataaagcattcaaactgacctcgtccgttatagtctcagcacaatctgaattcccttcagctatcatctcactatctacttcgtcttctttttgagcacaaagaactaaccgatttttgcatttgtggcccgtactgaacttctcgtcacatgtaaaacagaggccattctcccttttttctttgagttctgctggagattatctcttgactggtaaactaggtcttggagtcttggtcgagagagttggagtggtcactgttgctcccgaattggttggagatgttggagaagttgtcggaaagctgggttgagagattctcggaaaacaattatgacggtacccttccccgcgggcatggcttaggatgtcatcgtgtcgatcttcatacagttgagcttgcgccattgcatctgctagatcaattggttttgataacaacagttctcgtcgaatttcggtcttcagaccccatacaaagtaaatgaggaagtactgatcaggaactccagaaattctagtcatgagctgttcaaattcctcttgaaatgccgaaacacgttccgtctgtaccaactttgcaattttgcccaacggatcttcataaatggaagtcccgaaccgcaaccgcagtgctgtcaaaaaggattcccagtcggaaaatcctcctcccttttccatccattgataccaagtggatggtgccccctcgagatggaaggcgaccatcgacaacctcattgctggcgtaacatcgtggaggttaaaaaatttattcatcttgtagatccagtcctctactcccactccttcaaatatggctaccttaacccgcataattttcagaatagaattcacctcgcgtgaatcggtgtgagaattcgaatggtgcggtgctactgattcagctggctgactggaattgccaatttccccttgagacttggttgcaaacgactgtaattgatccacccgagtatctaaatgagtgacctattcttccaatttcgcagagaatttggtgaattgttgttcagaatgcttctagaaatttgcttccaaggcctagatcattgctgccaattcctcgttcttcatgctgaaaaacaatgaaagcaccagtgttagataatagagtctttttcgagacaagaccagtctcccaaatgtaatcagattacagttttcatttcattaaacttgaaaaactcaaaatacagagtcatgggttatatacccagcttacattccaagaaatcagcaaaaatgtaaaaattggcaaacaacaatactgggttcgcacccctcaacgagattccatcttaacaaactcttgtaaccacttaggcttcacgtgcacacgagtcccacgcgctcgcatacttccctcttctataccttcccgcgccatgctcgaactcggctcactttctggtggcttttcgaatggaggttctacacctagctagtttctcatttgttcttgcatccactctgtgttcaattgtattgggcctgtgacttgggctagcccaacatatactctttcatggtgcagttgtgtcagaggatgtctttttgtgcattgtgttgtgtctgtctaagcagcttcaaccttgtatcgtggtctctaatcttatatgtaccggacatagtgttttctagatttgttagaaggtgtcatagctttgttccagattggtttttatgtattgtctccaaggcacgatttctgatctactaacttaaattcattaggtcaaattttcagtatgttttgcccaactcttttcatcttgcttaatttgtgacttatctgaagacttccatatgtttatagacattaggttcaacttatggccattgggccttttttactggatggcttgttactctgcttctattgttttatgaatgtcttcagtaaccttaattcttttatgttgtttatattgatttttcaggttgttttttctgtcaagctattcaaaattgtagcttttcatctttttgggtttgacatatcacctctatgatttaccttttcttttggtcatagttgtgcttgtattgttccatttctttctgttcaaaattttaggattttggtacctcactgattgagctaatgggctcatcacaaggcttgtgataacaaaaggaagtcgtaagtatattttctgtttcatgtagctgtattgtggaggggtgtaaaatattttcatttgtttcacatgtaattgtcctcgatttgttataggcattttttatatgtttgattcttagcataagtattttgtttgatattttcaggctttcaacctttttgggcatcaatcttctttagtcgaatatatatacttgtatattttaacaagtgcttcaccttggaggggagttaacttgtcatagtatattttcttgatcgacttttcatctttcactacgtgcgatttgttcatgtctttgcttggggtgtttaacgatttttcatggtattatgaaaagtggattgacgatcaaaatcataaatatctttctttttttt

SEQ ID NO: 186583 - DNA, 3826 bp, Cannabis indica
aaagtatatgtttaaatgtgtgcataaataatcttataatttatctctattgtaggtgtttgccaaccctgagtttttagaaattgtgaagtccagaacaccgctagggagaattggagagccaatggaagtttcgtcactagtggcatttctgtgcttgcctgcagcttcgtatataactggacagactattagtgttgatggaggactaacaataaatggggcattatattcttaaatatgtacgccaattaaaccgggtccttctatctaatatttgatatggagttgttccaaaaaaaaatatttggtatggagaataaatatgaatgcaattttatatcttgtcaagaatgctatattgacttttcataaagaaaaaagactatgatacattgtcttatttgcaagataatttgtgttctagtcaaatcaatttatctatctatatatttatgaataaatttatagtaggtactgatggtacagggaccttgtatacacattttcttaattcttgatatttatgacttttaaatgtataaactatttaatatgtactcactaacctttttttttttttttgtctgggaaacctcaagaaatttattcaaaaaaagataagatgttgctgagcaaagaaaaacccttacagattgtttacccctcatttagccaaaacatgagctatattattgaaagatctaggcacccattcaatactgcccttgaaatctgttggcaatctctgtgaggatacaagcttccttgacattcatcttgaaatggacatctagcccgatcctgaccgcttccatttcaccttggatccccacagcctcaataccttccttgttagcatagtcaacattagctctgatttttcctggcctaggaagttcccatggaatttcatgaatttgtcgtgcctcatgttgagcaacagagttagtcaccatcgtcttgtagtgtcagtaaaaatcctcataatctcttggaaaggccatcttcctccattgtagtaattatcatttttgagaaaccacagtttagacaactaaagaaaaggtctttctcttcgatttttaagtcagtctatcttcgctattttataaaaatttctaccaaagttatttgagaccaagacgtaggttctaaaaataccgaagacgtaagggtggcatatgtcttcggtcattatgtaataattgaagatataggtagatttacgtcttcggttattttataactaccgaagaaaaaagggacctatctctttggttattatacaataattgaagatgtagggtcttcccgtttaagttatgctccatttacgtcttcgattattagtaataatcaaagaggtagggccatttttctcttcggttgttatataataaccgaagacgtagggtattttttaaaaatttctttaaatctaatatatattaattttttaaaacaattataaattaattataagaataacatttacttttaaataaaaattaatttaattatataacaagtacaaaatatattctaattatatcataacaaagtcaaagtatacattacaaaacatgctaagttcttactaataaaaaagcgtacacaaaataagtattgcttacaattaaaagtctaaagctagctagttccagtatcatgtcaatttttataactattgatgttgcacttgtagcatcattgtctccacatcgtattttttcttttttccaaactataaaattaatgtgtaaattagttatatattacttaattatagggttttttttctatgtaataattcattaattataagttagtatcctatttacaggtatacataaatgaattaattataacttcattgcatttttgtttataagaattaataaatttagagctttcacaatgttattgatgtatcttagtacataaaaaccgcattcatttccaaatgtttgttttggacaggttacaggagttactcctaaaaatgttccaagtaactcgttagaacctccaagtacttcatatgccctaattaaatttaataatttatattatatttaattagctatagttggtataaatcaaaaataaaattataactttaaaataaaacttgaaaagtacctttagagtgttaggtcaatagtcatcttaaggtgtttatatcctgaccaagggtcgaagtgaattatcctcccagcataaacgatctcaagcatctaatgttgtctaataaaaattaataagaaaatattaagtgctaatttaaaaagaagaataaaattatatttaaatagttcttgtacttgtacttacttgtacttctaaggtatgaagaacatgtgagatttattattcattatattcaaccattcaaccaatctcacaacttcttggtcgacaactccttccttttccatggatttgagaagctctgggtcaaagaacttgaaatactcccacatattcgttaaatcatcccaaatacatttgtataaatttaccatggttaagtgttacattttaataaattgggaagagtataatgtaaaacatacctaattccaaaaatcattacgtaaaacatacctaattccaaagatcatgtctaacatctaatattgttcaaggtcccaacctgctctacattctccaataataagataatatttgtgcgatgtggcatgaattcaggatcaattggaacttgaacaatgttgtgcatacctttcttccttagaaattcttcaataaaaaagtggaggcatgtaggtatttaagctcagacctcaaaagggaatgttgtaacctcgtccactcgatcttttctgacatttgattgtgatccagccaaagacatagtaggaagggctgatatatgtttccccttagacgatgatctgtgaggggttgctatctgcttccccttcaacgataatctatgggtggttgcgacatttgttttcccttatcgctcactctattttcagttttaatgttgtaaaattttactaatgttggttatcttagttttttataaccaccgaacaagggtatttctgcatcactaaccgaattgtctaattttttaggatcatcaagaaactcctcttgtgcttcatcaagcaattcaataggatagtcatcaacattattaaactcgaaatcatctacgtctcgcttccctaacggatataggttactaattgaccgctccccgtgtcaataccatgtagtgtagcttatattgaaatccttacgatcctttatcatcgtaatattgcattctatcttactacaacaatctacacacagacagggaattctttcgtaattactagaattttttagggcaaactctagaaatttgttgaacccatcttaaaattgcggtgtttctctcctctcaagcatccacgatttatccataccgcaaataaaatcctaacaagtgggtttaaattaactttaatctaaaaatttatccgaattctaccaaaattttgacagcataacaactataaattggacgttcacaaaaaaaaaaaaattaaccataaaatgaaaacatataagaatccacaacaataaaatagtaatttccacccatccgaccgcagtacatgtattcgcagaatctacttcactacgaatgaatatttaagatattcaaactcatctaacatgcttattaattcataattaattaaaagaaaataaaagataggatatacctttagctagctaggaaatcaatcaacactggcctaaaattttgtttccctccaattaagatccttgatgc

SEQ ID NO: 186584 - DNA, 2243 bp, Cannabis indica
gtgtaattgtccacgtatggtttttttcttagcttctacatgtacactttttttgtttttttttttttttttttttctggtgcattctgttcatttagtgacattctttgacaatggataggtggccgaggactctgtcagtggctgaggcgctttgtgatcttcagctagaactccagctaaagtctctagtacccgataagactgagcatttcatccctgaaacacctgcattgaaagaagtagaacccaagaagaagcttcaaaactccaaagcttctaaatgcttggcttcccagttttctggagagatcaaacaagggtttgaaaatctttccaatgacattgttctggacaaagtccaacccacatctcgaaatttgagggtagaacattgtattgctgattctggtttgctctgtgatcctcacttagtcacggacactggttttgataaggttgggaatttccctactccaacagaacttgcaaaacttgacaagaatttcctggcaaagcgctgcaagctcgggtacagagcaggccggatagtgaacttggctcagagtattgttgagggtaggattcaactaagacaattggaagaaaattgcatggaaaggagcttgaacagctacgataagttggctgagcagctgagacaaattgatgggtttggtccttttacatgtgccaatgtgcttatgtgtatggggttttatcatgtcattccaactgactctgaaactatcagacatttagcacaggtttgctctcttgctcttttcataatcttcatcacccttacgaagtactgcgtgcttattcatggttatctgaacaagaagccaatcaaagtactgcaggttcatgccatacaatctagcattaggacaatggtgacagatgttgaaagaatttatgctaagtatgctccatttcagttcttggcgtattggtacgcaatagattctccatgttgaatgtcttctaacaaagtgtcaattgttattcaatttcttttcatgctctatttttaaatgtttgatccattaggtcagaactgtggaacttctacgagaaaaggtttggcaagcttagtgaaatgccttgttctgattataaacttataactgcttctaaaatgaggactaaaccaaggcagcagaacaaaaggaagaagacagcctgaccgttaaggtgccttgaacctgtaagttgtagggtctgtttatataattttagaacttggtttagtttactcttttgagaagaagtaagatcaatgtcttactaactgtgtaacttaacatgttaaaatataccacacattttgttggcctatgattataaccattcagttggagtgaaattggttgggaatttcagaatggtttagcatgagagagtgagccaacttgtataaagttgaacaatgtttagttcttgtaaagttgtaagctattttaattatgctctgaactttatttaatacgcatactatctctaaagcaggcacaatttgacacttatatcgaagtatgatggcataaatcacaaattgcaaaggctttttctttttcgttttgaagtaagtatatgaaagagaaaactagacattgcaaataatattttacaaactttgagagtaaaagaaaaattacaacccacaaataaattagagtctattacattgatgtatggaacaagttccttttagctctttgataattacttcagagtcgctctcaaccacacaaaaagatgcttcatagaaaccgtcgtttccaaagctaacaagaaagtcgttgcttcgccaaaaagaggatcgaagaagctaattctgtttgtggccacccacaaaaccattctcaagcgatctctaactaacgcgactacagacattgccttactccctaccttcgtgtcacaattaattctgatccagtctttcaaggggtggggaccaaacactacaacatttatcatcaatagcgatggaggggtccgccgctaatgactccaaaatctgttgctactggctattagcgatgggaatccacaactaatagcttgccgctaatacttggccgctattaatagttattagcggcagaattcaataacattaatagtgcgaacattagtgggtattgccgctaatgctctgtgtagtttcgattacaaaatcgacacacatcattagcagtaggtgcccgctgctaatgtacgttgatgttaca

SEQ ID NO: 186585 - DNA, 3320 bp, Cannabis indica
aaaaaaaaaaaagaacttaaaagtaagaataaagagcagcaaagataagtattaacaaggcaccgtaaaataaaaagagaaacacacaaaaaatgccaatctttatgactttgacatagaaccttaagacttactatgatcatgtcccacatggccacaggaaatagaaaacatgttgcagaagctatagttattgcatgaagtcgccttttcagttgattctgaagacgtataaagttaccatgtgtaagaattaggatttaactgaaaaatgaaggatatataacatctgaagaagttcaggttatcaatgtatttgcaagataactacaaacatgaagacagtcatatatcaacaccttgagtgaaacacgtcgtgcaatcacccgcctcaacgctgataagattccggcgcatattggaatagtcattgctgccacgcccaaaacttctttagtttcaacctcacgatcaggatcatctttgaatggtaaatttaagttaagttctcaacatacacaaaacagggacaaatgtttgatcaatataaaaggagtaatgaaagttaagaggatactcgactataaaacacaactagcttgattaatgcatttattgagtcttataaaagaacttgatacattccaaaagtacaagacatcaaagagaggatatagaagggagaatatgtttccatggcccatccttgggataagaagtagaaagacgtcaccattgcaataagcccaccaatctgataaaataaatgtcagtgatataataagataatctttatattttaatgacattgcagttgataactagtcaccatacttgatctggtacatcatttccccattcaaaagtatatggcaaccaatccagtgacttttaatactcaagcaatctggctagaaaagagcccatgcactagcatgatacacaccagtagtgtatcattttcagtcaaagaaatataaagtaggaaagttttattgagatagcagaataaactcaaacactcccaggatatatgagagacctggtacctctcccaagcctaagctcaattacaataaaccagacatgatttttcccttcccttttctctcctttaatccctccagactctcccaaaataaacaaaataaaattagaaagtaactcaaaacagaaacaaaataaataaataaaattttgatattattgagttcgcaagaacatcccagccccaaatcttttcattacttacagtgtctccatccataggtgaaccgaattggtggtttatcatagtgtcacgtacgtagattttaattggttcattactgaagagaagaatgatgtagttttcccttggttaaagtatattcttaactaaaatttgctcaaggttcatgatattacacgatcaataaatagtattgcaaaaataaatataagcagcctatgaaactcgtatacacagagcacctttttccaaacatgtcctctcctcccatatagcagtgcagacaatactccaaggacagcaccagcatactctgctagtatagctctaatataatatagaaagagaaatatggaatcagtttcaaatacaaaggatataaaccagtaaagaacagcaatttaatattcctacgcattcctcttgtaactgttagaggagctttgccaatccaactataaaatttgtgcttgtgctcaaactgagttatactccaggtagcaattgtgttcacatttgtgtgtgtttacataaataactttggtaaacattatatttatggcattgtcagagactgttaaagactacagttgatatcatgttacacatcatttacagcataaaattcaatctactgatattgtagttaaaaaatgtggcaactgacattcttctaatagtttatatagctgacaagaatagaaatgaaatagtagtatgaaaattcgtttgaaatgaccctacctaagaggtccacatgatttaagaccctttccccataaaacgaagtataacgccgttatgccaccatttattatagaaggcactacctggaaaatagtaaacatactaagatatatgtacaacaataatcatatgagctgatattctttcatgcaatttctagtaaaggtaacaaattcaaagaacctgtgtatttgagagcggtctacccttccaaggcttttgcaaaacaaggaataggatggatgatgggaccagacaagtgaatagaaaaagaacaacagaagtacctgtctgagacaagtaccggtatagagaataaattgaccatattctcatgaaattgccaataatatgaataatttgcattggcatgtgtctgcaatataacaagatcattggtgcaattagtcgatgtttaaaagagcacgtaatgagagcaaatgaaatattaatcctactggaaataagaatgaagacacctatgtaaaaaaatacaataaattgtacactatgtttttccctttttatttctcttctcaaagaggagaggggttgaaggagagtgagggcaatgaaaatgaaggaaaaaaaccctgaaaatgttaaaaaagaaaaaagctgtagaagcttgaaaacacagccaagtagtctgagccacaacagctcgtgactactacaccaataagggccaagttcctcatccatattagaaaagataagagaagtagaaaaacacccaaatagctgtgttgtactccttatgacaacttctgttaacccaagtgttaatagtgccccttattagttaatacaaagaacatgtacccatcactgtgtcacaagattacaccaacctagaaacactattttcatgaggaaaggaacactaccggaagaatcttgactagcattaaaataagtactagggcttaacaggtattgtaaatcaagatatcgacatgtgttacgaaactggaacattacatcttgctgttaatatcaaaaattttctcgagaaacaaacagaattttaaacataaactacaatgcaattaagagaaaatagcataaccggtgattgataagattacctgaaatgaggagaagatcgtcgatcttcaggaatttgtccaggagacatcattttcaaaattaaaaaagttacaaaatcaagttttgattatgcatatataatctttgcatccattacagattaccagagcttctgcttcggtttcttgacaacgaagaagataatagcaaacccatactactttgcaaagttgatttccccattcctctctctccccccgtctcctcaaattacactctataccctttt

SEQ ID NO: 186586 - DNA, 4690 bp, Cannabis indica
gtaacttaacttatggttttgttcttacgtgtcattttttagttgcccaattattattattatcattaaaatattagatcattttttggttgctgaattattattattttaattaaaatatttgatcatttatcattttttggttgctgaattattattattttaattaaaatatttgatcatctaccatgtagtacaatcactgaatgagattaataccattctagaatcttcaatcattataattttcttctttaaataaaaatataggaaacgattttgtctcctaaggtattttcaaggaatgtatttcgtgatacatttgatgagtcttgggatacattaaatgagtgtcaggtacttttttactttttaatcctaattattcctaaatcaatttcagtcgtcagatcaaataagtccctcatctgacggctgccgtatatcacggaatgcattccgtgaaagtacaatcacgaaacaaaatcgtatccctaaaaatataaatgtattattagcctattatttttttaacaaattattagcctatttttttatcatatttgaaaccgtatatatccataatatataaatacaaaattaaccgtaactcagatttaagtggaaattttcttgtgtcaactttattctatataatattttttaaaattaaattatctttataactattggacggtattttaaatattaattttgaaaacgaaaggatatcttttccacattctaataataataataataataataataataataatatacatatatctctactcagcaaaaaaaaaataaaaaagtaatatatatctctatggtgaaggctctaccaccaaactctgtcgttgaagaagtattcaacgcaagccatacatagcgtagttcattggtttggtcatatacaaaaccattgtcaacgcattccataccaatactataaaagaaacagatttaagccaagtcaggctttaatggcgataggagttcatcaccatcccacagcagccgccgccccccaagatggtggcctttggccggctttcgatgatactccagcttctgcaaagcataggccgagagcttctgagaaagagaacaatggaataagtagtttctacggatcagatgatctgactgatatgtgtgatttattgtacaaagaagacttgtttgaacatgtgagaagggcaacagatactgagtgtttcaagaatcgtaagaggtcgactgggtttctcatgtcttgctttgagttcttgaaactcttcttctctaaatcttgatatttatttttgtgtggttggatgaacatatatagtttctttcttttagttttagaatgtgaaagattagatttttcttgttcaagtaataataagtcataatggctatttctctgtatatattgttactcttttttataattcttacaatttggttcttttagttatgttcaaaatatgtacaatttggttcttttttatatctaacttttcttctaaccctgaaataaacaattcgcctatccacagaatccagtgtactttctataaccaggaccagcagcagccttgttcatccaatataattaaactacgtagctcaatttgttgcaaaggggaaaatatttgctagagaacaagtatttgtatttgcactgtgttgagagaattgggggaatgaatcaatacaaatgtaacttaaaaaacaacattaagaaaagaattacaaaacttgactttaataatcaccactgttattaaacatagcagctttacaacttaaaaactatcaaaccaaactaaataggagctgtcgaattcttttctctactccttgatcatagacaaaaatttcttagcaaaggcccagcaagatcccgcagcatggtttgcatttacatatacattgtaaatattgccaacaagagttgtttggatctacaagattacacaatgaatgcattaataatctaggtcactttccacgtcgtatcaaatagactcctaaaaaatattgtccaaaaaattactggtatggtataactaaaattgagttacagaatacaaaagtccaatccagtaacccatatgagctctcttatctgacaagtattctggtcaagcagagatagttgaagttgttgtggcacattggcaccacaattgctagtactgaagttgaactgttgatcttaacccaaaaatgaatgaaaaagcaaaaatgagacagaagtacacctactcaactcccttatgaatgagtagcttccttctcagtttgggttctttctgagttgctttgcatttcaagtagcttctgttgttcttcctcgctctctagcgtcccctgtgcttttacttcttgaacagcagctttaggcttgttgcttgtagattgttgatacataacaccccctaacatgcatatcaaaagccccaaagttccaacaaatgtcgaatgcttgtcccaaattacaaaattgatcacaactgttaatagcttgttcactattccaagaactgtgaaaccagttgcagaaattgcccgtctacaagagaaaccaaagaaagaaattgacaagccaaataaacaagaaagccccaccggtaaaatcactccaaaagaataccaatctgtctcatctgagatttcatgctttatctttttcaattcacccatgataagcaattccaaaggaaacaacagaagggcctcaaggttgttatacaataccaacccccatgtatttagaccaatggtcataaccacatgttttatgtagacaaagtctatggacatgctaaccaaataagctaaagcccagctataagccatgaatgtgaactggtaatctgtcaatacataaagcacgcttccaccaaagatagtaccaagtgacatccaagtcttcacagcgggccaaggttggtgtaagaagagagtctctcctatggcaacaaatataggcacaactgaacggaagacgatgaaggtgtcaacattggcatgaaggagcaactcactattggtgaaaagggaaagatagaatataacagcagcaggtagaaagcgccacattgtgaggagctcaagtcggtcatgctcaatgaacttaagccatccacaaatgaagaccccaaaagcactagtgaaatactgcagagcagttaaggcaccagggtaagggaatttcatgatggcccatttgttaattatagagagcaaagacgcagataagcagtacccagcagctacaccatagacagaagcatgttggaggaaaacattataccaatttgcttgaatttcaccagatgctttgggatttatctgggcactacccgctttaggattctcctcatcattctcattaggcatatctaacccaaaacggaaaaataaaaaattagtcaccaaaaagtagaggaaaactcaaacccaacactataatgaaaataaacaaaaacagattcatttgatacccagatccagaatgatagtcacagaaagacccagaattcataatttatgaatatgaagtaatattaacaaccaatgcatttcaaacataaaacaactacattgaagaacctgcttcaattcaaaccaatatacattctcttttttgtcatatcaatctaaggacgattttgatggatctaacaagtaaaattgaaaaaagaaaaaaatggagaggtgcctaaccttagggatagagggactctgccagtactgaattcctttctcctttacttcccctctgctcagacagacccagcggttcctctttactccgtttcgttttctcagctcacactctcacgcgtttcgctttcagtatgcaaatttctttcttttgctctttctttcaattttctcacttttattgttcctctttttacacgagtgggcttgtttaggatacgaatacattttgggccatactggtagcccaagaaggacagtacagctcaggcctaatctcctttccggattaactttcaatcattaagcataatttaaataaataaaaaaaacgtgctcaaaaaatattctctgaaagaaaagggtctaaactaaaccacacatgcatttcaaaaagaaaaggaaaaaaaaaaaaaccaccacgatcaatcttatctttttcacccatgaagtgccacgatggcggcagttatttttttcctctttaagataactgaagaacgtcgtaaccctatggttagattatttaagcactgttctgcctttgtattttgaaaaactggaacgtaatagcactagaacactattgctcttgtaaaattttctctcaagagaaatattgcttcttcttccaaaagtagtgttgtgagttaaaaacacaaaacactaaagtactaagtgtgagcgatattcacataataatatatattgatacaatggctaggacatcactattcggacaatcagtcagtctcaacgccctccgatcatacattgctgagttcatctcaaccttcttctttgtcttcgttgttgtgggctccaccatgtcatcccgttagtactttcttcttctaagcattttcaatttcagtatgaattcaatttttctttttccatttctgttattatataatggtgtgttatgattattgatattgttaacatgtggcagggaaattgc

SEQ ID NO: 186587 - DNA, 3980 bp, Cannabis indica
aatttaagggagacgttagttccttgaatcttctcgaccttctgatggttgtaatcttttcattaaggaagtattgactcttagagcagtttcaacctcttctttgttacccattgggtgcttagggagcttttttttcctttaaactttgctcaacctttttcatcattctctacattcatgccccgcttttgaatatttgttagtgcttgacgactaaggatgcatcgaccctatgggccagtcatcctcttatgtgttggtatggataaggacgtatcggccctgtgagctagttatcctcttattagcttataatttttgattgacaagcgtccttctcatttttagtccatagtactattttactaagcgtctatttaagtaccattttgggctagccaactcaagtcattctaggattattttcataaggtagatttggtgcctcctcattgttattatcttggactgcaagggtagctaatcctattcttgaagaggcttttttggcaagtagttattgtttgtgttggcgtcgcccaacacattttattgttccaccattttggttactttggcaatttcaatcgacaattatagtaaacaagtagagtgtatgggtggagggcgatgagcatcgcatgtaagatgaaaattaaatatttcattaataaagatagacccacatgtaagtacctgggtgcagttgctactactagaggactggaggtcaacttaagtgttccctttgatttaataagacatactaaacggcataagatacttcagggagccaacctaaagaatattttctgattgtttatggtgaagggggtagttccgctttttagaatttcttagatatttggcacccatgggttgagggataaaggtgtcttttaggcgtatcaattgataagttcaagggtatgtcgcctaacagaccctgtagaggtccaatgagttctccaatgtgtctccacccatatcgtcttctaagtctcggttaccttcttccacagaaacatactttttcattctttcatataagtcatcaagattgttcaactcatctttcagcatgtttccccatattttgctcttggggcgtattcctacaactatggccatcttgagttcatcttttgattccttctctatttttgtaacttcagcgttgaagcgtcgaatgtagtttctcaaacattcttattctccttgcctcacattggtgatgcttatgatgggcatgatgtcatcacatgcagcttgatgttgttggaggaaatcttttgagaattgcttccaaggtgtgattgttcctagttctggttgattaaaatacttgtacatagttccttttgacgtgaccatgaagcattggcatctagctttgttagagactttttcatcctcatcagttcattaaaaatgttgagatggtacttcatgtcagtagtaccatcatatggtgtcatttgtggctctttgaagttaggtggaagtagttccacttgaatctcccttgagaaatgagattcttcatcaacttcctcatcatcattcaagcttcctcttgaggcgactgctattcttcagcataggtctggcatttccactttcagctccttcgttttttccctcattctccctcgaagattagtaggtggaactttgaacctcttcattgtttgcatgggaggtgcttgaggtagctctctcatttcgtctgtctttgatttctcaatatagtttaggaataccaccttacatttgctttcctcttagaaggaagccataagtgaggtttcacctagcgtgaaactttttagatgaagtttcttctcaactttatggtgtgtttccctcggtgtgacctttcaagggaggattagctcgggcagtctctgctgacctgtaggacatctgtctaacgaaatgtatgatctacagctatcttgagggaaaccattagtaggagcataaatttccctccattaacacgtgcaatggattcttatatctcttttagtttgctttcgcacttggagagcgatacttgggttttaccgagtatgccactcaacaccttttacaaaccggccaccatggtctctaacctctggttcttccaatggaggttgtttatctcctcttcatagaaacaaattcaggagcctgagctcaccaattatattaagttatcttttctaagactattgcttaagacgcccaagccttgtagagcaggtggcgacaggcatcataccggagacggttatctagatggtcagataaattcatcgatggggttagctactgatgacatcatcgtgccatgtgatgtcagaggcatcctctaagaattcatttggttttctcttttggtttttgaagaaactcgatctctcatggtttgatcttctaagctttggttgtttccacctagatgatgcccggaggggtaaggtagggggtctcctttgatagtgaccaattgtttattgtccacggggattctgatgccttgtagacatcaagaaggttttggcatcttcgaatgttattgaaatagcaaggaatcaacaaaactttaaactttgtcgctcccgaaaaacaatgccaaattgttgacggtaagaactcgtaaatgatacttgtggctagaaactctgagtatatatcaaaatgcgagaaaatatatgaaatcaaagtataacttaagaaaatttgtagaacaataatggtgggaaatgagcttccttgtactatcaattcaaggatattttttacaaagagtttccaactacttttaaatttaagaaagggagtatttgtaggtgagtcctattggttctcatttacatattaatcctctagtggcccccaagttctagggaaggacgtcatgttcttgcaagctacagttacaggaggtggtcttgaaatttttactgatgtcaagtgtcacgtggtcttgggggcaggagtagtggttgcagcattctcaatgtcgggccaccagagcttacaggtaagatgcctctactactccttctcttcccatgcttatgtgttacagttgaagcatggttgtactcgtgtgtgatgtcgttttgcttcttcccctcacaacatgctaaatgtcaactacctcattgagagagtgatgatttaatacaatgtcctgatagggttggtgaggctaagaaacatgcattcatgcattgagattctaacacatgcgagtggcttgcttcgtgcaagtggaatgatacatgtgagtggcctactgcatgcgagtggcttgatgcatgtgagtggcctaatgcatgcgagtggtgtgctccatgcgagtggtcatgtacatgcaaagggcctactgcatgcgaggggtctgttgcatgcgagtgacctactgcatgcgagtgttttccaaaagttgggtcctctcgcccactctcaccctcactcaccctctagcccactctcatcctcactcaccctctcgcccactgtcacactcttgccttatcccaccacctcacttgctctcaccctcttgcccactttcaccctctcatccactctcatcgtcactcgtcctctctcatgtgaatggcccggtgcaagtttgggggtgttgaaatacttgcaagcccttacgcttccttttgtattttgtgcataattccttgaatattaatctgatttagattattcaaatgtttcaaaaagctaagaaagagatctaaaaatccttgtgcatcttaagatgtttgcaagccaacaagcttgttgagatgcttgtattcatgcaatcactttgcttaaataatctcggaacatagtcttactaaattttggggttaacatcttcgtaattaatttgtgatatgttatcatgatcatatatgaatgtcttcacatttaacattgaatattaattaatcctaagaagacgttatgtgtctttt

SEQ ID NO: 186588 - DNA, 1558 bp, Cannabis indica
aagcatttaagtaacgtgggattcggaaaaaatgtgacgtggaatgtataatgcgtactagacatccgtccttgctgactcagcaacttttcaaattgccccttattttcttccaaattatccttgctctactactattattaactcacactagttttcaatggattatatatatagacacagatagaattgtgtagatatatatatatttatataggtctgtgattggtataaaagaaaactagaaattatttttaattagagttggaagaaaatagaatttatcgatctaacagaattgtaacattaatttgatgtaatattaatttgtaaaaacaaaactgtgttataagaggaattaaattaaagtaaatgagcaatgattgatttgcatgtgagtactatttgtttttcgttagatcgcgcgattattacaatcataatgtaaagctgcatgttctaattcgatcaatcatgattattacaaataattgatgagcaaaacctttttctatgtatagatagatagataattaggttcttgcatattgtatccatgtactatatcatcactaccaaacaaaatgttccacccgacccttaaaaaaagtttagacaagaccccatgatcgatctctagtctcaaccaatctcaattcgaatgcatgacatctattcgaatagtttggttattaacccaatttaagagattcaaataaattgaccgatagaatttcgattattaacaaaaaaaaaaaaaacaaaaaaaaaaacctcatcacatgatcaatgtgtgtcaaatattgatgagcttcgcccacaaacaaaagtttataatttctcataaagattctaaatctaactaattgtgaacaggtttttattatttttcattttcggtggatatctaaatcagtatatactgcgtatacaattatgtggatcagagaaatatacgggtcgatcgcttcgccggatacatatgaatgaatgaatataatataaggagcccacggtttcggattccaagcaacgcattaacctaattcccaaggtctctcgatcactagctatagccagccatgcctatcggtatcttgatttgagagtggaaaacggactaaaggtttatttgaaaaggagtggaacccatcatttgagatcaccattcatttagtgccacgtgtggggataagtgttagcttcatctcatcatcaattcaaagagtgtagcgagaaaaaggaaaaaaataaagtgagaacaagaaaggcagagcctcagaggtggatagtcatgtcttcacgtaaacaagttgacaaccaaataatgaagaatcccattagagttggaaaattccatattctctttacaaataattgatatattaaaatataagaaacacatacttacatatagtacgaaggatcctttaatttgggtacaacctcatcaaatctcttaattttatcatcaatttggaatttacgtacatcatcacgttccacccctaacaaaattttaacgtattaacaacttaacaataataaattacatttt

SEQ ID NO: 186589 - DNA, 4791 bp, Cannabis indica
tacccctcaaccggcgccaaaaatacccccctttttttttcgttaaataaaataaaaaagacccaaagaaagaagaaagaaaaaacagaagagagagagagagataaagaaacaaatccaggaagagcggggttcagtcagtctccagttatcggtccgagtttttcgaaccatggacctccagagctctgtcaaacaagccctaaatgcactatatcatcatcctgatgcagcggttcgtatggaagccgatcgatggctccaggattttcagcgcaccctcgacgcttggcaggtgacctgtcgtttatctcctctttggggatttttgacctatcaacgatgcttttcttcaccttttcggatttggatttctattggactttgattccttcacttgtcttggcgatttagcattgatttggttattgttcaagaaattagatgggattatattttggtttttctttttttctcttttgaaaagaattgttttgtattggttttggtattgtttgagtttgtaaatttggcgactttgagttcttagggcttatattgcttttaattgagctgaggagtgatttttgttttgtagagaaaatggtggatacggaaaacagttttactggttttagttatagatgattataagatattaaattgtaaggggtaatgtggttagcgaattcattgttttgattctgtgttatttgattatgtataagcttcacgagattaaaggaagttgacggttaagtttcactttcttcaaacgaatacttcgtagttgggttcactacaaagaatatcaatgtagaaggcttttgagctggaagttggtatctgctatgaaatttaacattcaggcaccccttgagaatgcacagcttttgattttatgacaaatgggtgacttttatgaatattacggtagtatctattctaattgggttcattcttatttttatggaaactttctataggtggctgataacctgcttcatgatgcctctagcaatctagaaaccttaattttttgtagtcagactcttagaagcaaggtaagttacgctcaattaattaattctggatgtctttgatccaaactgctaaactttaatttagtgtgtgactgttgtttgtgttttgagactttgttctaggttcagcgcgattttgaagaactaccttcagaagcttttcgcccattgcgggattcattaaatgtgagtgagtattcattctcagtttccacataggagaaggttagctattatgtatatatgctgaaaaagtttaacatgaaattataatgacaatggctgtttatcttgagtgaagtatttgagtcctcaatcatgtgacaatgtattaggaggagcacttttgctactgccttaggatgtatttaagatgattaccatcataatttcattaatgcaatcttgttttatatggtaaaattgtcatgcgtatggtttctcatggtaggcttgtttcttttctcttacatatgacatgactttgtcttgatttgtctattggattttattgaattctagatgtggttaatattagaaatagtggagtttgaattagaatgagctagtctaagttgctgccctcttctggtgtgcattcattacaatttagttatttattttgtaaattgtcgccaaattgttatacactcaggcttgatcctgtctatacaaatgttttagctcaagaaattactcgcaataaatgaatgttttaaatgcagaatttactgagaaagttccacaagggccctccaaaagtcagaacacaggtatgattctgttcttattttttacagatcacctcatatatagtcatgttttaccttgatgtgcttagcggatatcttgcttatcaaatggaattatagattagcattgcagttgctgccttggctgtatatgttcctgcagaagattggggggatgggggtattgtaaattggctccgggatgaaatgaacactcatccagaatacataccagcattcttggagctgcttacagttttgccagaggttaagaatatatcttttgacttgtgatataatttataaaagggataattactgttaaactccctatctagtttcatatattgcaattaactaccttgtaaaatatttggtggcaaaagtatctaaatagtagatctttttgaagtcaactactacctatgtaaaacaattgatggcaaaagtacctaagtagtagattgctttgcagttaattattaaattaaatataaaattatttttaaaatctagtactgagtatttttttttattctaatttgtttttacgtaggtagttaactgcattaaaatctactgctgagatatttttgtcatgaaagttcttagttaagtagttaactgaaagaaataaaactacaatgttggaagttttgccactattttttttacataggtagttaattgcaataagaaacgacataaggagtttagcctcaattatctctttataaaatacatatttgcagagctttatgcagttgtatacatgatttcactgctcatcttttgttttcttatttttttctcatgatcaggaagtttttaattataagatagcagctcgaccagaaagacgtcgccaatttgaaaaggagctgacattgcaaattgagattgctcttaatatcttaacagcctgtttgaatattaatgagcttaaagagcaggtgggaatatttatttatttactgcaacataatctacctcataaatcaatctacaatgatttgaggatattttgattaaaagattctgttcggatacttgcatgttttaagtgtcctattgatcatctcatcttatttgttaatataggttctagaagcgtttgcttcttggcttcgactgaagcatgggtatgtgttttatcttttcacattctctctcacctctcacctcccatcatacattttatgtttttcttttttgtttcatgggtaaaggaaagtataattctgttatgaattgggattcttatagttaaaatctgcataaaagaagataggaaataaattttgttttttcttatgcataataagcaaattgtagtactacaattcaaaactgtgttctttttgtactctacagaaatagcaaagtaaaaaatgatttcatggtcactattcgttaaaatttggctggtttcagggtcccaggaagtgtgcttgcatctcacccattggtgctcactgctctctcaagcttgaattctgagatactttcagaggcatcagtaaatggtagtctcccaaagaaatgcagctatatgttaaatatatcatctattatatgtttcctatatggatatatagtttttcactttattgttttattattaattttcttaggaaatggatttctatgtttgtctatgtttatatataaaagtaacctgacgtgtctaaatttatacacttgcattggtgttgttttgtaagctgttgatcttatagttataggtatagaagaacttatggctggagtttgtattatagactactttctaaaatattagacattcaaattttttactcctattgatctaataaaatttaattatcgtgtcaaaaaataacatttagttattgaatataactccacacaaacttgtagtgagatttcaggaaatgagaaggtagccgcgaaaaaaaaaaatcagctatttacatctcaaggatctttgacttgtttcttttgtcccttgttctctttctgtttgcagttatttctgagttgatccattatacagcagccgggagctacagtggtgctcctgttcatatgcctctaattcaagctattgttccacaagtaatgaatctgaagggacagcttagagattcttcaaaggtagcgaatttgtgcagtccttaaagctttcgcacttgtcttcttaagagcctaatagactaaggctatgtttggtaggaaggagagagagagtaggatggatggagagttttgaaaggatggggagtaggaatgatggagaagatagttactctccttcctattgtttggtattagatataaagtttgaaggatgaagagtaaaataaatattaaaattactatttatcatttttaatataattatatattttattttgaagggtagaaaagtcattttagatagcttttttgtctttttcttcaattcttccgtttttggagggattagaaatttgtttatttggagggaaagggtctccctccaacaaatacaatcctctccctcttgccgaacaagggaattcatcaatccctctccctccctcctctcccctcctctaccaaacatagtgtaagactttattcattatttaatatttttctggtttgcaaatatattgttgcgttgggtttgggtttggggtggctctaactattctggtaattggtacattgtccaattatgttgctcctttattggattgggggtagtttttaaatgcgaagatggggtgaagatatatgttgctttctttaattagcataatctaaatatttatttgctagaccctcctcaattgcttgtgcagtggaaaaaagtcagtttatggattgctttttttttttaattctagcttttaattttcattttggtttaggatgaggaagatgtgaaggctattgctcggttatttgctgacatgggtgattcatatgttgaactgattgcaacaggtacctgtattactttttaattt

SEQ ID NO: 186590 - DNA, 5323 bp, Cannabis indica
ttgatagagcttggcatagatatttattttgccaggagaacatggttgtatatgcatttatgaaacgaaatgaccacttattgaacttaagaatttaagtgtggattttgtctgaaaaaagtcaactgtggatgccacatgattcatgtagcaatatgcaattaaagaattatactccaattttacctgttgccaaatcatgatgctattgcaagacaaactcaatttatgttgtgggattccatttatactggatgtgggtttgtaatgtgtaatttatttattgttgctgttataagtattgtgtgtttgtgtgcacttggatgtcaattgctacgtttcctactccaaatcttttaggttacgtttaatttggtgtcaatgaaatgggatgaaatagaaatgaatcaattttcattctattccttcgttttgctgcactttaaagcattggaatgattattccaccatttcagtagacaaactattccatccaagaatttcattccaatgcacaaataaaaaaacattaataacatttttatagattgtttttattcatatgaaattttattccattccagtattattccctttcccattctcattccaatttctctactttcgttactcccaaccaaatacaccgttagggttaggcagagagttcccatttcaagcttagacctactaagcaagtttgattttaggttggaccacttgtttccctttccgaatgttatttaaacaatttcaatgaatttctctatttctttcttgagaaatgttctggaacttaaagattaaatttggcatgcagatccatatgttgcctgacaatgtatctaagatacagttggagttgattccaatgattcaagaaatcatttctgagtggcttatcattcactttttcaccaccacatcctctgagtcagcatcaattgaagatttcagctctcaactttctctgttacaaattggtaagctttaacatttttcatgcacacccaccccacccatgtgcattagctggaagatgcaaggatttggggttgcagaatttggtttatgcaagccatgttgttgatttcctgtcaattttcatgccccagataattatgcaagcaaaagatcttggaatgaaaaccttgggaaatgcgatttccctttggcctttgtgctcttattgaacaccagaagttccaccagagacagtcatctttattcaaaatatcttccaaatttgcatgacattgttaggtctgttcggaacttcagtagctggattatttggggcaagactagggagttaactactttcttgagccattcaactgagcttgcattgatcttactgaagaatgggcagtatgatgctgttgaggttttcctcctagagctggaacttggtttccatcaagatttttttaaatatcattattataatattgtcttttaacttgtctgtttatttataatttatgtaaagcacctactcagtatggtcgaggcacattcacagaaggagaagacattggaaactattcaagatgctgatgttggatggtgcatacttcaccatgttcttggatgctgtcttcttgctcaagcacaacgtggattgcatggaaagctgaaagaaaagaaagtcagtgaggctgtcagatgtttcttcaggtatctacatcctgtaagcttttcattctgcctttttctttacttattttattatttaattttataatagaaaaaaaaaatagtatttttctaaagagtaaacaaaactatgatgaggaaatcagtgttctaccatccaaaacaaaaaaaaaagcagataattatcttaaacttccgtttggccttatcagtttgatttccaagttactggttggttttgccatatcatgtgtgatccttcatacctcccaggttactagtcccttttctgagaaattcaccatctgaacttctaattcttgctctcccccatatcaagcatttaagtgttcttgaggatcaaagaaatttcttttttttttctctttggcaagaagaaaaattctacataatgtaaactggttactacaaaattatagctcagcaggagatatgaaaagtacattaaaaagaaagtcgaagattttaaaatcaaacaaaaaccactcacaaaattatcctagagttatagctgaaacattcacttaaaagacaagctcatgaggcttcatgtctgccttaagagagaaccttgctccaaggtatgtcttcgagtctgggacagcctcaatgcactttaacaatggagtgtccactgtcttctgatcatctttctttccttgtggaaactgattcttctcctctttctcagcctcaaagaactctccctcccccttcttagtatttctcatcaaacttctccaaattgacaccagaatcatcaaacttggtggaggttccgatcacgtaagattgattcacacgtttgatgggaactccattgagcttgaatggtccagtgaccaagagcaacccagaggaaagctgcttgagaaagacaactctcttcccctcgaaccttccagccaagatgatcaagactgtccctggagtgatactcgctctcagcttggtcggcttaggcttgtgctagttaacaaggggctttctcacgtcctcagagggataaaacttaggggccttctgctttggggtcgtggtgtgggaagacaccaccatttaggagcagaaaattttcttttgtcctaaattggaattagaaggaccccttccatatatgtatatttatttatgtgtatgtatatgtaatatgtatgtatatatattctaaaaccataaaagaaaactaaaatgtttgtgttttgatgctagggcaactgtatgttatgaatgacctagcaaccataaaagaaaattaaaatgtttgtgttttgatgctagggcaactgtatgttttgaatgacccagcaccagtagcaatatttagtaatttgttttctttagtagagtctgtagccgtagtttaatcatgtcaaagacagatatggcatgtttacttatatgtcatattgcctttcaataattcaaattcttgatctttttcagttatgtatggtgtttcttggttattgagcaaacctaggtcacataggttttgaatgaaatgaatattcttttacgacattgttctcttgtcaacttacttaaagttctgcattgatcttgaaatattaacattttcaatatgcagagcctcatccgtaaaagatgctgctcaaactttgcagagtttgcctccagaagtaggaattccacatcttggcttcagtaagttagccttattagaatttcagttacatatgaagtagatctttcagtatagtatgaattttattgatatcaaacattttgtttgtttattgtcattccaggtgttaacacatcaggtcctgcatggaagctacattattatcagtgggcaatgcaaatatttgagcaatataatattagtgaaggtgcatgtcagtttgctcttgctgcacttgagcaagtcgaggaagctttaactgtgaatagtgagcaccatggtagagatccatttgatgaatcagcagccatcatcaaaggacgactttgggcaaatgtcttcaaatttacattagatcttcatcactattatgacgcatattgtgcaataatatcaaatccagatgaggagagcaagcagatttgtttgaggcgtttcataattgtactttatgagtgcagtgctgttaaggtttctaccaagctaccctccctttaccacaccctctattttctttcttcactcccagtgttctcttttaatttcatctttggtagattgtgcaaaaaaatatattaatgatttcgggaaacaatactaagaaaaccagaaagagaattatatgtcaacaaaagtgaatattcagcaaatcatttggagtagccaaatatcgagagtatttttaaaatgacaaaccaaaatgtgagatttggcatcaatatgatgtatttaattagcagcaaacttaagataatttattctctatttcaaaatagtattccagcattgcttgctttgtcgtctatttaaatgcagttaaaatgttgctgattgttttgaaaaaattctaaattatgttaaagtttgttcctttctgctgagcttatgtttctttacttgttgttgctttgaatcttatattcattttatttttagattctttgcagtggtcaacttcctttcattggtttaattgacaaggtagagcaggagcttgcctggaaggtatatcttcgtaaagtgatttgttcactgtagtccctttgtatttaatgcaatttgatggttaggtcatttgtatgcaggcagagcgctcagatatattagcaaaaccaaacttgtataagctgctttattcttttgaaatgcatcgacacaactggcgaaaagccgcaagttacatatatcaatattctgctcgtttaaagacggaagcagatcaaagagactaccaacagagttcattggatttgcaagaaagattaaatgggctatctgctgctgtaaatgcccttcatcttgttcatccagcatatgcttggattgatcctatgtttgacagacctgtccatgaagagcattatccaagtaaaaaggctaaaacaacagtagaggaagaacgtaatagtgcagcaagcaattttactattatgttgacatcttcaattatttttctggcacagaattgtcttgcatccttagctgacaataccttgagatttgtgctattagaattttgcattgcaaattctatttgtttgactgggtacattgttttaacttttttgcagaaggtaaagatattcagcccaagaaatggcgatgtattgatatcgaaagaattgataatgagtttgtgctaacatcagcagaatatttactttcattagcacaagtgaaactaaaatttaatggtaagaatatataatttgtcttctgataatacatccttgaaataatttaaacgttgcttatacccttttcttttatgtttcttatttatttttccaaaatatcttgcagaaattcgcgagaatttaccaaatttgattggtattttagtcgaggcagatatatatgacatggcattcacagttgttctaaaattctttaaaggttcagacttgaagaggtataattctggtttactatattacaccatcaatgggttttattaggcttttctttcttataaagtatgaccgggaattcatt

SEQ ID NO: 186591 - DNA, 2660 bp, Cannabis indica
agcttcatcatcaatagaatttcgccaaacgatagtaacatccatctcataaataaaagaaaatcgagaatcaaaaatgggaagaccaccttgctgtgacaaagttggggtgaagaaagggccttggactcccgaagaggatatcattttggtttcttacattcaagaacacggccctggtaattggagatcagtgcctactcacacaggtatacctatactttttttctcatatatatatatatataaagtaattcacatctttttcttttgggtcattttggaattgtatttttttatgtttatttgtgtggatttagtttcaaactaataatggttgatatttttttctagtaagtagtacatagctaagtaattttatttatttggattttcaggtttgatgagatgcagtaagagctgtaggcttagatggactaattatcttaggcctggaattaaacgtggtaacttcactgatcatgaggaaaagatgataatccaccttcaggctcttttaggcaataggtgtttaattttcttttccttaattcctacttttttttgttatatatacataatttttcactcactttctcttatccctcgaagtttgtgacttggttttttcgaaaactggtgaataataaaaataatataatggaggaaagagagagggattatggaaattgtcatttcgatacatatatagatttgatttaatatgtacaaagctaaataggtagattttgtagattcaataaagttgttctaatatgtagtaatagttgtttttttttttttttcttttttgttggatttaatgatgtgctgatgcaagtttttatcatgtattacttttttcagatgggctgcaattgcttcttatctaccacagagaacagataatgatattaaaaattactggaatacccatcttaaaaagaagctcagaaagcttcacactgggcatgatggtcaaagccatgatgagttctcaactgataacaattcgcaccaaatctccaaaggccagtgggaaagaaggcttcaaacagatattcacatggcaaaacaagctctttgtgaagctctctcccttgacaaaccaattgatcatcataatcacaatttgggggaatctaaaccgtccattactacaaccacttgtttccacactagttgtgatcaagatcatgatcataagaacactactaaatcacaccaaccactatcatatgcatcaaacgctgagaacattgcccgattgctcgaaagttggatgaagaattccccaaaatcggggcaaacaaactccaacccgacccgggatttgctccaaaacccggttgcttaccagcccaataataatggtactagtactaatactacttattcaagttcaagtgaaggagctcaaagtgggaccactacacctgatcacaatcaccataccaatcatcgtcaacataacaatcaggccactgctaataatacaaattttgagtactctttgtttagtttcaactcctccaccgcatcagaatccttgtcggccgacgagactgcaaatttgacaccggagagggccacaagtactctgtgcttccaagatgagagcaagcctcataataccaaaattgaggagccagtgcaagctcctctcacattgcttgaaaagtggctccttgatgatggtgcagctcaagggcatgaggaccttattaacatgtcgctagaggatagtgcagcactcttttgatcttcctcgtcatacaaaagaaataaataataaagaaagtaaattatcaaagtttttaggtttttgtggatatagcttgttctaagctgttcttaattagaacttttgtgtttaagcctacgaagacatagtcaaaagatgtaacagtactatgcattataactcactgaaggaaacagggaaacaggaaaaaaaaagtagtaaattatagtataactacatatacataaatatatgtgtatgatgttttataaaataatatatagctttttatggacttctggttaatatatttaatatttaactatgtttatttttcttatgcatagatctatgtgtagataatatttgcatttacttgtacgtaagttcgtaacataattttgattgatggtgccattcactattataattatatggtttcttctttggggtaagttttaatatatgccagttgtataataacaactcatttatacctacctacaagtacaacagcataaatatatacattcaatattaatatttatctccaactctcatgagtaatgtgttatttatttatatattataaatttttaataagataatagttaaagagccagtgacgtcgtaaatttgttctttaataaaagtaatatgtaataaatggctcactgtggtcactattccttgtgtaattattattattaattaattttgatttgagggatttttatgagcggttccaatattgaggataaaaacaaagaggtttttgtcggcaaggaaactgtattttatcttcaaattaatcactctttgttttctctggttttatttttgggataaatggtgtttatagtaaatatagatctgaaattaatatttctatttataacaagaatgggacaatgaa

SEQ ID NO: 186592 - DNA, 2396 bp, Cannabis indica
tttcaaaaaaaaaaaaaaatgggttcagtacgctcttgtgatcaataatgtgaatgcttttaaattatatattttagacttagatctaatggtttttgttatataaagagccttatcattgtacttgtttttgagtttttacttttctaaaatgtgcttccaaaaagaaagtaaaaattgtccactattactttttgtgcagtatcatgatgatagaactcgaataaaggatgcagtcaagtcaggaaaggtatcatttattaacattttctatttgacagaccttaaaatatgtttaaggacctaatagctgtcatttttcagattatgctttcatcaacctcaacatttgacgacttcaaacacatgattacaggagagattagctcgccgccagtatctgatttcaatttgagggtatatgatttactgtttaccgctctgatgctattgaattatatgatgcaacagtgaagattccatggcttatttattatgatcatctttggattggattgctgttttctcccgccgagtcccttatgggcttggcatctacttggataactgtagctgttatttcaggctttgcaaatattataggattaagtagggtagggagcatcaattttgaatttgccatgctttgcaaataacagtagctgttatttcatgctgagctaggttttcttttttcatcatttttcggttgagatttctgggtgcaaaaattgattattaaaataataagatgtttactaaaattcttcatggataattttttaagtgtttttagtaggtttagtcaattaacaggcatttttcctaggaagagtacttggtggttatgtgtttaaaaatgacttctttggagacgattgtttcagtgatctgatgtgatttgcgatttccatgcagtttgtttttgatgagttacttgaaagggtcagagaaaaggaggataaagaggctaaaaagcgtaaacgctgtatggaagatttttctgatctgctgtcttctactaaggttgagcgtactgcaagttatagctctcactttcttatgtgagtgaatgggataaagttccccttctgagaaatttactgtctagttggtttgatcacttacaggatataacagcattgtctggatgggaggactgcaaacagctttttgaaaatagtcaagagtacaggtattgcttgttaaaagttggaaccataatcaattggttctgattcagctactcatttaaattgattctcacaatagaattggttgtctgatggatggttttgtgtctagaacattgtttttttttgctaaatgcgtctagaacattcttgggtttatgctacccgtagggtttctgacaatagttgctctgttggattgagtgttattaatgtttgtctggttgctgaattaccaagtcacccttctggtaataaatgcttgattatattgaacattcttgtgtagttccattggtgatgagaatctctgccagcagatatttgagaagcatgtaacacaacttaaagagcgggcaaaagagagagagcaggcgaaagtgaaggagcagaaaagaaaggaagaaaaggtattttaattagttacaacaaatagttatatatatgtcagtttctacttggttcagttggtgtacttttctcattcttacactctgcagacaaggaaggaaaaggagagaaatgaaggagaacgaagcaagttcaagcacagaagggataaagaggagcacttggagaaagatgtatctgacaatgaaaattttgatgctgaaggtcatttgaacaaagataacaaaaggtcagggaaagacagtagtaggaaacataggaagcgacatcacaattatgacgacggtgcagatgaaaacgagaacgatcagttaaagaaatcacatggttctagtagcagccacaagaaatcaagacgagtatgttgacgatgtgtagaattaatccttgttattcctttgtctcatgtgtgatccatacaaacttggaatgcttataagctctgtcttgtcctcttgtagcatacatctgcttctgaatccgatcaagaaagcaggagtagaagacataggagagatcatcggcatagttctcgtagaagtggtgatcttgaagatggagaatttggtgatggccgggaggattcataattgttttcattctggtaattgcgcttcttttgtaccgtttttttttttttttttttctataatgctggtaagatatttgttgtttatttttacaaggatactagccaactagtgtgccttttaacaaatgtcttaccataatcctttgaatgaatatatttgctagacattatttagttggaaagataattttcatgaaatg

SEQ ID NO: 186593 - DNA, 1626 bp, Cannabis indica
attttctacagtaaagtaaattagaaaaaaacagtctagttttttcttttccattaatgttaccatttttgtagatttaattttgattattttgttctattatcaatttgtccatcaagttacttatttaatattaatgtagcaatatacaaagtgcaatatggaccacaaaaataaataaataactaatgaaaatgttataattctataagtggtttagtagttactccttaaacttaagatcgtatgagtttcttacaatttgatagaattttgctaaattgttcataatgtatagattgtgtagtgagatttgtatttttaggcttaagtgtctttaagaattatggactaataataataataataagttaccaaaactaaattgataaaaaaaaaaatatgttaatatttttcatactagtaatcttattttcataagttaatatagttaacaaaagaatacgttacaaaaaagtaactaaaataatatgttaccaagaagtaactaacacagcattacagcaagtcacattagagttttccatgacctaaaagaaacaaaaatgaatctaatgtcacatttcaagtgggagccaattggtaactaaaaagtaattaaaagtattttagaacagacgtaaaattttaaaaataaccatttgcatcaattttgggggttgaccaacacaaaaagattatttaggggtagtgttaaaggagaactagtgatcatatatgtaatatgacacctttgatttatttgtagcataaatataagtttatctcttagttataaattaatattgttgtaatttcagcaacaaaacactaagaattcaatcttaaatctgcattaatctcacaacttgaacaacaataacacacacaaaacaattagcaacacaatgaatcaaaccagaaattaaacaagaagaataacaacacgatttatcctggtttcggtcttagaaatcaattcgatcccttgccatactccagttgagaaaacatcaccagtccttcattcttatgtagaataagagagtaataacaatacaagcaccaattaatccaagatcaatcacagctttgcaccactcgagaaacgcccctgagaaacagtcatagtttctctaatcctacccgagtacaccctctgttcttgatcccttcaagaacattgttttacggcttagaacactaagcaatctctctcttgctctatcttacaaaagtgaaaagagtagtctatatataggtataactcacactagggaataggtgtaaaaaccgataccaactaactaactaacataacagaaagttagttaagttagttgatgtaggtgagttagttcatggtttagaggatcaacctccacaaaatacctaagtaaattttttgatagtaaaaatacatttcatcaatatttttgttagatttccatcttcaaacttgcagacacacttgtcactttaattattatcttgctaaatttaattttaaattataaatttaatcaggaatcacattcgaatcgctaaagtttgaaatttcaatttaaaagaattaattcttagcgtaaaagggctcgtttggaacgacgtataggttcgattgta

SEQ ID NO: 186594 - DNA, 8386 bp, Cannabis indica
aaaaaccagatgcagctcaagcaactcagcttatatatgatctctgcaaggttaataagttaagaaaagcagtgagcgtgatggaaatgatggttgcttcgggtataatacctgatgcatcttcatacactttcttggttagtagtttgtgtaaaaaaggtaatattggtcatgctttgcaactggttgagaatatggaggaatatggctatccaacaaatacaatgacttataattctcttattagagggctttgtatgtgtggtaacttgaaccagtgtttacagcttttggataagctgataaagaaagggttggttccaaatgcttttacatattcttccttgcttgaggctgcttataaggaaagaggagtgaatgaagccatgaagctgttggatgagataattgccaaaggtgggcagcctaatttggttagctacaatgttctgctaactgggttatgcaaggaaggtaggactgatgaggctatcaatttcttaagggatttgcctctcaagggatttaatcctaatgttgtgagttataacattgtgttgaggaatctgtgcttggagggtcgatgggatgaggcttatatgcttctttctgagatggatggtgaggagcgatctccttctgttgttacttacaatatacttattgcctcacttgctattcatggcaggactcgacatgcttttgatgtaattgatgaaatgacaagggcacggttcaagcccactgcagctagctacaatcccataattgcttctctttgtagaaagaagaaggttgatcttgtggttaggtgtttagatcaaatgatttataggagatgcaatcctaatgatggtacatataatgcaattgctgagctctgtaatgtgggaatggtgcaagaggcattctctattattcagagccttggcaataaacaaaaaacttccactcacgagttctacaaggccgtgatttcgagcttgtgtaggaaagggaatactcgtgcagcatttcatcttttgtatgaaacaaccaagtatggatttacaccagactcttacacctattcatctttgattagagggctgtgtatggaaggtaagctgtacgaggcaatggagatttttagcataatggaggaaaacaattataggcgtgacactgaaaatctcaatgcccttttggttggactatgcaaatccggcagaacagatttgtcttttgaggtttttgaggcaatgatcgagaaagggtatgtgcctaatgaaacaacttacactattctagtggaagggattgcccatgaaggagaaatggaactagcagccaatgttttgaaggagttgcaccagaaacaggtgttgagtcaaagaacagttgaaagagttaatatgcagtttgacctctgaaagtttacgtgtgcataagctatacaggtgccccaagaagaaactacaaacagacagaaaatatcaaaagaaggatactggaatgtgaatttaaatcaaggtgaccctcaagaccaagaagttgtcttgtaccaactctggtccacagtggttttaagtaactactttctagatccacaggaaaaataaaataagagaatgagagctctccttttctttttctttttagtaccttttacatgtgtaaatgaagaaaatattgagttaggcaacaaggtgttgcctctatgacatcaaatttgtttatggttcgtctctttttagttgtgaaaaggaggctgggctggttaactttgcagtttttggacagaacttgtatgcttagctaacacaatgtgtaaacatttacttctttcaataaaggcatattaagatgtctaatccatttttatcagagttcaagtatactgttgctagattctggatatcaacatttgaaatagcttatttgcttttgaactttccgttgcatccgtattaagcttataaaatcaatgggttcctttccttaagtgccattaaggttttgaaattgttacagtagcttgtaaagcaaaataggcctgcttttaggagagaaacttgttctatttggggtttgcaaaagttggaaataaagtcaaaacaagtgtttattcacttgaatcattcatatagtataagattgctaatatggaaaatggagtcgacagaatgacagccatattttctcagagcggggacagatcttgagatcactgtgtggtggaatttggaaaacgttcgaataacatactgttgtgtttcaacaacaacctcagcaagcataaaacataataatcaaaccagatatcaataattcaaaaatgcagaaatgtaaatggcagaatttaaagaacacaatcaagattatagagattcgaatttccttcacaattatgaagtgcctagtcccttttggactcctttacgattagtctttcagtatgacaattggcaagattacaatctatttaagagtacagaatttagtgatcaagtatgatgaagcacttcccttgtttgagccttgatcagaagcttcaacccttggaaacaccctgaagctcgatcctcgcttcccttggtttctcacctctagttcttcataactccatgaattttcctcctcaccgtacaaagctcactctcctctctctatgttttcttgtattactagtgaaatgaaaaatgaagttttaaataggcaaccacagtcggttaagcctttacaaaagtaacagaaaactaaaacaactaacttaactaactcctagttaaagtcttgacgatgtgtcatgatcccacttgtttcacttgccatgtcataagttttagatatcgttttattaaggactgaaaaaacaacacataccatcctaaaatgtttccatagatatatactaaaattttcataggaaaatctgttccaagtttcaaaagacaacaggctttatggagcagatgctcaaagaaatgatgaagtactaataaataatataagtgtgtatatgctcatagaaggaggctgtcatgcacacatatatggtgtatcatacaatactttgtttctattttctatttcttttatgtatgaaatgaaagtatgcactataaacaccaagtggtaaataaacagatgaatataggaaacttaaaggcaatcttaggcatttgaaatagtatgtctaccaagattcttagtttcttctaacatattgaagaagccagacaaagatgcagaatcatttttactatctctcttgaccaaccactcatcttgaagttgcacattaacatccttcctaagagcaagaacttgataattccttctcaaataatcagcatatttggtaagagcatcttgtgcatactgcttccctacagttctcacagcagccgtgttaagtaaattctccaaagaaccatgctttttcaagagtttgagagcagtttttctcccaaactcaggaaccacatgttggattccaggaacaccatcaacctcatcacccaacatgcacctaaggctcaaatcagaacaaggatcacagttgtactgagacatgtaatgtttcaaggtgtaaaaagaccacctttttaattccaccaaaggcataacaatctgaacatcttctgaaagcaattgcttgaaatctttatcaggagaggcaatcaccaccttgtgtcccttttgtaaaacttggtccacaagagtagccacaacatcatcagcctcatggcctcctattcttactaaaggcacattgcatttagaaagaaaatccgatatgatttgatgtgatcgtccgacgtgaccctttgaaggatttctcagaaacttccatctgtgtgctttataggaaggtaacaaccttctgcggtgttcgctccctccttctccatcaacgacggcaataacagggtcgtttaaactgacttcattgaagaacaaagatacccaatggccaaaagagcgcaaacttggggtgcttccggcatagcacaatgggtttacgtctaaaaagaagacccttctcctttttgtgttgggaatcttatccaaactctttgatggcgattgcccaccaactgtttgattaaaatacccagaagcagaaaaagaagttggtgatgaaactacagaagaagactccattttcactagtagtttcgttctagtcgtgggtcttccatgtgagtgccagtagcgaggtgggcatggagaaaaagagaggttgacttgaattcgagtgggaaatgaaatttccatcatatgcattttttgattgatttttcccgagctttcaataatggattcgcaattccaatctctagactctttacaatataaatgcagagattagagttacttcgattttctgcggattaaatcaatataactcttaattaaagtgaatagagttgaagcaaaaattattatatatatggatgaagtatgaagagaagaaagaaaaatcgatagcttcggttgtattgtaaaattgtaccttagattgggccgtatgggagtgaaaatggctaagtacttgattgtagaggatgagactgactacataggaaggggacgattggactgaattgtaatttcctaaatggtttggatatttggaaagaagtgggaatatcacaaatatacattttttttcaaagaatatagagatattccataattaggcacaaaacttgaaagattaaacaactattggcttgtttagcgatataaaaattgtattgtattaaataataaataatattatatttggataaaataatatattgtattaattattacaaccaaaatttttaatacaatgtatgttgtattatttagtacataacgaatgaatctatattaacttgtattataatatttacaaaggattcatggtcaactccaatttccgacccaaactcgaatctaaacccgagacccgaactcgaaccctagacccggacccaaacctaggacccgagacccagactgagaacgggaacaaaaccaaaaccggactcagactcgggacccagacccggacttgaactttaactcgaacctaggaccgggacctgggacctagatccgaacctgaaatcgagacccgggacctggatccgcgacccaaactcgagacccgagatctgcgacttggacctaagacccagacccggacccgatccgtagttggtgttaggatcgagtgtattgaaaatatattatttttacacaatctattaatacaagtcaataacaaacatagtattgtattaaatactactaatacaatgcaatacaatccaacacaatacaatacagcataccaaatcaaccctaaatctacaaggagttccaatcaccaaacacaaaacacgtgccacctctactaaatagtgagcaataatattcaaagatatattacaatgaaaaaattatgaactatggaaaaatttctaaatcttgagatatattattaagcataataataaactcattatgacaaacatcattaccattgacaacaaaaatcaagcaaagacaattagattgttgttacactcataaaaccccaaacgaaggcaaagaaaaaaaccataaaataaagtcattgcctcagctatatggggctcaatggtaccaatcaacgaaaaaatactagaaaacaacattatcttattggtgccagaattctcatcacgaaactagcatcaacaaatagattaacatcacccaaaatcaactcacattggtgccagaattcaaacttgaccccgaactaggagggtgttaaccattattcgaagaccctccaacttgagcatcttgatacctccaaagatagttaagagcctaaagacttaccatattatctgacaaaagcttgtgatcatgaacaaaagtgttacgcctatgccaaataaaccaactaagagtaataaacttctccaactcttgtttactcaaaatattcatacaacccaataggagctcataaaagacacattttaactcttaaaatccccggagagagcatgatccagttcacagagaatattgttgcagtgttcgaaaactcagatattgggaggaaagaaataatcacctatctaggatgtgttttggaacaggtctagagaacttgaaacgatatcggaaggagaggtacaagaattaactttgagatggtaaggaggaaaattcaattggctttccatgactattccacctttaatggcagagatgaatccttggatggaatagcagttcacttagaggacagaattgagaaagtagattggaagagagtattggacgggaagcgggttatttgtactgatgcttcctgggtgaaagatgaagctgggctggcagcagtaatgcgaatgaacaattcagatttttggacacacaagacttctagaatcaaggcgtattcagctctacaggttgaattagaggccattttgttagctctgcagtgggctttggaagaaaagtgggaagaaatatgtgtgctttcgaattgtttccaagcaatccaggctctgagaaacaagcaatgcccctcagattggaagacttttaatgtttctttagctattttggatagtagtaagaagtttttaagttgtgagttcttttacattagtcataatttaaatgtagctgcggatgagatagctaaaaatgctagagtgactagcaattttccaattatgattcaaggggagggaaatcctcctgtatttctcatctttttttttcagtttaacaatctcaatagttcgggggaatttaacaatctcaatagttcgggggaatttttaacggtcaaaaaagttcagagggcacgatttagtacatgtcaaagctcggggagaaaaattactaattagccaaaaaattaactaaggttttttttaacaaaaaaatttaaaaaaaaaaataatttattggtgaaatttcttttaaccaagaaagtgaaacctcgtttgctaccattttttatttatttatttatttatttttttctataatcgttaaatgattttacatcaaaatttcaaacgctcctaacgactctctctccctcctcaattcctcatactccaccaaagaaaagactccattaaagaccaagctttctcagagagagatgagaaccaagcatccagctaacaggaaagtcagcaagcccgctcgcccctctcttggtctctctctttctctctttctctctatctatatatatatatatgtatgtttgagggttcttgactcttttgctcttaaaatttccaggatccagctcacctgcaacgactccggtattctctctcctaatattctgttgtttggtttgcttacaaaaatgtagtgaggagtgtttaaactttagactacggaatattcgagctaattctacatttacctttttccgcttctaagaatttgagaaattttggttttaggttttttgagtttcgatgttttatgagtaatgcactgttaaactgttaacttcacattaggaagaaattggaactgtaaatagctgtttgtgaagcaaattctagtttaatctatacatttaccctttgttatatcttggatttccattttctcttctttggaacaaacaaagaataacagaaattgttgttaggaaaagaaagtattcaatttaatgtaatgtgattttaaagaattttcaacttttcttaagatatgataaaagagaagaaattaaaaagtatacatagaatttcacgaaaacattttcttcttttgttcctaactttccccctcacttggtaagatccaagtgcattataagaatttattagctctacattaagttcaccctgatttggggtttttttttcccatttccttttggacctcagaaatgcaaaagttagttaacagtgtttttcaatttgttaaccatgttggcttgttcttctcactcttcttcattcctactgtaatatcttagtgaaacaagtcttaattttgtgatatgcattattatttattcaatagaaaagggcagctggcacagagggaagaagatcacaacaagatgctccagaaagtaaatatgttctatttgattatatttggtctacttaaatggtggttgtgggggttctgatgcttttacaattgttatttctttttataatttagcatcgacaacaccaagatctcaaggatcagaaccggcaaggaagaagcgtcgctacaagcctggaacaaaggctctccgggagattcgacaataccagaagacttggacactgctaattccttttgctccattcattagaacggtaagtgtgttgtctccattcattgatatacaccaagattt

SEQ ID NO: 186595 - DNA, 2254 bp, Cannabis indica
tttttcttagaaatattgtgagacaaaatatcattaccatgtaaaaatttactgccaaaaaggttggcattaagttgcctgctgctttataacaggtaccaaccattgcagcaagtggacctgaattctctttgcaggcatcagcttcaactgggtatgtaggaaaataattctgcaagaaaagagttgcacttttcgagtccaatgccttcgactcttttctatttgggcatgcgccttttaccccagggtctccagctgaaaattgatgtcataattggtgaaaattctaaagcagtacaaagtcatagactaagactctgatatacaacttacactcattttccaggaagtatttccactggtatgctattccttcttttgcctcctttgaggagtcagaagtgaaaacaagaagtcggtgattctcttgcaccatttcggtcacagtgggccaatctttaccctttttcggcatcttggacacaggataccaatacttgtccaacccagccatagcaaacaaatttgtcaaccctttcgtggtatgcacataatcctcaattataattgtcacaatctcagatgggtttgcacttaaaaatgcttccacttccttcaatacatttattgcaggttgctgagaagataacaacataacacttataagaagctacttcataagaaactacaaacttaaaaagaatgaaaataagggaagaaagattacaaaggcagtgaaattgaaacattggcccctaaatgaatggcagagccaaatatcgttctcgaagtcatacatgtccaacatcagtcccctcacgccattctaaggaaaaaaaaaatacaacagaaatcaattaaacaaagaaagaaaaacgtaagaaacacactagacaaaaggggtctatttagaacaattactaacacgcataattctctaatactgtaattggattccaaggcacaaaattaaagaaaggaatggcaggtaaacctcatcagagtctctaatctaattctatcacaaaattagaaagaaagaaagaaataaaagcaatgaacaagaacaaaaaccacatacattcaactggttggtcacagtgtcctcttgattataaaatgtcaatctctgagcaccagctacaggagctgcattcacgttactgaacgaattatgggtcaccagccatgtgtacttattaaacggcaacccattaatctacaacatctcaaaacaaaaagcagtaaagtcatatgattttcatgaaattcagctcaaaatgattacagcccaccaacctaattttcaaaattcaaactcttacaatggtagtgggaatgattgcctgagctctggtgcagattggctgagtagcaccggaagaaggacaattaccacagtagagacctggggaacagtccacggccgcggtacaagcatctagaacctgtaaacaacgaagttttattcggatttaaattccgaaaagcttagatctttgagttgtttaagaggagaaaatacaaagtaaaacctgacaagtgccactggagcaagctgaggaagaagtaacaagaacagaaaagaagaagaagaagagcaacagaagtaaggtgttgcataagctacggtggtccaccaaacacggcaacatggcatcaaaagcagcagtggctgaactgaagctcgtgataagcagaaccaccactgctttttttttttatgggttcaagagagagagagagagagagagagaaggggtctggtagtggtagtgatatagtacagctaccaaaagcaaaagcgtaatttttactgtggtgagagaagaagatgactaagttttttagttcttaaacgcgggcttttatttctttaaactcttttcctttcttctctaatcattcttttattttacctatttagcatatttgaccccaaaccatcgcatgtgtattattctcttcttcaaattttttagtgagttataaattatctctcaaccattcacaatattataaattaatttttttataaattttgtataacattaaaaaaataaaaaataggcattttaaaaaaaaatccctaaattaaaattaaattaatgattaaaaaaattaggtaaaattaaattattttttcaaattaattacacatgtaatgttgacatggcaactgattaaggagatatgtcatcattttatttgtcacgtatgataaaatttgacagaatgaccaattcacaaa

SEQ ID NO: 186596 - DNA, 1773 bp, Cannabis indica
tagttttgtatgtgagcctcaaccacctagctgatagggcaagaatttacctaaaaaaaaaaaatgccaacataaaacaccctaaataaactagcaaatctcctaacccagataggataagaccaatcccagttattctacactagtcttgcataataacaatataaagggagagacccaccctaacaactgcaatgaaaaaacattaattaacatgcttgttctgcttcaatgaatttaattagaattagtatcaatggctttgcatatagagcttttttcatatttatacaaatttactcaacttattgtcatcaagaaacattacaaaatcttaccaaatgagcaccaattggaccaattggtggttttctgaatctccgatgatgtctctcaatggcacgcagcagattaataactttatctccaccaaatgcagtaacctgtgtaggttaaaaatatcacaatagatcattacaactatctgcagtgaatgatatattgttcttacaggcatctacaagcacaactatcaaaccttattagtctggttccgctggagctgacttatattatctaacaactctttgtgctgcttctgacaattgtgtatctaagaaggcatttgattacaaatatagtcaaactgagaaaaaaaaatgacgctttgtgtgaaatcagattaattagaaatatggatgcatgtaaaatagaaggaaagagaaaacacaaattacacttgacagtatcaattacaacttatctaacagtcacactaattcctgtgtacctcctcatctatattccggatgtctatcatcatcttgtttaatctttctaataagtatacctcttcttccttcaagctggaatatcagtaggccaaccagaattaagtcaaagctttctaaatgaaaaggaaatatgtaaacagattatataatcattaaacctcttaaagtatgaatcagcattctcaaactcaaactcaagttcccttagcttctcctctatttgagattcttcagcctgcaatccattaaatttcatattgattgtaactccctaccacaacttactcccataaacaattgataatagcaacttaatatgttattgtgaaaattatttcttagacttgtgtaaatatacatatgctaaatccttgttgactttaattgtcaattataatttatattaatttattctactttcagtttcaagtaacgtgacaagaaatggtataattgtagctcctctttcaagttcaaggctactgttggatatccagacgacctgaacctgatggtaacctcagattctggtgaggcagaccaaaaatagcattattgttttcaacaaaaaaaacaaaagccttattgtgacttgtgatttctctccttaaatgtcattttcaggatagttggattgatttaggggtaaaaaaacagctctccaatgcaaaaaaaaatatagaaaagatttccctatccagatcccagctatccaatcccgcaaggaacacctcatatgccccaatgccagatcccaggagacaacagaaagttatgtagctactgagatgtctgccaaatcagacatactcaattgaatacattaattatttattaattttaaatgaaatatatgtatattgctattttctctgtgcattatcttatgcaggtttctaattatttcctatgtattttttttattctttttctacaaagagagagagagagagagagagagagagagagagagagagag

SEQ ID NO: 186597 - DNA, 3945 bp, Cannabis indica
gagagggagagagaaagagagaggaagatagggagagaaatcaagagagagagagggctgaatggggagctcgggtgaaatttgagggtgttgcaacatgagttgcagcagcgataggaacggagtaggagccgccggagaagacgatagaaaaagacacgaaaacctagctttgcagaggtctggtgagctagagcccaattctgtatcgcagaacggttcgattactgctgctcagtttacgatcgatgagaatttgctggttgacccgaagttactgtttatcgggtcaaaaattggtgagggagctcatgggaaagtctatgaaggaaggttagttgtatgtatatgtatgtgtacgttttgtatgagttcaatttggctgtgaatttatttactgacaaagtacaaattaaatacctgaaatcctgcgatttatttgtactaattggaatgattttgaatatggtttgttctttatatttgaatacttatcataattggccccattagttgtttcctgttggcatttttattagggaaaaaggaaggggacgacatagagttacttgtagttaatttttagtctgttaaaattgttcaagaacttaaaaaatgagacaaagcctctatctttggttggatttagtttaaagtattcatttaatttggttctaggtatggtgaccgaattgtagctgttaaagttcttcatcgtgggagcacttctgaagaaaaagcttcactggaggatcgttttgcccgtgaagttaatatgatgtctagagttaaacatgagaacctggtcaaggtgagtgagtttcacaagcatatggaagttttatcttattaattagttttttttaactgttatgtttgtatctaaatcttctgcagtttattggagcttgtaaagatcctttaatggttatagttactgaactattacctgggatgtcacttcgaaagtatttagttggtgttcggccccaaacattagaccttcacgtggcgataaagtttgctatggacatagctcgagcaatggaatgtctacatgccaatgggattatccatagggatctaaaacctggtactgtagcgctagtttaagtagtatttcattgttgagcttgctatgcctagataatgaaatataggttttgattgttagtgtatgcaacagatgtatgatagctttgactatatattcataatctgattgttaatgtatattacatttgtatgatagcttaattaaatatagatgatttactagttactcctacactcttgtcggaatcagcaagctgtagttttcttcctcttcaaattgttctgaagtacaaatggtttaactttaagtaatgttttctgtaacttgctgctaatgataatatcttatcttatcaattaataccaaggacaacaatagtatttctttctgattaaatttaaatatctggcagaataatatttggttcagatttgtgcttttcacttgattagataattcaactgttaagcaacacatgtgtaagaggataatatataaaaaccaaacgacatcttcataagctacacattgctttcttcggttttctaattttttatacatcattcttgctcaagttatattcaaattgatttttagcagatcatttatatcttatatggaaattgcaaaaattattgtacttctcaataaatacagagttgaaaatttgattatgcagataatttgttgcttacggcaaatcagaagtctgtgaagcttgcagattttggccttgcaagagaagaaacagtgactgagatgatgactgcagaaaccggaacttaccgttggatggctcctgaggttagtattttctaactctgggaatcgtgactcaacataatttgattgataaatgagattttccatttattttgaaaccagtgaagtctgagaatcatcatcatatatcttacatatccctgctttttgacggcactataacatgttggacaaagatattatattcaattccaacaaaattggctgttttaggggcggtaataaacacatttctcataaaatatttttttaaaaaaaaagttcgaagttttggtggtttcaaactaatgttttcttactgatgaacttttttttaatgtaaaactgatgaaattggtttcaattggggggttcctttgtatctaagtgcttttttcgaatttcgaatttcaattggggggttcaattcaatattattgcttatatgaggggatgtagaattgagttcaaggtatcaatattggaatttaactcattcacccacaagtcatatgccataatctcacaatttcagcaataaacaatcaaatattgttactgtctacatacatgtatactcaaatcctactgctgattttcatttttctgggttcactaaatatgatttgttccttttgcagctgtatagcactgtgactttacgtcagggagagaagaagcattacaataataaggttgatgtgtacagctttggaattgtcctgtgggaattattaaccaaccgcatgccatttgaaggcatgtcaaatttgcaggctgcctatgctgctgcttttaaggtgcacaaagtcatctgtttaccttttcattatgtattcatcaacatatttgttttcattagttcgaaatcgattatgcttttgctgttcaataataacattttctgtcaactctctaagggtatataattgaattccttatggtctggttcgattcccgttcttggtgaaccatccgtttcattctaacggattcgacctagaacggttacctcaaatggtcagacgtggtttgctcccacaaagtctgaatttcagtacccacattttggggttctttccttactttagaccctcttttgaaagttagagatacaaattacaatatatatattctagtcaaactgatgttgaagatgagattccattacttatgggcttttgtaagactatagttgcaaaactttacttatatgtgttacaaacattatataccattcttcattatctccttttttggcattctgataatgcagcaagagcggccgagtattcctgaagacatatcacccgatctagcattcatcgtacaatcatgttgggttgaggaccctaatctaaggccaagcttcagccagattatccgcatgctcaactcatttctcttcacgctttcaccaacaccgtcactggattctgatactaacgaggcagaagcaagtaacgaaaatgacaacatgaacgagttgtctgcaagagcaagagggaagttttctttcatccgacacctatttactgcaaggaagacaaagagcactcaataaagcaggtttaattttcttggtttccaaacataggcatatgcgatagaaactagaaagaaagaaagaaaagaaatgtaatttgttatgactaatcaccttaatgatgacactatttgcaaatataaaattgccaaaagaaaaaaaagaatgttgatttgagtaaccctaatagagaataaaaattataggtcgaccatatattatctcatctagttgatcttattgtaaaggagatatagtacatggttctgaacatttaaaagtgtcatatatatataatttcatatcacatctagttgaccccattgtttaggttcttatcttttttgtgttcatattaatgttaccttatttagtgctatttcctttgactataacaaataccttgttttcatacttactatgcattttagactataactatggattttgatttatttgatgtactttaattgatgtgtaatgtgtaatgtattctatactcgatttgatgcacttttaatcgttaaatcaactcaatcgttttgtgatttgacaaaattcactatatatatatatatat

SEQ ID NO: 186598 - DNA, 3431 bp, Cannabis indica
aggtttaaagttcaattattgtatagctgttgtgacacgattatataatatcatgataattagaagcatattggatgtatccttgttgaaatacaagaagaagaccaccgttaagactgttttgcttatgtgtcatatttagctcaactatctgtaacggttttgtataaccaatttctgtttcttttctttcttcttgtatttacaccagtataaataaagctaaggccaatctagtttgattgagcaattcatttcattccagtttctttctctctttccatcttctctccactgctttcttcttcaccaaaactctgtaaataacagagtatttcacatggtatcagagccatgtcagatccaagaatcgatcctcctgctcaagaacaaatgcagcagcaacagcataatcaagcacgggttgatgctgcaaatcaagcacagtataatcaaaatgatctaccaagaattgtcctccccaacaacaatctacttccgcttaatcttcgtcttgatcgaacaaattatacgatctggagatctttggcccttgctgctactcgcgcctacgatctcgacggatacattcttggacttcgtccagctcctccgattttacttgcaggtaatgtccctaacccagaatatcaacaatggatgagatttgatcagttcttgatgcattggcttatgaattctgtttctgataatatgcttgggcatgtcatccattgtcaaacatctgctgagatctggagtacctttgcatcactgttcgtcaccagatcaagagctagactcctgcaactaagaggattgctccaatccaccaagaaaggctcactttcaatcgaagagtacatactgaaaatgaaacagtatgctgacagtctcaatgccgctggacaaaccatgtctgacgatgatttggttctttacatactcggaggcttgggatccgaatatgaagcagttgtagtcaatctcacctctcgatccgaatctctctctttgcaagaagtccaatttatgttacaaagccaagaaatgagactacagcagcttacatccgattccatgtcaaacatccaagccaacatagccaatacaaactttaataatggaggaagaggctatcaatcaaacaggggctatcgtggaacaagaggaggaagaggtcctaacagaggtggttttcaaccaaatcgtggcaatagacccatttgtcaattgtgtgggagaagtggtcacactgtgattaagtgcttccacagatttgacataaacttcactggtcctcaacccaattcaaatcccacccaatcccaaaccagtgacacctctcctcaagccaatataacagaaacaaacatcatgcccgatctgtcaaatgcatggtatattgacagtggagccacccatcatatgacaaatgattcccaaaaccttgccacctctactgactacaaaggaaaagcaaaagttgttgtaggtaatggcttctctctccctattcatcacataggcacaagtactgttcctactaaatttccttcccaatctttagttttacaagatatattgcatgtgcctagtctaacaaagaatcttttaagcatctcacaattcacaaaagacaatcatgttattcttgagtttgatgattcttcttgtgttattaaggacaagaaaaccaggcaagctcttcttcagggtaatctctgtgatggcctctataaacttcaagtttctcatcctggccaaatcaagccacctgtgtccaagtcttcctttcttgcctttaatcacactactacaagcaatcctgttcttgacaagtccaaagctgctactgtgtggcatcatcggcttggtcatccatctcatacaattctaaacaaagttcttgcacttgtttgtcctaatgtgagatgtaaacctgattctttttgtaatgcttgtcaaatcggcaagcttcatcaattcagtttcaagaaaacttctactaaaacttccatgccttttgaattagtcttaactgatgtttggggcccttccttttatgcttccaatgatggttacaagtattatgtcagtttcattgatgatttcactaagtttacctggttatttcccatgagaaccaaatctgaagtcaaaaccatttttacacaatttaatgcctatattgaaagatttttccaacttaaaattaaaagtgtccaatctgatttagggaaggaatatgaacctttgtataacatgttcaaagaaatgggcatagttaaaaggaactcttgtcctcatacacatcaacaacaaggtcgtgttgaaagaaaacacagacatgttgttgatatgggtctcactcttcttgctcaggctaatatcccattacagtattggtgggaagctttcacttcagcagcttatttaattaataggctacccactcctgtcctcaatttactatccccatatgaaaaattattctcacaaaagcctgactacaatttattaaaagtctttggatgctcttgctatcctttattaagaccatatgagaaccataaagttgcttttcggtccactaaatgccttttcataggatattgtctttcatccaaaggatataggtgtttacacccaagtggaagagtgtatgtggcaagaaatgtcactttcaatgaagccgaattcccctttttagacctctttcctacttcctgcaacaacagtacccactctacacataaagtcattgatcctaatgcttttcaagttcccaccattacccccatgtcacgtccccatcatccacccactccccctgccactattaccaactcccaccagtcaacaataccaactgaattatctcactcatctcccacactcgtgcctcacatccctccaagtaatgaccatattcaacaacacaattccccacaaaccagtacctctgtcccatccatatctaccacacaaaatcccacacacaacaaccagcatcctatgcttactcggtctaaacatggcatatataaaccaaagctctatcttgcctccatttttcaagacactgaaccaaaaagcctcaaagaagccttagccaatcctaaatggaataaagccatgaatactgaaatttatgccttaaagaaaaacaagacatggacacttgttcctccctcctctgaaatgactattgttcataataaatgggtctacagaatcaaattaaatgcagatggctccatagaaagattcaaggcacgtttggttgccaaaggttttcaacaagtaccaggagtggacttctttgaaacatacagcccagttgtcaagccttgcaccatcagactcatgttcactatggctgtcacttatggttgggaaatccaacaattggacatcaacaatgcctt

SEQ ID NO: 186599 - DNA, 1057 bp, Cannabis indica
tcaaaaattgcaacacccctaacagaattgacccgaatctttcgttgcattttcactgttacctatcaattcaatctcaatggtcgtgtcaccggtttggtgtgtctgtctagaggaataagacaagaggaccccttatccccttacctttttcttttatgctctgaaggcttttcttctctcatttgccatcaggagcatttaggccttttgtacggtataaaaatatccagatatgctcttgctatctcgcttcttttctttgatgacgacaatattcttttctgtcctggtaacattcagtcttgtaatgtgatcaaagaaatccttcatcattatgagctcgccacaagtgaatgtgttaatcttcaaaaatcttctctttatctctctcctaataaggtcttcatggatcttatcctcatctcgattacatgagcattcctatttgtactgagtttgaaaactatcttggccttccttaatgtttcagccggtcaaagaaataggctttcaactatatcaaggagaggagagcctagagccacatctcaaattggaatcacaagttcttctcaaaaagggggaaaaataattgttgattaaagcacttcttaaatcgattccctcttatgctatgtcttgtttcaggctccttgttagtatttgcaagtctcttgagtccatggtgatagatttttggtggggacaaacgctcaaaatcactcaaagacccattggattaaatggcccaccctttgcaaatctaagcaggatgggggtttgggggtttagatctctccctcacttcaaccaagttatgcttgctaagcaagcttggagactgttgaaacatccaaactctcttgtggctaaagttcttgcaactagatatcgtcctcactcttctttccttgatagtattgttgcgcgtgccccttctctagtgtagcgtagcattaattggggaaaggatttattgaaacatggtcttatataaaagattggaaacgacaaaaaattgaccctgtgcatgattactggatcccaaatacta

SEQ ID NO: 186600 - DNA, 3855 bp, Cannabis indica
aattttctttttttttagttaaaatagtaatgttagttttttaaaatttaaaatcgatttacttaacaatggattagtttggttcgaaagcatgaaatgtaatttgtaaatgttttattattctgaattatttttatgttaaagcttataatacgtaaataataatgaaaataaatatttttaacataatgttaaggtaattatcaatattatgcctaagattttttctaaatattaaacatttgatttgatttgatttgaatcacaagcgaacattttaaaacgtgatcgaaccagataattataaatgatccaaattgaccaaaccattgacattcgatttatttggtttagattggttaggatttaaaattacggattgtaaattatatgaacaactctacttcgggcaactgattttatccaattatcttctaccatttttaatgtctattttttttctttttataaaaaaaaatcacattaatcataaaataattacaaatctacttatttataaacatcactgatacctaatagcttctcagaaaaaatcaagagtgaataggagtgttattttaatttgatacatgtttattctgtgatatttgaagacattgtgaaatttgattggctccatgcatagacaggtaatgtactatttttgggtgggtgggacccatgtacccgaacaatgttgactaaaattggactcttttcggaggcttacagttggctcgtctgattttgagtttctcacaagtgtcacaattgggctattacagatgggccatcaaagcccattaatattttaaggcccaatatattttcttacgaggggcctcgagagcccgtgaaatgagtgaatgaaaccagtataaaaatgtgaaattcttttaaaaccatcaactctattagaatttgattgaaaagcaagtttgttttaagaaaatgatttctgaatttctaagagaacttaagtaatttgtagagttagatatcttttattactattaagaatttatgtgtgcaagaacaacgatatttgtaatgatataaatatgagtaatttataatataaatacttaaatttaacttttaattttatgtatatattttagtttaatttttaatattaataataactaaattataattttaaaatttttgtaggaacttagtcgttaagtgtcaagtaaattagcaagtgacaggggaaaatcaattactctataaatattaatcactctataattattattagtattttgtaaatataacttttgaaaattaattgtgaaaagtaacaaatctaattaataattattattataccttgacactattgaaatatccaaagtcgaaagcttgggaagctttgagtagagtactgaagtggaggagaggagagatgcacttacgttaagtcccacatcgaaaacaaagaaggaagcttagtaatagagtagctataagatgacaagttggggctaatacctaattacgcagccacgcggtgagcacaacgcgaactattctttcgccttttactaaagaataccgtgtgctcgccgctattagtggcatacgcctatttttggaggagcctctctttagagtgctcctaaaatactaagttaaattttttaactgaaggtaacttattctacataataatttagatccagaaacaagtagatgtgttctaaacaaaattgaaatatattttacaaaaagaaaaaaaaaaatttgtgataattttataccaataatttttaccaagtcatttaatgatataaattgagctatatttgctcttacattatcaaatatcaatgtatttacataatcaccttgcaaattattattaatatttgatgaaatgactttgcaaattataatgatggtagacaaaaaagaagacacattaaccaaagaaaggtaaaatcatatttcagccaatgacaaatgtttgttctaagcaaaaacgagaaatcttcaaaagtttaatttggccattcatccaattgccatttcaaacattcccaacaagcagatagaattagaagcaagttacaaaatcatcatcagtggagtgataattcattcaaaccacagatatatagctcttaatgaacataaacaacagaacttagttagcaataaaaacttatatggggaaacctcaaagttgacacttacataaaacctctattgccaaaatccccttatataaattataaaatacatcctaacatcaacaacatcatcaggacattaaaaaaaatcctggtttttcacaacatactaaaaacagattacagaaaacagggcaagatcaagactgactacttgccaatactaagcacatttttttttaccttaaaaagcttagcccttcttctacaactctatattttcgtctattcatattcatttggtggagctttttattacggcacctcgttacccgttcaaaagcttcaccaccttatgctgtatttccgttcttttcttgcttcttttttttttcacttttttctttttttttcttcggtcgttttcttttccaacaaaaccaaataacacaaaaaccaaatcaaagaactgcagaaaaacttgccatccagtgttcaacggaaccatccaacggctgtgcttcacaggcttcacttttagaacggcaggagtatcaaaatcaaagtcgcattttgatatcatcgacggctgaaaaacaggaaatctgggtgattgacttgaagctgtcttaaccagtcatctgcagcttgagagagggagtttgctaatatgcgctcagatcccccatttgcagtccacaaggatcctctaaacttgtaagaagcaagaccgaaaacaggcaaggacattttagggacgccttctgtcgcactaggacgcattacaactggagcacaagcattccatacacctgaaagaagacatgacattgcttgctttacaacatagctgaaaatatgaaactgatatacacataattactattacgtgacacaacaatctacaagtattttacgaatccaggtaggtaaataacaagctatagagttatttccagaactcaaagtaatataacatctattcccaaacagtcaaacttcttctcatatataaatgggaaaacatgtatccctttttgctaaaatgatgattcttgctctacatccattaacagagcaaagccataatgcccaagcaacaaagttgtgaaaaaaggaattctgctgaaaaatgatggaaagaaaagaataaaggtgtttatggtagatttcttatttgaaatcagtgagaaacttaaagtacttgaatactataaatagcgaaataagaataatgtgaaagcatctggaagatcatatcattcatgtctatttctttaccattgtttacattaatgcatgaatgatataactgtatagataaaagtatacaaatgaagcaaagcaaataagcaatttaaaaaatacatatagataaaagtaggccgatttccaatttgtaaagcaattaggtcattgaaaaattattccagttatacctccgccactattgtttgacaagttttttgttgttgtttcgtttccaatttctcctcccttcagaaattaaatgaactagcaacaaaccacatgtagtaatcgaagaactatttttttaaaagactaaattttgttacaatgacacttattacgtccatgtttatggccccatgcttagctagcacgatatatcatgtcttactaattagactgacataaattataaagaaaaaaaatgagaatcatacactacaacagagaagtggttagattgtct

SEQ ID NO: 186601 - DNA, 2371 bp, Cannabis indica
ttgccgcaattatccctttatataattattatgttttatataattattgaagttaaacatgttgcaaacaagttaagtagaccaaacatgaactcaccctccatctggtcttgaatcaagatcaaaaaaaccagtggaggagatcaatttgtcaaatttgttcctcattaaatcaaaatggggcatatttctcagaatttaatgaatttgtgtttatattttgaatgaactttgataaattaagttgctgttttttttttcttctgaataaattaagttgctgtttaatttgtcaaatttgaggattatgatatttaccatattgtttatgaacattttaaatttatcacttattctatttgctttttttttttttgggaatccaagttcattaattaagaaagatagataggaattatgggaggaattctctccccttgacacgaactagctagttagctagcaactctagcatttttagctaaaccatctgcaaaagagttaaaacaacacttaataaaaaaaaactacatatattaaactgtttaataagatttaagatagacaaaaaatgttaagagacttccaatttgagaatatagtttttagccagagcttgaattacttgtctagaatctgaaagaatatggagttctttccaatcgttttcaatggcccaagaaagagccatatgaattgcacaaagtttagcttacaaatgacacctttctaagattaacctctacctttagcaatctgctatccaaaaaagagtgccaatctgaactatctaagctgctattactaaaggcataataatcgaagtaggcttgccttactctctctcgagccacttcaatactagctgaggtacctttcaagcaaaggttgtttctttgagtccatatccgatcaaaaatacaattcgcataggtgaggatctcctttttgctaagatcaaaaaatcccttttatggattgatcttgccaagttagctgttagctttgaactaataattttaaactcgttcgaaattgtggagagtatttttgtatgatcatttctactaacttaaagactcggaaatatatcatatcttgaattggatctaatgaaataagatgaattgagacagtagtttataaatcatttaatttttttgaatatataatataatgaattgaatgagtttaatttagtggaaaatctttggtacactatactatgatttaagaaggaaaaaaattataacaatgtgcactactattttatattataattatttaaaatatctacaaaattttaaaaattttaaaataatgtacaattaactatttgactgtctaaagataaagtataagcttaatcaaatcatcaaaatatataatatcaaaaacttattattatttatggcaataaaactcaaattattaagcaacatatacatgatattacattacatactaaagcagtaacacaaattaatacattgtaattctaaatacataatcatacttattatatattaagacatggattttctcaatttgggtggactcctacctcttctgatcatcaacttggttttcatgttcataattggagtttgttgtccatgatgatcaaacccaacaacatcatcacgatcatgatcaatattattcttcttatgatccccaacactgttactcacaccagtactattagatttaattgacaaaggcacaaacccaaacttcttccacctaaaaaacccaccattagaagaagacttgttcttcttctcagaaagtttctcaatttgaatttgcattgaattgcacatactttgaagcctaagcacgtcatctttaagcctccttatctccatttgctggacagacatttcccgcttcgataagcaccgggtcggttgctcgagtcccgggtttgggcttcgggccccgctgaaggacccgctccaatcgctcacattgtttctactagtgttcttggattgttctgagaatagtacttggatcacggctcgtactggcaatctctcgttctgtgctgcgtggagcgatgcctctggcgatagtttacggcaatctattagcctgcaaagagtcttccgctcgtgttttgatgcgctcggatgtgcctgcaaagttaacatctcaaattcatggtcattgttcgattattatgctcacacacatgaattagcagttcgtgcacttaggagacgaataattaacaaaatgttacacaaaatctttgagaaatgttagtgtctctgtcaattaaatctagtactattggtgtctttgtctttgtcaaaacctccaaaatttcataccctttatagggccagtttagcacagctgt

SEQ ID NO: 186602 - DNA, 613 bp, Cannabis indica
aaaaaaaaaaaaaacaaggtgtatgtgtgcatgtgcggtttatcattcatttgctaagattggtatctctgtgatagagaaaaaactatttttcacgaaaaggaaaggtaaaggaataaataggtaaggaaaaaaagtatataggaaaatgacatttttgcataaggtaatttttagcataaagacaaaaaataaaaaaagtagtagctgatagctaagaaataaagtagagaattctgcaaataaataaataaataaaataaaaagtagagaattataacattaccatctctttgcatattgaaagttgaaacacaaatttattaataattaatcattaggaacattaatatttggtaccaataatatttaataccattatgaaatgacattttatgaagagttatctattttttttataataactattaaatcaaaatatataggatttaatactctttcataaatactagacttaatgcgtaattatacagtataaaatgaattgtgggagaattacaatattatttgcttatgaacataagcacaaatgatgattattacaaaatgatactttataaatagttataggtttttttttaaaaaataatta

SEQ ID NO: 186603 - DNA, 3934 bp, Cannabis indica
ttaaaaaaaaattatataaaaatcttgccaattaaattgaattggatggtacaaattagtttagataattggatacgaataatgaagaatgggatgcatatgctttgggatgaataaaatataaattattaaaaagttttgttaaactataaacgaattagccatatggaaaacattctatacttagttacacctttgacatttccaccatcatcatcattactttgagttgggaaaggtaagaaaagatcttgtttccttaaaaaagcaataaagaaaatctaaggtttgtttggtgctggtatcagtatcatgtattatattaaatcagtaaattattatgttttggtcattaggtgtatggattacatagaaaaactagatgtataaacccaaattgtaatatttatgagcctaggttgtattatggtaaagtttgaggttaaggtctaaggttgggactaggggccagagcctggagttagggttcgagctctagggttgcgactgaggtttgggagtggggctgggttggaatcggggtttggaccgtgactggaattagggtttagggttagatctggggccgaaattcgaggtcgggtccgatgttggggacaaggtccatggtttggatcagggttggggtccgtggttgggtccaagttggggtctgtggctaggctaaggctggggtttgaggtcgggttcagggtctaaggtttagggtcgaggttgggatccgagatctgggccagttgcaggatcaattagagttcgtattgatataattataaatatatttttattattttttttttttaaataaaacaataaaatactagcaccaaacataatataatttaatctaatctattaatataagtcagtatcaaatttaaattcaacacaaaacatagtattgtgtaatgtatgtgtgaacggccagaatctacatattcttgtgagaaatgttatgttgtcacttacatatgaatgagaaaatatgaatctcattaattaactcattccactaattggatatgttccaattaatgtggacctaattaagcccaaaaaagacaaagaaagaaaagaaaattactttagctttcattgagatcactaatcgttctctttttaataaatttagttccaaaatccaaattttctcactttttcttttgtatataagaaaacacaaaataaacaaatcatgaatttcattaatacaaaactaaaatgttttcaaagctcaaacatgttctcattctatcatttcttaacaaacaaaataaatcaagatttgaaagtacaactcaaacatgaaaacagaaatagttccatcaacaaatgtagataaaactaaaaataaccccacatagtgattacaacaaccacaacaattccaatgtgtacaacaccattattgataagaacaacagccttcgacttgttcccttctgccacatctggactgatggattcttcagaagaggaggaagaggataaagaagacgaagacgaagacgaattagtatctttagaaggtttcaatggtgtgggagaaggtgccaagtgctgctttgtcttcggtttcggaccgaaaattcccagaggcaacaacaccttatcgaccttgtaaatagcaagctgattatcttcataaacagtaccagaaatggtagcgttaacaactccagtggatatgttaactgatttcccttctacagtaacatttagagggaagtcattggtattgctagcttgtgtccgtacagggttactgagagtctcaaagttttggagtgaaactaaagtaggaagaatgtggtattggacaagttggactttgtcttcgttggagagtgtgttgagagtgccaggtttcagagcaccaaaggccccatttgttggggcaaaaatggtcaatgtgttggatacattcaactgattctctatttgaatgcttacagaagtactcttaaggaggcggataaagacactaaagataccagctttgtcgaggattttggtgacatcagtaggtgtgtgaagggctttgtgaggtggtgcttggacgagtggtacttgagatggtggctccactgctggcactggcaatgatgttggtgctttggttggggttaaggccttagccttagttggggctatggctacattttttgatggaggttgggctggagagtgaactaatgtggctcctttgcagtggcaaaagaaactgagaaagaggaatgagaagtagacaacttgtttcatcatcatgttttcaactaataaggctgctaattaataactagttaagtatagaagtatgttaataatgagttgtttctttatttttgatgacttgtgtttgagtatgagatggttataaatagatatatatatatatatatatatatatattgataataattataattcatgaaattagttaaaaatgtatggtgtctttgtttggctaggtacatgttctaattaagagttagctggttggttaatttggaagtagggaactaaacaaaaagggattaagttttgatgaggtgggataaatatataaatatataataataatatttgtgtgtttatatatcttaattagcttttagctttagatttatattattatattcatatataactttgtagtagataacacagacatgtcatctattaatttgttttttaaaagtttatttcaaataaaagtatgcacttcaccaatttagtttaaatattggatactacaaattaattggtttggatataacataatgtaaacggatatagatattaattgggtttctatattttcatatatcttcattattaattagagcaaatatggtcaagggtgttgtgttggtcacaaatgagttaattttcaatttggatatattaccttgttttgtcatataacgatagaaatacattattgaataatgagctagtgagtgatgaaggaatgagatgtaagtatagtactttgggatgaataaaatattaattactgaaaaattatgttaaacgtaattagctttataggaaaacattctatagttagttacatcttgactatttctatcatcatcaccactttgggttgggaaggtaagaaagatactttgtttccttagaaaagcattaaagaatctatttaggtttgtttagtactctgtaaactaccattttcaatacaaccgaccacactacataaaacagggtctataacaaggtttattacggactacattcaaaaaaggatgtatatgcccgtattgagatatttatgaacctagtttgtattatggtttagtctagggttcgagttcgagccggagtaatgattatggttagtgttgagggttggagttttttaggatctaaggccagagatagggttgagatagaggtttaagggctaggaccaagatctaggtttggggctaggattcgaggcatggggttaggtccggctctatgcataggcgggctaggcttgtgcttagggcccacctagtccaggagcccaaaaaatttttttccttttaaaattatatatatattttttctaaatatgggcccaaaaatatttattttcctatggcccgctatattttagggttggccctgcatggggtctgaggtggtcggggtttgtgactgggtccagttccgtggctaggttagggtcggggtccaaggtctagggtcaagtttggggcttaggcgaggttgggttcaatttgggctaaggttgggttcggtttgggtcgggggtcagggtcagtgtcagtactgtgaaccaccaaaatctacagtcttgtgagggaaattgtaaattaaatggtcatgaatctaaatatggttaagcaaatactgcaaaaaactgctacttttagtg

SEQ ID NO: 186604 - DNA, 7279 bp, Cannabis indica
ttaatttgacatcattagtaataccagaaagtttacaaagcaaagaaatgttcttttggtatcagtagtaaatatcatatactgaaccaagtggctgtgtatctgataggctcacgtccggaaaaagctaagcaaagaagagagattggcaatggttaagatgggaagagaagatagaggaaagtaccagtcccgcactgcagttaaacaaaagaaggtacacacattttttttatataattttcattcgtagacctttgttgcaagcttgtttataaagcctcttaggttgttagctacgaaatcaatataaactttgaaaagggcgctccttttgctttttagacttaagggtcctatgatttgtgtaaaagagctccactcatcgtgggaaagtaaacagtaaaattttgccttaaagtcagtgatgctgccatgccaccagtttgtgttttattataattatgttttttcttgttttggtgtgatttttacagaccggaggtttgagcaatcggcagaaagaacataagaaggctatgcctcttgctgcaaagagagataggattgtaaaaaccagagctgtgaaaaggataaaagaacagcgtgctggaaaacagttcagaggaaagaaagcatggaaatagtcctttacttcaatcatactatatactcactttctttctttctttttgttttgttagagcaatttaagatcattgaaagttaactgtagggttataagcattgcctcaaccagtgaagaaattttgtgttagttcttttgggataaactctatttataaatgtatttttggatccaagctatatagtcaattaaaaagctttattattatttaatcaatttaaatattttttttggttgaagtcatttaagtggtatttttaagatggaaaggaaggataaaaaagtctcagcaacaacaaacaaatgaaagagccttttaataaaaaaaacaagcattacataataatacaccttgtaggatgatgagttcttttatattatacttggtctacactaaactcgcattctgggaagaaaacagaataaataaatagatataatattgaagaaaaccaaaatattataatgagatctagccaaaattactcttcttgctcttctactgaacatgaaggcacatcagtactctgcccaaatacatcaggaattccattccaattcctttgctccctagtctcccagtacccgcccttgtaacgataacaaccatcctcgtccctctgaaaccatcttggctgccatcctctctcctgcaattttctagcctgtaccaattgatgcaataaatcaaaatcaatccaagaccccacactcagtgaatgatcaatattagcagtatgctggtgaaagataatgaatacaaaaaatgctattatatcactattggcacaattaaagtatcgggtcttataatttaaagtaacagcttttatagaatagcgatgctcaatgaatacctgtctttgtagctgttcgagccttaacttttctgcattagccaattcatattccccattctcaagatgtctttgatccggtctaagcctcgagtcggttggaggcaattgatccaataagccaggcgtgagttcattcaaagatattgcaaaaggtgagagattatatctagtcttggtcacatacttatctctttcccacagtaacactgcttcagtcattggatcatacccttttggctttgtggtaggatctcccagcacatagtacattgcttcgtcccacttgcccactaacattgctactttttctcctgtcttgttgtcttgcacaaacccatgtacctgacaaaacaaaagaaaataaaaacaggaaagggaaaaaaagaagtgaaacataacataaaaaagaagtcactaaaatcaacgcaaaaaaggacacctcatatgcgctttgtcccccacaactatgaactaacctgatgtgggttacgatctatgatagactgctctttgaattttagcttgcaggagtaagtgccactgcccttgatgcgcatggtgccatagtgatcacaataaatttttccgagtatgatattgtaaatagacgtagtaaccttgctccactgaaatttctcaccgtcatcgaactgcagtgtaaggacaccaacaggatcaagttgaatagaacggccccaaaacttgcctttgagattggaatctgcccagaatttccagccttgtccttcacagtgacaagcaacaaccatagggtggtgactcacctgagccaagctgcttgttagaaaaaaatgtgtttcactaaacatgttgctgttaaatagcaatatttcatactaaagacagaacaagttaaaaggagatgatgacttgatttaatcaaatgcttctatcagatgtcaaatgtccacatgttctactgagaagaaagaaagtaatactttttcagagaagaaccgaagtcctttatctggatagtcagcctcatatgtttctccaaggagaggattaaagggtttgcactgccgaccttctgttgatgcatagctggatacagcgaaagctgcgacgtttagaattctcatcaagtcatttccctgcaacacatgaaaccttatttgtcaaaatattcagataactgtacactgaaattaattaatccataatgatacaaatgaagatgttgaacatgaaaacagattatgtatcttttaccagaatctgaaacgcgtatgacagagcagaataaatggaaaataaatatgttagtctttaattttcaaatatcctaaatgttttaccaaagagaaaaaaaaaaagaatcactcattatttacatacatgctatattagttgttgataatgtcattttaaataagttgatgtttcttgtattagtggaattggaatatagtgaagacatcaaattttaattcaaaactcaaggtcagtgtatcactagatcaagtggttcaatctttactaagatatcatgcttcattgcttcaaaattctatttgtaagataacaacagccaaagatctataactaacctgttttccccattctaatgcccggtcaaccaagtatgaatactccaggtcttcaaaacacttctgtaatgacgagagaggttcgttaaaataaacaggaagacaaactccagataaatcctttccaatattgtccttgataattgaccaaagtccaattggcctctctttctcctttggttcaggcaagttatcccttcttttaacatgtggatattcaatcatcctgatttcactctcaaatccatgcaatcgatcagaaaagaaagaatccctttcgaatatacaaccgtttccagtaccttccctactccgataagaagcacttctcaatgcatcggcagacaaaaaatcatttgtatcaaaatatgttccatcatcctcatctgtttcaacatctgctccatcttgactttcattatctacatcagaatcggatgcactaccctcggacatgacagaatagaaatctatgacaataagagtggagtagattgtcaaaaatgagagtgacaatatacatatttatatatatatgtacacaccagcaaaaaaatgatgaatttcctataatgtctgcatcacagaaaagaactaaccactaaatctcctattcccctgtccacaatatgactctcgttcctttgtttcatccacgacagtagtttccagctcaattttctctgtctgtaaatcaaattttaagaaaatatacaaacttgtcaacaacagcaaaatcacactactgcaccaaacatcccattattcgtgttaaacaaaagaatcagctaaatagtaaaaaagggtacacctccaactgtctcaacgtgtccaacaacagaacatgtttatgctgaagagtcttcaactgatttttcagctctgaggtttctgaaagcataattgattcacagtccttgatgacagcctcaccaatcccctcctgcactagtcttgatcttagcttctctgtcgaaacaacaacatcttctgaagccccaaaatcacaactcgacaatactcgagggaaaagatctttagaagcaactagtgcttcgatccatatagctctatcctctctagttacacaacgcaaatgaagagtctttgttccagtaaatattgaaagccttttatcatcagatttgcttgcacgtattgaagaaaccttaagaaaacaaactacttcagatttaaaaatgcattagcaaaatcatataacagaacaaacggcagagttcttagaaaaaaaaaaaaagattttgactcgtacccttcatgtagaaaaaacaagaactaactatactaatactatgttatcaaaaactatactaatactaaatacttgaaaagtacaaaaaaaatgaacaaaatacaaagcaggaaatggtttcaaaccttcaaatgaactaccccaaatggtttgcaaggcctagccgacgcaccaagtctattactgctaccccaattagctttcctcatatacctcaacgaatcctctccgatcactctaagacccttctccctcgccgggctcatcaaaatcttatctggtccatgaactttatagtaagaaagcactccatcttcaagagcaaaccacctcgacctccaacctttcccataattcacccatttatacaaaatcccagccacactaccaccaccaccaccactaccaaacaccttagaatccctagcctcgctgaccgtttcctccacctcattgttcaaggtcgccgacgttttatccgattccgtaccgaccgacgatacctgagccgataaactcggtttcgtaccatagctaacacttctgatcgaaccatcgatccctaactggttacaatgagacggagatttccctacgacagggttggcccgctcacggtcgatcgaaaccggagcaatgcagcaaagtgggttcatcagaggcaacgctgaagcattcaacccaaatcccccccaaaaaaacaacgccgatcacgaaaatgccggacccaaaaccatgccgatcgacctcgcacaaactcctatggtgcagtcatagtcgtagcagtagtgatacatgtgacactgtacttctaccattcgggtcggactctgtacccgaactcaatacccgtttaaaggagcacgatttgggcaaccaccgaaaacggaaatttccagaaatgacatataagaattaagatcgtaaaacgtaacggagaagcttaaaaaatagatctcatacataaatattaaaaatatatatatatataaaaaaatggaacaaagctgagctcacagatccatggcagacacactcactcactcaatgcttagttttcttcttttctttttgaacaataaaaaattgtaaagagaagcgtgaatggcgtaggataagccataagccataatcaatataaatatcaattaaaaatatttatacataaaaatattaatgttgtaataaaagtagtaattattaagagagagtaattttcatttttgatggagttttggtttttgggttttcggggggagacagctaacgtgcgcatttttgttcacaggtaatgataaaatgacgattttggacatggttgtctattgagtgagaggttgtgaaagagtaagggtgttttggtaatttggtgaaatgggaaagcgatcttgtaacgacgacggaccagggaccaggaccaagtgagtgaaatgatagtggagattttgacgttaacacttaacagtagttacactactacaactactacttactcactcactctctacttgaagtggccgagggagaataggatcctctgtgtcgctggtttatggtgcactgcaccaaaacagaagagcctagttatctattgggctctggcccattttaacattgggcttagtaatttaccaatcttgtttgcggaaatgacattgtgtcctttgtttttagtcttgcattaaattttatccaatttttgtatgtatatatattgttcttaggaaatacaagtaaaaacctgattgaaattaaaatccataaaattgttaaaagaaatcattaacaaaaataagatttaagtacttgtaaaaattccccaaaaatatccatatgtgttatgttatagtgcttccaaggacatgttttggccattgttacaaataatttcaaaagcatattctatcttcattcagtacattgcttgcataaattaaggcatgtcttattgtctcctagctttgaagctctgtaatgaaaaattacaccactggaacatgttttactaatttcttataagtgttctttgttgctagaccatgtgtaactttttgagtttctaatttttagttttgtgattgttcttagtttgttggtctacgtgtggttttcttttttcacttttagttttgtaataataatattatatcactcctagaccagaccttatgttattagttttgtttgatatttttttttccacttagttcgtgttaaagcaaaaatcttcgacattaaacgtcttaattaattaattctttctctgaatatttctactaatttgttgtattttcaaccattttagggtcctaacaactccacataggcataaaaggacgaacttttttgatgttcattcaagagcctttggtatactgttaaaatctacaaaacttacaaattactaacgggcatactctaactatctacgcgatatgaacgctcttatggcggagagagttcgcacataatcgtaccctagaaatatgcttctacgggaaatattcaaccattcaaacacacaaaatattctagatctagcttgaacttagcattgccatcctggatacagaaatagaataaagtcaacaaagtgttgcgatacttacttgatgtttgaacggagaatggaaaattgttgtgcgaatctgcctaggagcgtcaaacccaatcaatcacacagtcataactagcatgaaggtcaaaatccccgtctgggtgagggtggagtaggtcaaggtttataggttctgcgtttgggaaactaattgaacagaggtttagaaaatactatataaaacaatcgaaggcctcttgcattcaccgttagaaataatggtgaagtgaagattacctgggggaacaaggggctctggttcgaaaggttacaaaaagggttatgaagatgaagaagatgaaaaaa

SEQ ID NO: 186605 - DNA, 3351 bp, Cannabis indica
ccccctgccttagccctctcttcccttcaaaatacccatgcattgagccattgaacataagagagtatctcggagtgcaaacacaaatcataatcaactagacaaatttatcaagaaaatggaaagcatgaagcatttcttccaagtagtcccaatccagagtgtcatatgctttctgcaagtcaagtttaatcatacatcttgcctttgagtttttccttccataatgcctgattaaatcatggcagatcataatgttatgagcaataaatctgccaaaaacaaatcccccctaaatctgtgctataagctcaggcaagatgactttcattctggaacaaattagcttagtagcaactttgtagataacattacaacatgcaataggtctgaaatcactaactgaattaggacacttacattttgggataagtgttaaaacagtagtgttaatttctttaaggatctgacctgaatgcaaaaaagagaggatagcctctgaaatgtcatttccaattaaatcccaattgtcttggaagaagcaactagtaaagccatttggaccaggagccttcacaacaggaattgaaaaaacaaccttcttgacatcttctttgaagaactccttcatcaagaattctgcctgagatttagagacaagaggaccaagtttcataactcctgccttgatcttggacctgttttccattttagaaccgagtaaactacaataaaatgaaagaaaggcctcaaaaatttcccctggattatctgttcttactcctctttgatcttcaattgataggatgttgtttgctcttctcctctctttgatgctagcatgaaaaacagatgtattatcatctccatttgtaacccaacttagcttagctttttgatacaagaatgaattgagccccttcaaaagctaagcatatttggatcgggtagcagcctccttgttaataagttcaacattcaaaggatcattttggagcttcatctgtacttcaagcaactctttccttgcttcatctgttgtcacttgaatattggagtaatgctttcggttaagatctttaaatgccactttgagtcccttcagttttgaaacaacttggtacattttattgcctttcactctttgattccaaacacctttaactatctcagagtatcgtggatgagaagtccacatgaaatacttaaagggttttttcccattaagtgtttcctgataaaaagagataattgcaggggtatcatcaaagagtttttctgctaagaacactgcttctgctgttgaaaaactgtccatccaccgttggttagcaagaacccgagcaatctttgagtaaatcctctcatttccttgtcgtttgttattccaagtataataactcccactatacttgatatcctctatttgacaagcctcaacacagtccatcaattcatttgctgccaaaaatttaactctttttcccaccctttcctccttaaacaatatttcattaaagtctcccaaaaccatccatggttcttaggtggctagcaactttaaatctgcccataattcctttctaccttctatctcattgaaagcatacacaaaggtagtaaagatgttgaccttaccatacaaagttgatacttgaagatggataagttggcttgtacatttgagtatgttcaccgagaagctacaaggattccatgccacaataattcgacctccatcatgccaagctatgttagatgtcaaacaccatcccttaaacatatttacatataaggccccaagctttggagccttaactatcatctcgaggagaccaacaagaccgacattatgaacatgtaccatgttcttgactaaattttgcttgctatggtcattgatccctcggacgttccaactaattattctattcatttcctcgaggaggatctctccctcctcttgttttctctactgtggcaacttggttgagcccaatcttgatgaaatcagctgctccttcttcagttgtagccatagcctgaacatttggtgcttctgcagtggaaactgcttcaaaattatctgctaacacttgatacggattagttctacctggttcttcagctattgagatacttcttaacttgggccccttactaacttgttgaaaaccttcattgtctacttgttgtttactgttgcctgcttcattcacagcaggctttttattgtttttcaccacccattgctgctgacctccttgcttctttttacagtctattgtggagtgtcctaaaccttttcaatggttacattgtattggtttccactcatatttaattttagcaaaaacatcaaagccatgctcatcctcaaaagagacacgcacgggaactcctgctgaattgagacctcaatgagaactctcgggtagttcaatttatgcttttcctttgtcatggtatccacttgcaagggctttcccaattgccccactattttgaacaaagatctctcaccccaatacttaagttcaagatccggcagttgaatccaaatgggaattgatctaatatcctcttttttgaaattaacatcaggttcccatgctttcatcaccactggccgattgttgaaaaacacataacccccatttagaatctcatctctggtttctaatgagtcgaaccgcaccaggaaaaccccatatgacagtgtacctacactatcaaccttttctttccaaattcttctgataaatccttctataactgtcaatggtgggttagcaccaaggacataacaaactatagaagaactccataaatgaacttcatcctcaatatcttcatagtgattttgaccttgttataactctcagagttcttgaaagatgaatctaaattcctcaccactgaaccagaacataaaatgggaggagttataggattaccttgctgaacgttattatagcatttgcaattggcctgtaggaaatagtcaaaatccctgcaaacctcttcttgtcttatgatctcttgcaacgatgactttggggagagaggcgcctgaaacatatctgcactactctgccccaggccagaattcttttccacactgttcgattcattgtcctgttccttttcaccatcgttttcctcctccgaaaactcaattggttcggcaccataaatgcatcaatggatttagtctttcgcacatctgttgtagaggtaggtcctctctttctggtttctttagctccgatcgaagctttcccaccttcaccctagttttcgccatagcacccagcccgtgaggctgagagagagagagagagagagaga

SEQ ID NO: 186606 - DNA, 3091 bp, Cannabis indica
tttttttcttgaaatgaaacaaaatatggtttggagagagaatagtcatacactattctctttgtgcgttgtctttcttgtcttcttctcttcctgctgagttgcccttcctcttatgcgtgtgtctgtgagtgttttattctgtgtgtgcgttgtgtcttaggtatctcccttgttgttttgtttgttgtttgtctactgccttcttgctcctttgtgttgtcgtctttgggttttgtgtgtcccttgtttgtggtgtcttttgtgttgtggggttgggtgtgggatagttttgtttgtcatgtgtttgttggtttgtgttttcgctgatatcagtctttattatggtgggtgttgtggggtgcattggtgtcaagaaaggtagatgtatctcatttaatgaggcatctattaatcttgctctgagtacttcctttgttaaggtctactccatgttctatctttgtgggaatgttctttctgataaggcttttggggttaatgaagtggccactgcttgtactaaattgtggggtactcaggtgaaggttgactcccccttttctggcaatgctttctttaacgtcttcaggtttcgctttgagaggacttcgaataggaagagggttttggatcttggcccctggtgcattaaaggagagatcttggtctcctggctttggtgtcaaggagctggcatttgacatgatacatgtttggttacaaattcacaacttgccagaagattattactcaagagttaatgctattgtgttggctactcaagctggtaaggcggtttacatagaacttgatgaatctaaacttattttttaggataagtggattagagttcaggttgatgttgccattaataaccctctattttgtggttgttttctcaaattgttaaatggtggggcctgctgggtatacatcaaatatgaaaaaattggtaactgctactacctgtgtgggaggttaggtcaccagagaagtggctactctttacaatcactagttactatctgcaatgctaatggtgtaccatttcctctgtttggaccgtggttaaatacctcatccttgtaccagagctgttattctgagaaatctgtcggtcctaggttgggcaaaggtttgggtagggggatgccgaggtcgagatttttgaattcgacgatgccggtaaaggtggctggaaaggtgacagcaaccgttgagggagcttcagtgtgtcgtacttaaggctcgagtttcatgccttagttgaaagctactgatcgagttcgtctcagacttggtatggcgtggagacccaaaaatttgtcgtcggtgccgcacattgaagatcaagatttggccatttttaatgggtctccgtcaaagctttctctgtatactagaaaggcttctgatggtttgccaaagataggaggtgtcgtgagtaaaggaggggatcgtgcctgccttgtgatggagacaggtcaaagctcgtttaaacggtcaatgcctttggtgacatatgatatttgtgggctcgagcatggttatttggagacgggccaaagatctaatttaaaagatgtgggctgtgtctctttagcccatgcggagttgggtcgcgacttttctcacgaggtgggccttgatttaacttatcgtggattggtggaccaaggaaacaagttgaaggctttgggctgtattgggatgtctaagggctacggtcttaatttcttgaaccacggtgttgggtcaattaatgttatttcacgggatgcaccgtgcgtggtgggaagagcttgtttgatcagtaacaactatttgggtagtggaagacttggtgaagacccaagaagctctttaaatggccaagaaattttggcacatttggatgagaagagatctctgaccaaatttttgcaggcctaagaaggttacctacaagaacttgatgcttttgagacattgggcaataataaaaggaaagctcccttggcggatattggggtccaagtgacctctgaggttaacgagcgtactacacttgtcaagatgagaatattggactttgaaaatttttctcttagaagtaagcctaacttaggcattagaagagttaagcgggttgtcagagattttccccgtggagtggggtcggtgtgcggtaatgatggagcgagtgtgtctaggtttcttctatctcttcagaggaacctatgaccagtaatgaagtggataaggttttctgtgccgaggtggctaccagctgctcccagcaagttgacaagccaatctctttggggaagtctgctagacttacaacctggaaggctaaagctcggttgatggacatttctattcctagtaagaaggatgccgtgcttgaggatgaggaatctgcaattggtgtgtcagtggtaggagtgaccccggtggaggaggatggtgtccctcatccatatgagccatgagaggtagtgcttggaactatggggagtggggcagacctctacagttttggaactgaaagccctgattcggtcatgctctcctaactttatcttcataaccgaattgaaagtggatgccacgtttttggtacgttctcttaagaacttacacttttatttcaacattattgttcaacaatggggagtgaggggggtatagttttagcttggaaagcgggttttagttttgaaagcatttgtacctctaaaaatcagatttatcacattgtttactctgaccttgagcaccgtccctggcttttgtcttgtgtctacggaccccctatttccatgagaagaagaaattttggtcaagcattatggatattagtaggaagtttggagggccctggttgattttgggtgatgtgaactttgttttaagtagttatgagcgtgttgggtctaaggggaatgaccaattcctccctttcatcacgaaactgattaagatcaatgctttgattgacttgcccattaaaggggacaacctgacatgggataatcatagggaaggcactggtcatattaaatcagctcttaataaagtagtggtgaatgatgaatggttatgc

SEQ ID NO: 186607 - DNA, 3862 bp, Cannabis indica
aaagctctaatgtggttggcctcatatgcccattcaaatggcacttggggcgaatcaaatgataaaaggaatacacaggaacagtgatttagaggtggattttgacttattatcaaatatggttttctcaggtctttaaacactaaagaaaactaattacagcttgtgttgtgctttcatcatttccaaacaatatctttgcttttggccaaaaacaacctgccatacacgtgatagtaaaaagatttagattactcaaacaatcaattctataaccacaattgtgtatctaaccacttcataggaaaaagaagtaaacaatacattttttcattgctcagtgaaactagttgcaaattggcacccaggtaaagagtttagaacaacaccctttttttgtcaaccaaatctccagttgttaaaaaatgaagcatgctaaacaatgacaagtaaattcgattcgagagccttaaaagtaagagaaccaagaccacataacagctgacgactactactagagacttgtacaaagtgaaagagattttacttacggtacagcattactgcaaccttgttcttatttaaagacggcatgcatttgttcaaagttatttgactatctcagaaaaatgtacttaccgatgaggtacaggccttgtgttcaatcatcagcaagaagaccaaacaaaaaaaagtatgatataacgaggtatattgattagtatcgtgtcatttgctgcaacatttgggaaccagttggttgtgtaatcaactgctctgagctaagggaaggtcgttgaaggtggttagtgccaactgggttaccaagcccttgtctaataatatctttacgattaattgtgtttgtttcagcccgtgaggattccatatatgttcgtatctgacaaaagaattagtaaattgtgtcaacaaacttcaaattccatagaaatatttattgagcaaaaatgacagcctatgctcacttaccatgtccatacgtttcttgtgaagatcatttactgactgcaagttcacaatcaagaaacccacataagtattctgagtagttcttcataactgagaatagtcaagaataaaaaaaacaactaggtacaaagtatacactattttctctacatcattatataattatttttctcaagcttgccattaaattatttgttaaagaagagtttttagcacagatagcccaatgtaaaaattatacaccatagttacagtacttactggtctgttttggaacttctgttcttcaaatcctggaactgtcaatttccaatttttttctgcacacacattagataagtaagtctctaattgcaccaaaaaaatgaaaattaaaaataaaataaaaaagaggttaacctcaaaaaccacaactaatcccaaaattccttcatagtttcacttttctttttattattattatttctagtttcctcatataatgcaacacataatcttaactcataacatcttcaccaaaacaaaacctacaaggttacatcactactaaaccctatccccatctctaattctaaacgtggttcacgtgttaataataaaatgcatccaaataatcgtagtaaatgactgcagcagttttaattactagaaagcactgcttatgctctaccccaaatattaaaatgtggatcgtttaaaataataactctatgggctgacaagaaaaactgcataatgtagaaacagacataaatgctaagttcatggaggaacaagcattcaagctgttgtacccaatatgcatttttaaacaagcatagataactattacaacaagaaaaagttcagacctaggtgtagcaataaatccttggactctactgttgaagatttacggtgctttgccaaattgcatataaatgttgtcacctgcaacaatagaggacagtttgatataaaatgtatcttactatacaggcaatattaataattacataaataaatagcagaaactgttgaatgataaattccaaccacgtgaaatcataattgccagcacagtagtgatcacacatatgtgcatagcttcttagtgaaaatctcatagttataaatagtgcatttggccaaccacttgaggttagctcaagtggccatagcggggttagaagggtgtatgtggaggtcctgggatcgaatctcaaattgtgcaatgtaacgtgtgtgtatatatatatataaatgcttcaatcaacaaaaaaaaatcgtgcatttggctatcaatcactgcaaagcaaagtataccttttatggatcagctatccaatggtctgcatttatatttcataattttggaaaaattaattaccaatcagacaaacaaagctcttcctcacacgtacttatgaatatggtatgttgaatatttgcagagtgcaatcataacacccccgctgatgggttgccaaggaacagtaaaatacatttggaatgtgatacagccactcaactcactcccaaaagctaacataagagagtaaggtgcccaagtagttatataacaccaactaatcccatacttaatcaatgtggtatcctaacaatacacccgcctttagagccgacatccacagcggcccactaggtctactctgcagtggccaactctgactcgtaaaaatgttataacatatgttgaaacactctggactgaactcacaccataacctcaatgacacatgatgtgaaacttatacaacttaagtatgtgaagggacaagaggatacgacataaaattccgcacatgctctctaaaaataggccagtggagtctagagatatctttgacaaaacattagataaatggacacataaagctttcttgtaattactttaaattaaatgtgctaaactagtagtttttcatccaaacatatacatacaaatatctaaggaagaaaactatgataacatgtcttacattgtcaataaagtcatcgcctatctccaaaagaatatcttcaacttcggggtctatagttgcctgagaatccacctgaatttccaaaggatgatgagagtaactaattgtatcacaataacaaaataagagcttcagactaaatcaaatttcaacatgaaaaatgataacagggtgaaatgcagcaaatacctgtgaaactaaatcttgtatcttccttttcccaagaagctgattagttgcctctgttccttggcttgaacttcccccaggtgtagttgttcctgatgcagtagcatctggttgagatcctgttaagctaagagacttttggcctgagggcccctggattcttggggagtgttgctgctgaagactcaaggaaggctgttgttgtgactgttgttgtggcagctgtagttgctgttgttgttgtggcagctgtagttgctgttgttgttgttgctgttgttgttgttgctgctgctgttgttgttgctgcaactgaggatgacccattggtgattgattctgcacaatttgggataactgttgtgggttcagggccattgaagtttgatgcaactgaggagctgaagccagatgctgctgcaagatagcctgctgctgctgttgccgctgatgctgttgaagacggaatgaaggtgaaccggggccagatattgcaggaatttgttttaaccactgatgcgacaaggggttctgcaaacctgcttgtccattctgagttaagcccgacagctgagagttcataaatgccagtgatgatgacctcggtaagttttgaacctgttctttgtgaaattagattcaatgtgcaaacaaataataatatttacatgcctggaaaaaccgaagcattataatgg

SEQ ID NO: 186608 - DNA, 4558 bp, Cannabis indica
tgagagaggttagtactttctagcaggtccattcttccatttaaattcttattctcttcactcgagtgggtttgtaaagcaaattcacaaatgggttttgggattcagagggatccctctgttttcttcaagctctctcttcttctacttttgttcgttccttatcatggccatggcctaaccgagaccacgaaaagaagaggcaaaagtggtcgtaagagtagcagtaaccagtgtgatttttacaaagggagttgggtttttgaccaatcttatcctctttacgacccatctgtgtgcccttttattgagcacgagttcacctgccggaggaatggccgtcccgatcagatttacaccaagttcagatggcagccacaaggctgctccttggtaaggtatgcatttttctgccttttcttttcttaatttctcaccattcactctgccccaaaactcttagcttgtcagccataattaattaccattctgattactatatattattatggttccttccatttatgttttcttgattatatacatatgtttaaatataatattttgtaattataaatgatatggtattagtactctgtcacgtagtaatgaaatacttaataagatacaataccgtcattaggctctggcatagtattattatttatttagacaataaataatattcatatattatactcacccctttataatcacttgaggccacttgagctagcctcaaagtcgttgctctggtatagttttcaaattacagaggccataatactatatggttgttgagtgttaattgtatcattccactgtctcatatgattttgctaagtagtgttcatcattaagtcaataacccatttaaccccaccaccaccaaccccccatgaatttatattgtccttttaaaagtgttagtctttttcttcaggattctacataaaatttgtgttttttgttactcttttaaatttttaacttaacctcgtttataaagggatattcattttaggattaatttgaaaaaaagtaagtaaccaattatggtattggtaaaatattccgatttactgtccaactggttttaattaattactttctttaaagaaaatttgtgagttgtcggtattgttattaacagcgttattagtttacgtatgataatgtattttatggttggtattcaatctgtctcatacgcaaagtctcagtccaaagatgcatgatttttaccccctcaattatgggtatttatccatttgggtgattttataacttcgtttgttacctgctattgcgctatatttaggtgattttatttttcatgggtattgttaatgttatgattactaattatcggaaagagaaagattatccttaggccatttgatgggtggtctgtaattaactttattattaaactagagtaaggtaaaattacaatgaacgattagatctgtcctattatgtcaccatgtggacgtggttgtggcttgttgtgactggtggtgaggctcaaggcatgtgaaatttttgttttggtggatccattctgtcacaataaagcgcgtggtgtgtacgtgctttaacccataagcgcgtggcatatgagagcgaatcgtgtttgttgttcttgttaacgagaatatttgccataagataaaatattatcatcaaatcagtaacaaaaggaaaataattatttaaaattatatattaatcaggaaaaaaacactgccattaacgtgctgttattggtgtgtgattgctcacagttccacgcccatgttccgcgcttgggacatatactataaacttgtcttttttctcttcttctataattttcatgacatgtggcataaattattaaatatgaatttattattcttggctgtacaatatttttattttttccttagaaaataacgctttttggtatttattgcttctttaatttgcagtttttttttttttttttttgtataacactttaattttacagttggcttgtgctacaatttctttttttacagttggctgattgcaataattctttttggaatgtgtttgtgagagggggtcattaaatctccaaaagtcaaaagctatatatattttagtaaaaatgactaatcagtacatagtgataaaccaatgttttaacataatgtgaaatctatgcattagataaaaaaaaaagttatctattaaaaacttttgatagtggcatggcatgtgtatacaagttgagttgtatggcagtttgtagaacataccacgatgaattggcataatatgtctgcttttagttctaaccataaacttttaatgtttctaatttgaataaaagaagattgttgatcgtaaagtattataatgcatatagatcatgaaatgattaaaaaataatatcttgaaaataaataaaattgttgtggaggtgagattattaattaagattgattaggagtcggtgccgatttaaagggccaacatcaacatacattcttggttgaaatgggaattaaactagttgtttagagccgtaaagctcacgggctctgcggtggctgtgtcttctccatttccatgtgacttgccttttccatttatgagatgaacaaacatcaataagtactatgtacatgctctatttgtgggattcgaagaattcttttttaaaatgtaaaatcagaactaaagcacctaatcataagattccaacgcacacacttttcttgaaaaaacaaaaagagtaaaccaatcacattttttttgtctttttcaaagagaggctgaaatgaaattacataattattccatgtgatttaagtcggaaacatttgtgggtgtgatgtttttccaattttggagtaagtgtaagtgatggtagttgcatttcgctttgataacaatgatgaactgtcatgattcttttttcttctctcaattatggctcaattgaattgtgatgaagaatctcacatttttatgacattaatgtagtgcctgttcatgtttttatttttacactttttaatcttattgttgctggtagctgtggttgaatcacttactactaatacaaaagtttaagcttagttagtgttagctattttctaaattttttgttaatgtagatttgatggaaaggatttcttggagaggctaagaggaaagagcattatgtttgttggagattctctaagccgaaaccaatggcagtcactcacgtgcttgctccactctgctgtaccaaatgccaaatacaccatttccagagttgatgatgtgtccacatttgagattacagtaagtaattttcttattaatattctattcgtgataaaataatcatcaaattctacaaaatttatttaaattaggatgtgtcaaaaatttaaaaactatatgatgtcggttaaaataacccttctcaattaattaacaatatctaacagggatctcctgtgggaataggtttagctggttatactttaaggcatcacatgaaatatctgtccatgactttatatggtaacctttcaaatcccatttcaagcattttccagaccttaaaaacttttgtcatcattgtaccaaccatgtggtcctctttatatctggcccattttcacataacttgtttaatgtggagactctagactatagttctaatcaaacaaaatggcctcaaacagttctgtgcactagtgtgatctgtttggggctgcaatccgagcaagcatgtgtgaaattgttttcctttcaatgtcaatataaatttctcaattattgcccaatttttggcctatttttattttttcaacgtagttaagcaacttgcttgacaaacatcactttgttgcaatttgcaaaagatacattgccatatatgagaatgagttgtgacctacaaagtgagtaagaaagtgaagacatgattgattatatgccaaccaatcaccttaaatgacacatgtttacacaagtaaaataattcaattcatacatgagcgtgtcccatattttaatagatactataaaataattcagaatttcatggtacgcagcaaagcatccttcactccctactcgatgatgtgtaggtgtagagaaattatatatctagccaacttttctcttttcttcttattaagaattcgagtataaattttcatgcatctcttttatttgtatcataatcactatgtttggtacctctcactctcatcccacaactgatattgccttgtttttttgcaggattatggagtcaaagtaatgcttgaccgaaatgtttatttggtggatgttgtgaaagagaaaatcggtagagtattgaaattggattcaattgagggaagcaagctatggcagggaattgacatgcttattttttaacacatggcattggtggaaccgtaggggtcccagtcagccgtatgtttctctctctctttatgtatatattaaaaaaaatagttgttattgtataaactatgtcttattctacaatgtgatgtcacactatttttttttgttg

SEQ ID NO: 186609 - DNA, 2595 bp, Cannabis indica
ttttcttcttcttcttcttcttcttcttcttcttcttcttcttcttattttcataaaacttaaactaaaacaatgtcttcctcagctgtagttacaactggctcatcatcctcttcatcatgtaccttcaacaacaataggcactccatcaaaaaaactcatccaaagtcaccatcaaatattcccaatttcacccaggtaataattaattattaactatttcatctcaccaaaaacaatcactttgttacattagttatatgttttgttatattcagttaattctgttaagttggtattgtttattgtcaatttatgactatattaatttgcatagtctaaatttacaatcaaatacgattattttgctaataaaatttttcgtaataactactattttttatatcatttcgtaataaaattttgctaatatatataattttgtttcaccaaaaattgattttcttgttgtaacaaccattattctagttgcaacattctcttaagttgttattcgtccaagtctagaggctcgtaaaaaaattaaaaattaagcaaaataatcaaataatagtcattttataattgcagagtgtaacttttgattgtttgtgcaattaaacatgattattttgctaataaattttttccgaatgacttcttttttttataaaaacactctcattacttttatatcattttcaaatatctcataaattagtacacattcaataactcttattcttcctaattgattttctcatttttttaattggtctagaaaacaagtttccaaggcttatcactcatagaagccaaaaggggtgttgctaatttcttcattaaaaatgataacaataacaacaagagtaatgttgttggctcaagaagaggtcttaatgtcacagcaagaacagctggtgctgctaagtccattgaggttgaagttgacaagcctttaggcctcactttgggtcaaaaacaaggtggtggtgttgtcattacagtaagcataatttcttatttttctttttattcgtttcggatctagcgttttgcaaaagttacagattaaaccgtctgttttgttaaatgataaattaaacaatattttttcaaaaataatacaaaatagtaccctgaattcaacataaccaacaatcgcagaaaatgtaatcattgtttttataacacttctaaatcgaattattattaaattttcttttaatagaagattaacccatattactatttggtaccattttgacaaatatatggtctaatttttttatttaacaaaatagatgatccaattagtaacttttgcaaggcacagggtttaaaatcgtatattcccttttctttaatgtcatgacatagttacaattagatgacttattaggcagttgaaggaggtggaaatgcagcaaaagcagggcttaaagcaggggaccaagtgttatatacaagtagtttctttggagatgaattatggccagcagacaagcttggttttactaaaacagctattcaagctaaacctgactctgtctactttgttgttaacaggtttgttttttcattttatttcccctttacaatacaaagtcttgaaattataaacaaaacaacaaagattagtagtaacttgtaatgaattgtagagaatggtaatgaaaaatgccgaaaaatagaaagatatcactcgatttttatcatggtttggaaccaaattttggttctatatcctaatcatcgaaattcactatgatcaatctgaacttggtctatgaccgcgtacccctagggtcgaccctaagttgaaatgacccataagcaaaaaagaaaaattgggcccttactataaaaataaatgatatttttaaaaattattaaaaaaaatatgtatattttttaagaagtatttttttatttgggctcctaaaataaatgggctctaggcgcgaacctagcccacttatgcctagggtcgaccctgagtacacctaaaatttcttagtctcaaagaatttctctcttagattgaatgtaatcaataggactgctactatttatagagatcagtaactttagtaacaaacaagtcagttataagtaagtaactagaattagatagttagtaactagttactagctacttaaactttaggtggattaacttccacacaaaatttagaagttacaaaatgatgttacttaggaaatattgacattttaatattatgtttggttttcttttgatgtagaggtggtgctgatgtagatgttaaacgattaccgaaacgtccggctcctccccgtttcgggaggaaattaaccgagacgcaaaaggtatgaatacgaaattcacagttatggttgcatgatgattacacaatcaatcaaccaaaatctaccaaataccattttttttcgtaatgtactttacttatgttgcaggctagagctactcacatttgccttgattgtggattcatatacacattacaaaaaccttttgaagaacaggtaacataactaaaagacacaacattttggggtttacacaattggaatgagttgataggttaattt

SEQ ID NO: 186610 - DNA, 5352 bp, Cannabis indica
caccaccaccaccaccaccctaatctcaccgaccatagccatacataacagagcggtcaaacacacacaaccacctctctctatctaatgactaataatccccagtctttatgcaatattaacagcgactggctttccccgtcccatcgcaaatcctctagtgccatccggcatacgcggaccaggaggtgggggctgcttggttacacctgcctccataccaactaaattatttgatggcgaagtccctgccatgttatttccacgattgttgtggtggtattgtcctcttccacgccccttgcctcgtcccgctactgcgcccttttttctgcccaccttccttctcgttcccatgctgctcttccccctgccattattcgaacacattaatcttaataattaaaaggccacaatggcatccctgagactccatttttagtttttgcacagaaccactaacaataaacatttgccaagaaatttaaggaaaaattcattacaccaggacaaacaattcccacattctatcatgcatacaataagcctcctagcaccagcacttactacgtgatcgtgtgaatagccatcggactgctgaggagcatcttctactacctttccattcactggttgctcagctgcacaagcatcctcttcctcacattgcacgtctccttcctggccccttcttcctcggacctgagaaggttttgactgtcaatggttcaaagaaataaagccaccagaatagtttgcttatattgcattcaacttcaaagacaatcaaaatattttcattttcacataccatgcgcttaaacattaagcggacccttagaccactcctccagttcctttcatcatttaactctgaaacctgcataatgtgaaccccattatttctctagcagaagaggaaggaaggcaaatgttgtaatatactagttaaaataaatacttacagctttctcagctagctcaactgactcatattcaacaaacgcgtgcaactgaaaaacataagagaaaattttaactactactccattctacaatctttccaactacttaaggtaagtgttgacaactactaatgatgtgaaggatgtccgtcactaaatgtatgatgacaatagaacaagaataaaacatgcaaaagcttttcatatcttggcaggcaggcccgcaccaagatatcatgctttagtggaaccagtgaaataatttttattaatagcctgaaactgacaagcaagcttctaataaaactgctcgtaaatatccactgtcaatctgatagcccaaagaatggcagtcaacagaaacagttttgcaggacatgtcaataaaagagagcacaaacagaacactcatgcaagaaccataatcatagatttgaaatatatgccaaggcatttctaagcacctccatccacttctcaacctaaagagtacatagtgacaagaattatagcattcctgggctatcaatatcattcttgctcaataacaatatcagataaaaaggttcctaaagaaatgaaacactagaaggtgattcaagaattttccatgcctattgagataaaatagattaaggttgagctcttctattttcatttttcatatgtgatttacaaggaatatgaaaattatcgcttacacaaagcagtaagaactttgaaaaacaatttaacaaaccacataacttaaccaaaggtataaatgcttgtatgcataccttgttactgaagagcatgttgtcagattttgctgatcttgatgctgcagaagatcctcctccattggaagtctgtggctggcaagtccggattgtctttacactgccaaagagctcagcattatctccatatctaggttgctactatcatattctttgaagaaatgaaaagctttaaaattacaagttttttcagaaaaaaagtaataaaattacctcccaacagaagagaaaaccttcatgaggttttgatggcaatgatcctcaggcaagttctcagcaactataatgcgagactaaacaacagaatgcattttagatgattatttgatgtgataaaaagaaaactcaagcattaccttacatgatattatcaaaagccaaataggtaacatgagctaagcaaaataaaatgtattgcaacaacgtaaaagaaattaccatgcaaattgcaaaccaatcaagcaattatgccaaaaaagaagtagctaactaataaacaagaacctacttgcaactcttccatatccaactcagtcagtggatggatgcgtctaactttctttccatcttcactaaccacctgcagatcaaatgcatttagaaggacttaggattaacattacagaggaaaatatagaataaacattggcaaaagaaaccagaagaagtatagtatttgtttgaagaacaatataagtagatagtgtaaaaggcgcataaattaactcacgagctttgacgagttgcgcagaatagttgctagctgggcatgagtattgatgagcgccttaattttcttaaaagatgcaacaacagatattggcactacaaaatcataaaacaatatataggaatgaatattggacaaattagatatgatagaaagtcaactgcaactttcttgtaaaacaatagatattaaacaatcttagtgtcttcgaaatattgcaatatgacatccaagatattttgaggagacatggatatccatgaatgcaggttagagtatgctgtacaagtatgatgtacgttaagatgccaaacaagagtggtgcgagagagagtatgctgtacaattatgccaaacaatcatagcaattaaatgcactgggccctcaaaacaaaggttaaatattctgtatactcaaaactagtgcttgtgtgtgagcgcatgagagagaaagagagagagagagtggtgagagaatgacggaaatttaccaaatccttcaggatctttgttgatgaacctcattagatgatcagtagttgccaaattcaagtcgctgaaatagtactccacctgaaaattttggtccgttaaaagcattacaaagaaaattaaggaaatttgcagctgcttaatgtaatatgtttcatgctagagggtgaacgtaaaattcacaacgaaatcatgtttacagaagtggagtctgtaactcatatgttcatgtaaatcatcaaaagcaaagttcattcatggtgtgtctcatgtaaatgaaaagaaaaaagtaatcattatggaggagaaggaaaacattctagggccatagactactataatcttgtctataattggaaagagtggaggaggacactgctaagaaaatgcatgtattgaacaatcttgtctagaattggataaagttattataatatagatcacttcaaccaaacaatgcaatatcagaaggagcacggcagaagcaactataagttgtcctccttaagaaaagcataacaaaaagaaaatccaaaaatcccccaaactcttttagcacactcaattgctatgttggtacacattcaatacaatcctacagaggaaaatagaaaaaagaatatgcaatttgtcctgccaccccctttatgaagcatcaagctatgtccaacaacccagacatcctaaatgcttgtcgaacatagtgtgaatgaatctgatagtggctacatctaattatagtggaaaattgtgagtgagcatgttatacatttagtataaagagaaacacaaaagtaattaaggcaagtgcaatatcacatatgtgaaaacaatgattttaattaagtcatgtttcttccatcaaatctaaatatggtacattaaagacacagaattccgtttagtaagatatcttactttaatcatgattgcctgaagacagtaaacaaaatgcaaaaaattacatttgatgatctccaaatcaacattttagtaggaagaaggttttttatatttatgaatggcaaacctgattcaaaagcttgagagtagcctcatcggaaagctgctgttgcggctgcttattcttggaggaggaggaggcagagtgatcagaagatggcttaggaggaggctgtggaatgggaaggtcttggtcggggtagtagtgatgctgatgctgcggctgctgatagtgaataggcaagtgatgaggatggtgagttcgaatcggaatcggatggggatggggatggggatgaggacgaattggaacgtggaagggagcgtgagagtgatagagatggagagcgagggggaggcggaggcggaggaggagggatcgggtggagatcggagcggggagaagggacgaactcgggagcctgggcgttgagtctgctaaaggaaacatttctggagagatcggaagactgttcctcgtcttgggccattgattgtggttctagggtttgagtgagtatcttcctttctctatctctctctctctcgtatatcttcttcttcttcttcttcttcttctcagtgtactctgactcggtacagtcggactctcttcttttcttttctcttctctttcttttctttactttgcttttggtgtagatgtagagtagactctaatgagttgagttgggtcgagttgagttgagttgagccgagtccagttggagaggacacgacagacttctcccgttcaacaggatttggatccatctccattctctacgctatttatactatttattatttattactattacaaaaaagaaaaagacaaatcactctactaccatactacacaacactgttagttgttagttagtgttagtcttgcttttttatttttatttttttaataattagaagaaaaaaaaagttatgtatatgtaattttgattataaaagaaagaaaaagtcatgtgataattataagtatataattttaatctgtaattttatgttcaagtttattatagaattttctcaaatctcaacaaacatcaaagtctatcaacttgccctatctaaccacacaaagtattcttttcttttaaaatgatgtggttgatcaactatccttctaataaaatcacatccttcactatgtttcactaaaactaaacaaacaacaataaaattgaatacaatttcacactttagggtgtttaaatctgaatataatgcttaaagttcttttaaggagaataggtaaatttcattaataaagtttatatattatatatatagaattttattaataaaattaattgaacataacttgctcaaaattaaaactaatcatataacggcttcatttagctttatttttatgtaccattttctagtttttaaaattaaa

SEQ ID NO: 186611 - DNA, 2649 bp, Cannabis indica
gattaatagatacaaaaaaagaagtattttcaacatatacccatagcaatcctatcatggagttaaacgtgttagtatagcccaagaaaaaagcccaattacaattggtcaagaaaaagtggaccaaaggtgataaactatatgtttaaattaattattctagagcgcagataataaattttaatgaactttaaaattaaaaaataaataaaaaaaaaacaagtttaaagcagcatggtaaagtgtatttgattttgttctttaaatattttaaaacatttaaaaattctctaattgtggtggtgcaagcaatcaaagatccaaaaatacatcagtagacctttttgctgggaatatcagtaaacttaaattgttgtaattgagcttattagatttgtatttcgtaatgactaatatttgtaacaatattgtgtaacatgttataaaaaaaaataataaacacaccccgtggaaaattcaagtaataaagaaaaccttttgccacttctttctattctctctctcttcaaaatgtataacttaagattcacttctaaacaaagtgtttctgctctaaaaccagtaagcaaaatgtaaggtcaaaacctaaataaatgaacaaataataccagtcaaatattacgattagctgacaattgaaagcagaagctgcttctgaagccaaagacatatgatggggtcctaacagatcatttttctctcctcttgcagtgatatagaggcaaagcaaggttagaaaccttagctacgaaattgaattcggacatgattgctcatgttcggattctccacataccagtcctatatccaatagacatcagcacaagctcccacagcatgttaggaatgcttaatgggttcaccttggatccaggaatttcagaccagttcactgatatctcaagcacccggatgccaaaatgtttacatagataaactaattcaacatcaaagcaccacctgtgaaatattcacaatgcaaaaccttaaacaccatcttacgaattcttattctaccgctacatttcgaatttatgcaatatttactacttagaaaataaacagagcaaggacaaggataacacgaaagataaactagatccttaatgttcactctgccaataagatgtattaagaaaaatgcccataaaatttgatatttttgcactccaaaatctaaagcagtgaatatttatcaattgtaacatctacaagcaaatataccttctcaaacgaatattactgaaaagtttccttgcagaactccttgtaaacatcttaaaaccacactgattcaaaaagttgtgctcattaggaggattaattaaaactatgaaatcaaaggaacaacaagaatacaactgcttgaaaaataaaatatagaaaataacctgtgtatcccgaattccaggaccagctgacaagagaaccacgagatggaaacccttcattaaaaaattgcggtaccacttcctctgaaatattaagtgaaacagttcaagtaataaatatgaataacaagaattaaagtacacataagcatcaagcagcataagactgaactgttgacaaggccttctcctcaagatgagcacgagaaccaaatgcagcaagtgggatatcagctactttaacagttgaatcactcgctgccaaatctccagagttaaattcttttctggcaactgaaaggatctggaaggcagcaagaaacaataaagttatgcactattagtggccaacaagacagacccgacaacaaaattattgagactaataaataaaagaacaaacctgattttcaagtttttccaagtcagtaatctttgttgcaccatcagcatccagcattagaagtaattcaccacgtgaatgaagcattccctgttttgcaatgctttcacaaaggcaaaaagcttcaatcaattgatgtcatgtatcaagggaataccatggatccttcaataacatgtaaaagaatacatattcaagtaaataacttagatcagactcacttttctaatagcttctcccttgccatgatttctgccaagaagaataaccctcacattatctacattgtatttcctcacatattcaaaagctaccctttttgtcccatcagcactaccatcatcaacaatcaccacctgtttaagaaatcatctataagcaaataaaaggataaagcaacaaatgttatactatgttctgaatttacaactaattgttcttctatattaataattactcatagcttctacagcacagattcaaaaagaaatatattgagccatttgtggtgacccagaaaaagaatgaaacaaaatagtacctcaaacgaaaaagatttatcctttgcagcacgttgttgaagataactaaagaaccaaaatatgaatattagttacaatctaatattatcttaaagacgtacagaaactatattaaatttggaaaccctaagccaaaaaccttccctatgggttgcttggagaatcaatgttagtatgacagcatgaaagaacatactttctgatcaaaaatccagattccatacattatgaaaaatctgaaaataaactttttaaaagagatataaaggataaatattcatacacaacttac

SEQ ID NO: 186612 - DNA, 15874 bp, Cannabis indica
aaaaaaaaaatgaaatttttatgaggtaatgtaaatgatgtagtaaaaaaggtaatgagtctaataagatagggttttcttcacatgcgtcgcacgtgtcaagtaaaatttaaaaataataaccctaaatcaaaaaaatcaaccgacttttcgcgatctaacaaagctagggctctctctcttctctcttcgttttagctgcaaatctcagcccctcaaaatcaaaatcaaaatcaaagtcataatctttgcttctgattctcgcggagcgaaggttcaatttgattcctctgatatctcttctcaccggtaataatcaatatggtttaggttttttgattcagttattctttcagttttcactttctttttttcgctgcgtaaagctttcgatttcgttttttcaactcagcttcaactctaaattactttcttttttgaattcacttcccttttttgaaatttctggctgaaaagtttcagttttcatggcaacattttgaaatttgagaaatttatgtggttttaatgttttagattactctcgccgtttttttttttttttcagtgtttgaagaaattagacccatgcaaatcataaatcagcatttttgttgtttttaacattaaaaagtatatatatttttgtatatagttgatgaaattaatggtgacaacagtgtgtatgtgtgtgtttggtttttctttgtccccaaatttttaacctaggtttttcatcctcaaaaattagtcaaaccctttgtggttaaaagtgttgaattgacgagtattggttgggataagcagatatggtaatgttggcttcatgattgatgcatatgcagacgtttgaaatctgttggcaccatacaaagtccatagagattggaaaggggcaaactagtgctttgctttgagttcggatatgactgtaacgaaggcaagtaggtacccgggaagctattacggtaatgccattcaaacagctggtgagtctgagggttctggtagctcaggaagaatggacatggaaattgctgcctctgaggcttcaagcgccttgaagaggaattgcataagcatgaattcggacaagagtgctggtttctgtattcccaagcaagttgtgaacttgtctactttgtcacgatctgagagaaagaatctgttgcatagattgagaaagaatcttggacagactagagttgttatgaagaaagctgagttgtttaagcctaatggtcttgcaaggtcttcttcgagcggcattcttagctgtagcagcgggcagaatttgccaaccaatggtaaatccaagaaaccctcaatgctaacttctggccaagttaagaacttgaatgctggagttaagaaagctgaaatgaataggagtttttctgggaagtttgaatcagctaatcggacttcaacttcagccccaagtgctacaattgtgatgttgttgaaacaatgtgaggtattgttaaaacgattgatgactcatcagtttggatgggtatttaattcccctgttgatgtagtgaagttgaatattccggattattttactgttatcaagcatccaatggatttggggactgttaagagcaagttagcttcaggttcatactcaaatcccatggagttttatgctgatgtgagacttaccttcacaaacgcaatgacctacaatcctcgtggaaatgatgtccatgccatggccgatacccttaataaattttttgaagtgaggtggaaggccattgaaaaaaagctgccaaaagctcatcccaaaccattaccggaaaaatcaggttctagggtgaacttagaactagctgagccagcacctccttcaaaaaagaggaaagttattcctacacaacctgagctaaggccagagccagcaaaaagagtaatgaatgacgaggagaagcataggctgggcaagcaattagaatctttgctgggtggtgaaaatgagatgcctgtaaatataattaatttcttgaaggataatagttcagagagcaaggactctggagaggatgagattgagattgatatagatgatctcagtgatgatacattgttcacattgcgtaagcttgttgatgaatatttggaagagaagcagaaagggcaatcacaagccgaaccttgtgaaatagaggtaaatacacgtttctttgtacctgctaaactactaaacattaatacccttttataaaatgtaccaaggaaacttattgtttcgatgtcatcttctgtagcttttgcacggctcagggttgagcaattcatctatgcaaccatgcaaaggtgatgcttcgctatctaattgtatacttttattttaaacttctgatacttcgaaggtagtctctgcttattttgtttgtgccaaataatttctgattatactcaaaatcttctaattattaataagttaattggatttattctatcaatggtctcggatcaaagtcccctgaaattagtttcatagctgggttgtacggccttgaatctttctatacttgtttttcacatgtattgtgatatatactttcagaaaatgacccaattgatgaggatgtggatattggtggaaatgagcctcctgtctcgagttatcctcccatggagatcgaaaaggatacagaccatatgatcagtaaatctatgagttcaaacagctctagtggtaattgtgcttgtcatgttctgttatttatctactctggtggtttttgttttctcttatgtattcagacctccctattttgagcagaaagtttcaaccttactcttaatctttctttaatttaagtggttgcttatgtgacttctaccatttggtctttgatttggttttgaaaaaccattcaaatttgtcaatatattcacatcaaaacttagtgactgagttccatgtgtatgattgatgattcacagattcagagtccagctgtcgttctgagagtgactgtgatggtactaaggcctcaactttagttaacgactctaaggtatttggcaatggatttgtttcatatttcaagttaaagttatttagttctcacgatggacagttggtgaatgattaggcttttatcttttatttttatttttttggcaactcaatgagctgtgtggggctatagtgaatgttttgttttgctttgttcttcaggttccagaaatgttggactctacaactgaattagacgaaaagacaactattagtgatcataatgaaaggcatggtaagtttgttttttgtttcatgtttttaatcacatcaagataattttgatcttggtttctgtttctgataaacgctaggatgagatttgatagaataaaaatgttgtatttctacttattaaatatcatagcatcagaatgatttgttgccttcatggttgattttaagtatagtttggctttgtttcatgttgttttatgtagtttcatctcatgtgactaaaagatttttattttggaattcagattgcatatttattaaattttaaaatctttcggttatgcagagactgatagtggcttggaccaagttgaacaaccttctgagcgaaaacccggctctgttgaatcagacagctgccaagatggtaagcatgggatttagaaagaaagctgttctgctattggttttggggtattatttcactgatcagtccttacaaaatatagtggatggtgttccaactgggagacgggtctcccctgacaagcaatacagagcagctctactaaagaatcggttcgctgataccattttaagagcacgagagaaaactctgaatgatgtgggtttcaatttcggctcttttatatttattctagttttacctgtccatctcatggctaactgggcatgatcatgtatttggttattggctgagatcagggtgataaaggagatcctgagaaattgcggcgggagagggaagaacttgaactgcagcagagaagaggttgctactacttatctaatttctttgtagttttgtgctttgtatgcattagagatgagtggattgatatgttgtatttagcttcatgcaaaaactaagttagatgtatgtgtttcgtcatcaaataagtggagaatgatgtatgtatttatttacttaatgtctgaccagaaaaagcaaggttacgagctgaagctcaggctgctgaagatgctcgaagacgagctgaagtggaagctgcagctgaggctaaacgaaagagagaacttgagagagaggcagcacggcaagcattgctacaggtagttattcaaacattgctgcacagagtagggtcatgttttcactccgtgttctaacatttgacatttgtgcagatcgaaaaaactgttgaaaatgaaattaatgagaattctcggttccttcaagatttagaaatgcttaggactgcccctgtagagttcttacctagctcagcagacgaaaccagcccagataattcacaggatggcttaggtagcttcaagttcgggagcagtaatgcattggaacaacttgggttgttcatgaaagtggatgacgaggaagaagaaggcgacctagcttgtgttcctagtaccatagactgtatggaagagggagaaattgattaggtatattgactgaactgaaacacaagaactatatatttggtaccgagtcggttaagttggttgagattgtgagcatcttatgaagacatgagaagcaaaccttattagaagggagagtgtacatatagtacttggtttatttattgaattattcttgtggaaagcttagaagttggggagtacactatcttagtgtggagtctttcttctgggcttatgtttttgacctttattaccaattttggatctcagtttcagtagtagaggaggtaagcaaagccagcaaatgtgtaatgggaactaaaaaaaagtactaaaaaaaaaaaagagaaagtgtttatattttccttctctctttacattttgttcttgtcttaattagtccttattatgcaaaagtactaggtatggtgaaagtgaagaagacaatttttatcaaatagaaaagaaaaaaagaaaagaatttagatgtgaaaggacaggtgttctttgattctcttcattgggtcaattttttgcttgcacattttttttaatggaaaatatgtttgctcttatgctattttgtttttttttggccatttctagggtgatttgtggtcaatttttcttatcatttgcaattattacattactttaataaagaaaaaagtgattgtttgtgtcatgtgttatataattatttgtttaaaatatacctaatcaattaaaaaaataaataataaaattataaaatattaaaaactatttttttctgtcttctttcttctcgatgcttcaaattcttttttcttcctttatcaaagaaacacgttcaacatttaatatatatttacatatattcataggaaaaaaataaattttttagcacttagtatttttttaaaaaatgtataaattgaaaaaggtaaattttttttggatctctaggttaggtgaactttaagtttaactcgcttatacacaaacttgtacaaatgtcttgaagtttgaaaatagtttatgacattcccaaagatatagtggaattatggtgattaaattgcagggggtcacttttagaaggtactaggtatctgtccaacaagtatctaataataatactctatttattttattgagttcggccaaaaatagtgctataacttttttttttattataatttgtttagaggaatttagacaatattacgagtatttaaggaaactaaaaacacctaaagaaacaaaatacatgtacttagtgagtactcaataactagtaaataatataacaaaaaattgtaatgacacaatggattatagttgttcagtaaagctttatttgcctactccactatttaaagaattgtgattaggtccataatttgaatgtgtctttttgaataattgtgtaattatattaagaaccaaagaagttagatttcgcagtcattacaaattaagctacccagtatggaggatagatctactataccagtcacatgaccgctaaaaacacatttagccacattatgagtagcaaagttacataatctagaaataaacgaaaaaattacagctagtcaaaagatttaagagcattttacattgaaataaataaatagtaataccccaaacagtaaaagttcccttcagagtattgatcactgtctcagagtcgctctctatgatcacaaaaaaatgattcccacgaatcgttgattttagggctagaagacaagtcgccacttctccaataagagagtcagagaagttgagaatattgctagccacccacaaagcaagtatttattttcacaatctagatcattatttaatcaattacacattaattataaatgtattaaatgctttatttgcaaatgaaacgcctgcaaatttagcaagtgcatgtcgagcattcatgtatcgattgacataaaattacaaattatgaagggttatcgcacaaatggttaggggtgtgcccatgtaataatatgaagacctagctttcatatgaaagttcacctatttattatgattatatttatatatatataaatatatacttgttgcaattagaaaaacttatatttctctcaacgtgtttcttcttagtttcaaaaagacttcaacttactcgtattactagattgtatttgctcataagacgaaattttatcttattaataaagttatatgtttatcgattacaaataatgaaagatttagcttcaatccatttaattttatttccaatgccttcttagggtggcaaatttcataagaaataatttaatattgttatttttacatagatgatatatgtaaatcttgtgttttttacttggtttattggaataattttttgtaaattattttaacaatacatcaccaatttacatttttgttaaaaatattagaagaatagaacttgagctgcagattactatattaccatttaccacttaagctagctagctcactgcatcttggagtgtgtgtgatggggtatcttgggatcgaatctcaatttgtgtaactcaaaaaatattactctatattacccttaaagaaaaaggaaactttaaaaaataaataaacactacgaattggtacatttttttgagtaaaataaggatatcattaaaatgctctttcaagcagagcaaaatctcaaatacaactagagatataagaacatcaagagagagggtcaatttagccaattataagctatagaattagaaagccgattacaatgagagaaacttaacacattaacacatccaaaagattttcacaataacattaccaaatttcacaataagaagagtctgattagaaatagcctcacgtacccgagatcaatcaaacgccacctttaagttctaaacattgaagcacaaccatagcttctgtaatcggaggtatcattgcagaaatcaaaagaatgaatgtggaggcaagacaatgaccaaagaaatcatgaaccgctaccccacactcgaccttcaaattctccactgaaaggccaacatccacattaagtttcaggccaccaattggaggtaagaccaaggccgaagcaacccgtggaggagggagaagaaacattcacttcaatagatcaatggtagaagttcattgaccacccaaggaccccttcctcatttaacaccctattttcatgcaccaccttattacaatgaaaccaaaccctccaaaccaccaccaataagacctctaattcttctttatgcaaactctcaccacaatcacaaagaaaagaataaacatcaatgggagtgaagaaaagaaacaactacctccgagcacatgaaagacgaaataatagcctgcaatcttaaacacccctaaagagcatgaaacatggtttccatcacaaaactgttgagccctgttcttccactttattgagctgccacctcatcttaactccttcatagttttgtttttaaacacatttcaaaaatatctcatactaacaaattaagtgaaacacttgtattcaagtcaactcttacttatttttttagaggtaagacttgaattaatacccacaacaaaaacttcataaaacgtagtacatttttcttactatttccaaaacaggaaagtgtacaaaaaattcatacaaaaaaccatatttttttttctaaaaaaagaaaacattgacaatagatttagattagataaggtctacacattcacatgtgtggcacgtgttaatatgataaaaagtaaaattaaataacacccaaaacagcgtcaaccgactttttttcgcgatctaagaaaaggcttagggttctctctctctcgttcgatttcattcgttttggctttgaatctcactctcaggccctaaaatctcttcttcgtcgccaattttcgtcacactcgcggatcgaagctttcaattcaattcttctgatatctcccactcaccggtaatcaatagtttagggtttttcttttctttttcttttttttttttgagttcacgatcttaaacattcaattttgctgttcaacacagctccaagtctaaacatttcttcaattcaattagggattttccccttttagaatttctgggcagttttcactgcaacagttttggaattaaagaaatttatgtgctttcagtgtttcagtttttttggtatatcgagaaatttgactcgagcattgcataatataaaatttttgctcttcttctattttggggggttgtttttcgtttgaaattctacatctttatatacagttggtgaaattgatgaccgaggactgttttttttagctttcccttcattttccccaatttttgttaacctagatctttcatcctcataaaccagttgaactctttgtgattatcagtgttgagttggggggtttttgtttggataagctgatatggtaatgtttagctccatgattgatacgtatgcagaaattcgaaatctttttgtggggattttatcgttataaaccatacaaagtccataacaattgggaaggagcaaatttgctgtgatttttgatatgactgttaccaaggcaagtaggtacccgggaagctattatggtaatgccattcatacagctggagagtctgaaggttcaggtatctcaggacgaatagacatggaaattgctgcttctgaggcctcaagtgctttgacaaggaagtgcacaagtatgaattctgatatgaatgccgatttctgtttcccgaagcaagtgattaacatgtcgaatttgtcaccatctgagagaaaggatctgctgcatagattgagaaagtatcttggacaaactcgggtaattctgaagagagttgaatcgcagatgcctaatggtcttgcgaggtctgcttccagtggtatgctcagctatagtagtggaccgaatgtgccagccattggaaagtccaagaaatcctcaatgataacttctggtcctgttaaaaatttgaatcctggaggtaagaaagctgaaacgagtaggaattcttctgggaagtttgaatcaacaaatcggacttcagctccgaacactacaaatgtgatgttgttgaaacaatgcgaggcgttgttaaagcgattgatgactcatcagtttggatgggtgtttaataccccggttgatgtagtgaagttgaatattccagattattttactgttatcaagcatccgatggatttgggaactgtaaagagcaagttagcttcaggatcatactcaaatcccatggaattttatgctgatgtgagacttactttcacaaacgcaatgacctacaatccccccggaaatgatgtccatgctatggctgatacccttaataaattttttgaagtgaggtggaaatctattgagaaaaagctgccaaaagttcattctcaaccattacctgaaaaatcaggttctgttgtggacttggaaatagctgagccaaaccccccttcgaaaaagaggaaagtgattcctacccaaccagaggtaaggccagagcctgtgaaaagagtaatgaatgacgaagagaaacataggttgggcaaggaattagaatccttgctgggtgagaatgagatgcctgtacatataattgatttcttgagggataatagttcagaaagcaaggactctggggaggatgagattgagattgatattgatgatctcagtgatgaaaccttgttcacattgcgtaagcttgttgatgaatacttggaagagaagcagaaaggtcattcacaggctgaaccttgtgaaatagaggtatcaactatagctttcttacctacttatatacaagacattcttttccttttataaaatgggctaatcattttgatattatctcttgtagcttttgcacgacccagctttgagcaattcatccatgcaacatttcaaaggtgatgctcggtcgtcttgttgtatattccttgttttagtctcttttttggatgtttcacatttctgcgcactgtttttgcttgtttaatgaaactgacatatttttgtaacttcttgtcaaatgttctgcatatttttaggaagtgagcctgctgatgagtatgttgacattggtgcaaatgaccctcctatatcgagctgcgcccctatggaaatagaaaaggacacaggccatggtatcagttcagccggctccagtggtaaatttagcttgtttagtggttttttatttatttatttttcttgtatttctccaattcgatacctgaacttccaatttaattgtaatctctcttttgtaaagtgtaaaaaatatatgatttaaatgtgagaaaaaagccttcaagtttatcaaaatatggagaaaacttggtcactgtatcttgtgtatgatccacagattcagaatccagctgtcctttagaaagtgagtgtggtggtgcaatagcctcaactttggtcgatgcctcaaaggtatcttagatagtttttacttctgacacaagcaatggtttcattaattcttttattttcctactcaatgagttctggggtgatagtaaatggttggttgtgtccttaaaggtgccagaaacattggactctggagctgaattagacaaaatggcaactcttagtgatttacatgaaataaatcgtaagtgcttgtgtgccttgatctttatttcttaatttgtgtccatggttgttgattttaagaacagtttgactgtttccaaatgcttaagtatttccgattttctcaaaaataagtttgttcatggttttatttacatatttataaaatttgctaattcctgtgaggttgtacagagtctgatagttgcttggaccaagttgaacaacctcttgagcaaaagccagattctgttgaatcagagagccgccaagatggtaagcacaagagttagaaaagaaaactgttctacttttggttttggggtatcatctcactgatcagtccttaaaaaaatataaaaatttagcggatagtgctccaagtgggaggcaggtatcccccgagaagcagtacagggctgctctattgaaaaatcgtttcgccgataccattttaagagctcgtgaaaaaactcttaatgaggtgcgtatcaatttaatactaatcctatttcgacctgtctattatcgagtgactttccactcagtatgtgatttctgtgcaattttgatttggctgggattagggcgataaggatcctgagaaattgcgtcgggagagggaggagcttgaactacaacagagaaaaggttgcaataaaattattattcgtttatgtttacttttgtgtgaggaaagtgaaatgaatgaatgttttcccaataaataaaatgtagagtgacttatgttttaattttgaactttgccatcgtgtcactagaaaaagcacggttacaagctgaagcaaaagctgctgaagatgctcggagaagagcagaagcagaagctgctgctgaagctaagcggaagagggagcttgagagagaagcagcccgacaggcattgctacaggtaaaaattactgcttgcactatatattgttgttcagtctggaatcctgtttgggtttttattggaacacatgatgtttgcgcagatcgaaaagactgttgaaattaatgagaattcacggtttttagaagatttggaaatgcttagaactgcccctgcagagcagttacctagctctgtagacgaaactagcccagatcattcacacgacggcttaggagggttcaagttcgggggcagtaatgccttggaacaacttggcttgttcatgaaagaggatcatgaagaagaggaggaagttgagccaccttgtgttcctaaggctctaaatgatgtagaggagggagaaatcgattagatacttgtgcctattttgtattcatgactgaattgagaaacaagaatattatatttgttaccaagaggaaaaaggtaaaaagtaaagaataggagtacttggttaatggttacccgaaaaaaggggctacagttctttcttgtttattctgatggtgcttccggtgagacctgcatagagctatagaacaagagtgtatatataggtggtggtgtatggtttattctcccctgtcagagcattgaattgaaaagagcttagattgttggaagtgcagtctactatgctggagtgagtgttgattgtgctctctctctctctctctctctgtgcattcatgtaggagttaaatgtttgagatataagtacttttcttatgtatgcagggtttttccataaaaggcatgtcaggaagtctgctggggccatcatagctaagtgtacttacacatgtcatcgatgccagaatgggattcgtgttaacattgataccaaaaaaggtaaaactggcaaaagaggagctaaagccaaatctctgaagtctaagagtgttcagaaggatggcagatcatcgcggttaaaaggcagtaaaaataagtctattggactgcaagctcaatcgaaaggcaaaacaaaagctacacctgctgtacctttacgccgttcagctaggagagctaagtctgtgctgctgcaaaacaaaaaaaatcgagggcgtaggaaagggaaacaggcaaagtcaaaagccaagttgaaaaaggctgttcatgggaaaccaaagaaagttacccctccttacaggaagaagagaacatatgtttctcacagttactggcttaatggtttacagctgactagaaacctggatgatgagcgggttctgctatttagggataaaaattttatgcccccttctgaacagtcacatatccttccagatcaaccaaaatgccagctttgtgatgaagcaggacatacatccacttcaagttatattgcttgtcagatctgtggaggtaattagtttttagatttgatcatcattcaatgtaccttctactttgttttgagaatgttgagaaataggagatttgttctgtttatctcctcattactacactgaatgccacctttcttgtactcttcacattttttccactgtgcagagtggtttcacggagatggttttggacttaagacagagaacattgatagagtgattggatttaggtgtcatacatgtcgggaaagtgctccgccggtctgcccccaatcgatacttgcaaggactgatatgtctcagttaccaaaagtgcaaaatagtgctgcagttgagtgtactgaggaagtatctaatgcagtcccacctttgagtgaggtacacttgaattagtttggcattagatattaattactctaccattgtcaagttttctctaaatttaatctgacattatatattagtgtgttctaccagggaggttgagtggtatcccaaataagagtctttggtttttgaggaaactaaactaaaatgaaccacagcatctgattatttgcctgagtatagcctggatttgtctttggcttctaagaaaatctaacaaaacgagggattctgcttttgcatcataaaatactcaaattatatgttaaaagatgtccgtgaagttgtattatttgtccatggggatgcaatagaactatatgactcactgcttggttaagtttattataatctttttcctatcacatatagttgcaggttgcatgcaattgaattctttatacatttgaggagggatttttcagtgggtttgggacatattattgatcatttgctatgctaagagataagctggcaaagccgagtttttctgaatattcaactgcatgaccagtttcaagcaataaagaaatataggaggagggagtatattagcaggtgacaagttgacttcccaattactccaagttgagacagtggttgcagcggtgaatcaactaaatgagaacgctcgtaaggtgacactgaaccttcaaagatgttagaaggtatagcttgccgtgaaaagatattcttataattgtatatacagctggctgtttgttcttctgtgttcattttggattaccattgctgcttctgttgtgtcacatcattgcatttgactcgtttcatcctttctgcacacacacacacacgtcatagatggtctctgtacgtaaaagagaggtcagactgttatgccaataagcaatattagtttttgatattgtaaacatttgcatttttgggccaagcttatgctatatagtttgacatatcaatctcttttctttcagcagctctcaaatggtcatttgcttcaaaagatcagtattttaaagaaggcctagatgttaggtggtgtaccttgtgggtactggttcgtccttctggcgttagcattccagtctttgattcactcctctccatttcagagtttattgtggcgactttgcttggcatcaattcatttggttaattctctaacaacaattgagtaaagtgattgcagttgtagggatatgaaattagagaaacatagactaattctatacttccattaacagattagaactgcagaggaaatactgaaagtgaaagctagatatatttaatttaggtttcattttttagaactttgacaagaacacctttttaaatttaattgcagattgattttaggatataattgcatgtttacaaagacgatgtctttcttgtattgttgtaaattgataatgtacataggtacttgagagagaaggaaaatcaaagtgaataagaatagtcgttaccccaattcggttaaagacttaatgatgatatgtaatttaacaactttgctcaagacactactaaaagcagaaacatatacgattctttatttattttttaaaaaactatcattttattttattaaaaggtttagtaattccattatattaatctgttttagataaaaaaaaaaaaaaatcatgttatcgtttgataaggtatattatagttaattgttattagtattatatatataaatagtggcttttttatatgatttattaaattaaaatttatgaaaaccccgatattaaaaatacaccaataacggtacgccacatcttttggtgcttgacgtctcccttagtattttacttattaatatgtacatgcttttgtttacttcaattaaaattttaactttttgtttataatgggtaaatagcgaaaaaattcccacaacttttattttggtttcactta

SEQ ID NO: 186613 - DNA, 3493 bp, Cannabis indica
atgtgaggaaattggaaggaacattcaagtccttgtttcttatttatttcacatcatataaaatatttttgttccaggggaaagacctcaatgaggtaaaattgttttaacttttaagaagcaatacataaacaattaaggtgaaattctgctattaattccacgcaataatagcttctatgaataaaataccactctcattatgagttctcccacgtaaatgccttcctcttatcatcatcagctgcctcatgctggcgtcaagacttttaacaacataataattgtgattaatattatgttgctaataaagccaatgtactgaatttccaacatcttagcatcactataacaaactgaacattatttcccagcatttagaagagcctagtagaaagcattcgaagagtccatattgacactacggtattaaccattgcaaagtgtaagataacagatgtacctgaaatcatatcaacatttccactctgtaccttctttgttcttctccaaaatgttttatttagatacaaatcacaattatgcatgccgggagttcaataaggcatcctggtgacgcattcgacgcctacgttgagctcttctatggttacgagtgtgcgttctaggggatgtggttgaggggttactagggtgaggaatctcctccattgatggataaccaaaaaagcaatcaaagggatccattgaatcaagagctgtgttcatctgtgatatgaaagtaaagtcagaaagaatggaactttattctgcatcccatggaaacaaaagcaagatctctagtatgcttgcaaaaatgaaataagaaaccctctttcaagaggatttataaacaaacccctcctactgttgttattgttttcgttacttttaatcaggaagctgaaattttggttcactgtagccatatatttgactttgcagtataaggtaccattaccataggtgcaatcaggagaactttggttagttgattacatgcgtttagatgcaggcaaatacaacttctttaaaacataaaagcatagatacaaatatgtgtgtagacattctgataaatggaaatactgaacaaattgatgattacaagaatttaaaatttcaataataaaataataactaaaaaatgaaaagattgttgcaaaaagtggggttgtcgtattttttaattcatatgtgacaaaattttattgggtgcaagtgcattacaaaaacatagcattctagaaagactcaaaaagatgttttcccataactaagttactactgtgtacttctgtcaataaacataatatattaggtaattgagtcaattttttccttaattatttatcaaaaagtttttacatgtgttttgtgaatactacaatgaacaaagaaaacatgattaggtacttacaggagcttgcttggactcgtacttaaattttccttcaaagtccctgcgagagtcagttcgaatgccactgggatctctctgagtattactattataatcaccacgagaagcactctgggattcaccatgagagtcactaccatgtgtagtttggctaagactaccatcatcgctaaagaaattacggaaccgccaccttacttttggaagatccacatttgagtcatcaaaaactctctctgagtaaaagtgcttactgatgagctgcattctccaaggatcattccaatacttttttaccactctgtcattagaatcttaattggtgggtaagtaattcaattaaagtaaagtatctggttctgatacttttccacaactcgaaatttaaagtactatatcaaaatttatcgggtactagaacacctaattagtccagtattttatcacaactcacagaaaacagagtaagaactgtttgaatgtctaaaaagtttaagtgccgggaatcttccaattacacactgattgtttaggaatatctagaggaaaaggcgggagaagaatatattgaaaagaagataacatttcaaataaaaataaaaactccaagaaatcatatcagcaattccttgaatgccagacaacgaaactgccatgctactaactgaatcccatatgaaatctgatttcattaaccatgcacaagctagaaaaactcatgaagttttagaaaaaagggtgaatgaatgaatctacttacatagatgctaactctctctgcatagaactttcttgcaaagtaagaatctgatcaatggacgaatctaaagatgtaccaagtctccacaatccaacagcagcagaagcacctgcaattgcaaatgagcattggagaaaataagagcaattacacatccacgatctattattaataataataaaaaaccaatagcctataaattaaaaactatactttgtgaaagagatggtttatcctacctgctgcaatacctattcgaccaaacatactcagctttgatgttcctgcaagaagtttaacatgtttgttcacacaacaaaagaatgagaaaataaaaataataatcaatagcaaagaatgcagaaaaatatatttttttttcctaaacaaatatttcatactagcaaaaacattgtttaagcatgtaaatttaataaatttagaaatatccttctcatatttatacaaccctttattgtcatattaaacaataaaataataaataatttacataaatatagacaagggcattacaatttagccctaataaacagaactggacataatacatacctatccaagcaacaccagccccaaaaagagctcccacagtgtaatccttaatagccttagacttacaattaagcaatgtattcctttcttgcaccgtcatattatacttcaaaaaatttcattaaagaaaaaaacaaatcaatcaatttcacacctttttttcttcgcaaaaaaatcgagtattgagctgaaattgattagggtttctttccgaacagggattgggaaattttgaaagtaccttcttggccctcagaacttggtccagctcgaataacacctcccccattgtcgtttcgagaaattacagagagagatgtggcagaatcacagacgcgaagaagagtctcaactctcaaactcgggagttgaaactatgtcatttctgggccaaacacagtcaatgggcctggtataagtttgggctattgatgggcctcatacaaaaatactagaaaatgaggaaaagtttacaaaaatactgggacagggaaatttttacatttttactataccaagtttacaaaaatactgtattcaaatttcaaaattataaaaatactgtgtttcagtaaaataaaaaaaaacaactcaaaaacaaccttagaacaacttaacaaaaaatatgaaaacaactataaaacaacaaaaagataactacaagtcaacataaaaaatgacaaaatattgatctaattacaataagcacaataatattaattcctcaatatattttt

SEQ ID NO: 186614 - DNA, 700 bp, Cannabis indica
aaataataaatactactctctaataataaaaataatgtacccatatatacaattttataattacataacaaaacgatttacaagttctttaaggctgtataagcagaaacatggatgtcacagcactcggcatcccatgagaagtccattctcatcccttccattacgttttgcttccaatttgatgagttgtttttctacagaaaacaggccataacaacaagtttcaaatacaccaccttactcttgtttaatatatgtatataaatttaataatatacaacaaattataacttatatgatctcattctattaactgtttttcttcttttttttttttgaataataattctaatgactattgataagtggaaaacttacaaattcgttcaatgcttcgtcaagagacaaatttccaaaagtagagctgatgaaccgtgagaatttagttgactcaaaatcatgatctacaaaatatcttctcaaatagaagaagatggttaagaatcatttcattttttatgagcttaggggaaaaaaatgcagttcattgttactatgaagaagatgaagttacctgaatttgtaattctcggaggttagcgcaatcggagctgctccgtacttcaaagccttcagctaaattatcaaatgaaaatgaattaagaaaagaaaaagcatttgaagatgattcaaatgt

SEQ ID NO: 186615 - DNA, 2164 bp, Cannabis indica
tgttgttaggagtatctaaacatgtttatcgcaagaaaagccactgccaccggaaaaccgtttttagtaataaactcgtgcagatgatgaaacctgatataggatttagtggttacaagttacaacatctgtaaaagtaacacgaaccttttccaaattacgtttcactccatgtatcaactcaggcataaatgattgtgcagtttgagatagaggttcaccccaaacagtgcacataaagcaattttggatcatgacctaagacaaagagtcagtcaagtaatcaagtattcatcagcttcagctttataagaaacaaatcaaagtagagaaattaacgagccaagtgtaaaagaaacctgatgagcagccgtcgtgattgttcccatggatgtagcaaaatacactaggagagtatagaaagctatctaaaagttaaaacactttagattcacagaaataataataataaaaaaaaatcatttcaattcatgggacggaaaaatatggaccttggccatcaatgttatgaagactggagcagcaagctcagttattgtcagaatatctttcggagagggaatggaaattgaatatgcattgtaccctttcttgttaagactttcaatcatcatatatgctgcaacaacctaaacttgttcttgttagatccattgtgtaacaaaacaaaatgaaaatttttttgggtcaaaatctagaataaattgataagtacaccaaaaataataacaccaagtacaaaataaatcaaaatgttcatccaacatacctgagatgccattgttgcccatgctgcaccagcaataccatagtcaaaaacaatgcagaggattatatcaccaaccccatttataacacttgctgcagccaaagcctttaaaggtccccaagaatctttcatgccaagactggaaacagaattacagcattacaatacaaactcagtaaagtaacatctgttcaataccaaaccaaagacagcattaaaacaatcacgataacttcaatatagtcagatagccatcactaagatgttggtttttaaaatttagtctcaaaaatccatcctcatgaaaaataataaaaaaaattcacctagccagataaattctacttcgatgtgttaaaaataatcatcaggcctctatgattctttatcaagtatttagaagtgagagtgactcaaagaaaagaaagccgtgttttccagcaaatttattggttcatttgtatattttaaacttaatacacaggtaaaatgtaagaagaaatcaataaccttgcactttgagcaacccaaccaataagaactgccggccatgccaagcctcgaatctaccaacagaaattttttggttcaattggatatttatccacagctccacacaaatcatgcatagtatatttcattgaagtaaaattcaaacgaagctaagtactgattatacaagaacattaatagaataataagacctcatgcatccacggtctattagaatatccaagaacccttcacattttctttctcattttgctaatgccaatgtcacaaaatattgggtaaaacattgttcataagtgcctcaaacgaataatatctacaattcatatgaacagtaactaaggaaaactataagtatgatgcaatgagtgactgtcctgaaaagatcgtgatactttgcttcaggacacatggtattattcagtactcacagaaactactgagcaaagaaaatccaaaactaaagtggaaaattctgcttgattactcttttgaatctcatctagtggataataaaaacgttatgttataaaaataatagaaagaagatgtggacaactaaaattttcgtacctgaacataggtgtttgctgcagggacaaggtggatattttttgccccagtaaaggctgaaagtgacagtataagtatcacaatcatcagtcactaattgactaagaaattttcaaggtatcaataacacctacgatttaacttattaagtataatcaaacattcagtaagagagttcttattgtcagatttctgaaactaaggcccagtcttaattaccagtcagagcccatgagccaaaaaatcttgtaaacaaaagcatcatgaagccacaagtcaatccaacaa

SEQ ID NO: 186616 - DNA, 6260 bp, Cannabis indica
gagagtcaagtaattacgaaaactgaagcaatactcattagtagtagtagtttctttacaaggtgtagttaatgacacttgggtttgagttgagtatatagttcaagaaaatgcattggcttcagtctcagcacgaaccaagctagcatatgcaccattaacatgggaagccatgagtgtgtcatggctaccatactcagtcaccttaccattggtcaccactgctatcatattagcttctctaatggttgaaagccgatgagccactacaatggtggtggttcgctttgaaagttttctcactgcctcttggacatgtttttctgattctaagtccaatgcactacttgcttcatcaagtagtagtacctttgaatttttcaatatggcccttgctatggctatcctttgcttttgaccacctgatagttgagcaccactctctccaaccttattacataaaaagaacaatattatctctatcatataatacaagtctttttttatgcattaaatataataacaatggaatttaattagtagtacctgagtttcataaccttgagggaggccactgatgaatttgtgaatgtaagcttcccttgcagcattttcaatctcaccccatgaagcccctggatttccaattgcaatattctctcttatagttccagcaaacaaagcaggttcttgactcactaaagatgtttgcctccttaaccatttaacatcaatctctcttatgtccacacccccaatcatcacttttccttggtttggatcataaaacctttgtaccaaccatactactgttgattttcctgaaccacttccccccaccaatgccaccatactacctcctttgacctttaaacagaagtctctcaacacaatcacatcaggcctagatgggtatgcaaaagttaccattttgagctcaatatcaaatggtttcgactgatcaatcttcttacccttctctctgttacttccaatcaatggcctgcggttggtgatacttaaaacagctggaattgctgtagcagccattgaagtgtctggtgcaagcccaacaagttgtcctacagaaaatgagctcagaacaagaatgaggaaaatcttataaactacaccaaagtttgtttccttttcttttacaagatatgccccaaaccaaagagttatggtatatgctacatacatggagccttgagatgccccaagtatgaggcctagaatctgtgtctttctaacagatttttgttttggttctgataaagctagatcaaatgacttaattagttgttcctgagctgaaaatgttatgacagttcttatatttgagactgctccagaagcaatattgctagcttttgcatatgctttgttgtcgagtcttggtccaacatttatgatcaagtttatgtagtttgcaccaagggtgaagggagtgagaacagcagccaaaagggttagtttccattcaagataaaagcatacaccaaggcctactgcagctgaactcaatcccattaacaagactgagaaacgatctccaagggctgatcgaaagcttacacaatcaatggagagcctagagacaagtactccggtagaattctcttcaaaatcaaaccaaccaggttcttgtttcaatattgatctaaataagagatctctaaccctcactgtgagctttgttccagcccaaccacataaaccttgttgtccagtcatggagattatacacccaaaaccaagcccaacaattatcaaacaaagatgcccaacttttcttttaatcttgtctggttcattagcaaagtaaacctcaagggcttgtcccagagctaatgggaaagcagatagaattgcacctgcatgcatacctaaaatgaatcctaagatgagtattacaagctctggtctttgcaacttccataaatcatttaacttatagtttctttgttttggtttttgttgttgttcttcttctgcttgaatttccttttgcatagatttgaagttctttgacactgatacttcgtacaaatactttgatcttgatatgtcatgtactgatttgtcaaaagcaggaaactgcataaccttcgcgctatcttttacttcaactgatttttcgaggctgcttcagaagcaagcttgataaggttatagtaggcgccagctttttccattagctgacgatgattaccaatctcagctacggagccacgctcaagaacagcaatgacatgagaatttttcacagtagctagcctatgagcaatgacaatggttgttcggcctaaagaaatcttgtcaattgcctgttggactataatctcagactcggggtctagagcgctagtaggttcatccaacagaagaattgtagggtctttaatcatggctcgagccaatgcaatgcgctgcttctgaccacccgaaagttgggttcccctgtctccaagctgccacacaaagtgaacattttgagtaaaaaaaaaacaacctcacaattgagtattggcatggttgtatcactgagagcttatgcatattattagtgtgtctttgtaaggacaaacatgcctatgagatctatcatcaatgcatcaatggttttgatatgactaaagcctatgttcttagcatttctcttgatatttttgtctaggaatattagtaaactatgttattgaaacctgagtgtcatagccttgtggaagagtagaaatgaatttgtgagcattggaagctatacaagctgcaatggcctctttctctgtgcaattctcctttcccatcatcacattttctagaatagtagtggcaaagagaacaggttcctggcccagcatacctatctgacctcttagccacttaacttgcagtgaccttaagtcatgaccatccagggtgactatacctgccccaataaattaaaaacaagagtaatttcagctatgtattgatttgttccttgtctacagtaaaagattgttgtatcagaaagacgagtacttacccttgttggggtcatagaacctctcaattagagcaaaaagggtagacttgccaccaccactagcgccaaccagcgcaaagctcttcgaagcaggaattactagagtaaaggagttgagaatttgagcatctggacgagaggggtatgcaaagcttacatctttaaactcaatcctccctcgggctttttggaggattcttcccactgggttgtagggatctatctcgggaactctgtcaatgacttcaaaaactcgggctgcagccacagtaccttgagcaaattgagcaaaatatgacaatgacaatgccaagcctctgcagttagcaacaactttcattaacaatgacactattatacaacaatcaattcagtgccactctagtcttactacaaagttggttaatctatgaaaagtttattaccttcctcctagattaacaccaaagaagcaagcaatggcagcacctccagacaactcttttctggcaaccaaaatagagccataccaaaaagccaatgcccatgttgaatatgtaaccaaatagataactcccacacctgcacccttagcaaatccaattttcgctccaaatgggattgatttgttcaacaattcagagtatttttcagccaaatgatcttctgccacaaacgagaatacagttctgattgaactgatagcttgttctactacactaccggcttttctatatgaaaccttaaacaaaagagagcacaaaatattaatttataataataaagctattgaaaacaatatgttgttgttatgatatttgtttcttccttttacctcttcttttgatgttagaccaacataaacagccttgtaagcaataccacaaaacatcattagggggatgacagaaaagactactagagatactttccatgaccgtgaaaacccaactgcgtatccacaaatgaaggtaaatatatggtgaacgaagtgtgccatctgcaataaaaaaatttccaattgaatcagagttgataataaacttaagtgctacatataggaataaaaattatctttctctgaaggattatttagttttgaaaagaccttttctcccatgacttcttggatttgagcaacatcacttgaaattccatgcattatatcaccagtactgatttgtgtatcaaaaaaggcaacatcttgtctcaaaactgctttcaagtatttttttcttatcctttgtgctgatctctcccccaccaatctccaacatgttatctctgccaatttagtcataataagaaaagcagtaacaaatttcaatgctcctaacaactaaacaaagctaatatacaatttcttataaagaaaaccaaccattgtgcaaaaaagaaaatgaactcttacccatgaaagctccaactgccactaatgctgctagtcccatcataaacaagcatatctgaaaatcaaattcaacatcatttctaaagaaaatctaaattcacaatcaagattttagaacaacaatcaactttttgcataccctaaggacatctttcatcattttatcagtatccaaagaatcttcagcaattttattcacaaactctccaaagagataagagtaccaaggaagtgaacctccattgataagagcccccaaacaacccaaaataataagaacaatatcccacttggtcgaatacttaaacaagctcaatagtccaactgtcttagctgggccatcatcataatcatcatcatcatcttcttcttcttcttcctcctcttcttcactatctgaaactcgtccaacatcaataccagacttatcatgaccgtattgagaagcagaaggccaagaatcatagtcatgtccttgttcatcttctggtatagcgaaattaactatactaagctcatctgtactagccaaaggcttagcttttgtacttaacttgctctgtacgccacgaccaaaagcttgaccaacaaagctttgaagctcaatcctcccaccatgaaagccggaataatcgtactgtgaattcatcgaacttccgaggccaccattattcgttcgagaaagatagtaatcattggccgaacgacgaattacgttgggagtggcggtccatgggctaagaacagagcccaggttgtggttttcatgccatccactgggctcaaactgccaagacacctcactttgccatgacacgtcattgtcggaggcaaacggcgtggtgggcaccggagttgggtggcggaatcttcttccggcaggcaaaccacttgggtagtattgagagctaaattgagtgaaagagctagaagttgcatagtgtgagttgacaggagttgggtgacggcgacggcggcgactgtcactgttgcggttacggtgacggtgagttgagtcagcaacagagctgttaaactcaaaggaagaatcagccatggcatgaaaatgtatggcagaatggaaatgaagacagtcgaagtataaattggttagaaaggaaaaagaaaacagagaaaaagttggaacttgtaagtgtgatcaagtccaaaaattccagctttaggagtcaaacaaaaactttgctgaatccgccatttttatttttggttctattgagattctaattcagatacacgtatatatgcattggtgttataattattgttatcggataaaattttgtaagaatactagacattgtaccttattcttcttcttcttatagcaatgttggtctttatgattatttaattattttgatttaaatatacatatatacgtgactggttagatgaattgtaatcatcaacgaacctgattggattgcaggccaaagggggacgccggcacacataattctcaacgtggctcctgtacgttgctttgtttatgtaataaaaatgtccaataatatataatttatatatgatatgtatgtgtgtgatttctattatagttatatatgtcaacataacacagaagcaatgattctctatttgttattatagttgggtttgttgtttttctttcatcatttttagctgtaggttgatttaatattcttatttatgtaagtatagaaaaagcctaaaatgagtttgagaatgatgagaaacgtcttcagaaacgtttagtaatgatgaaaaagcctgaaatccaatccattattcttatcaagtgtttttgtgttccttcaccgatggaactttcccactcaa

SEQ ID NO: 186617 - DNA, 9178 bp, Cannabis indica
atgggacagggaatttggctccctacaattcaacatatttagtaatcaaaagcatagatgtcattcacattacacatatattcatataatcacatttatgtatatttcatagtgtgttgtcataactacataactcatatattttggatttcgaacccagttcaaactaaatactcaattatgataatattgcgcaaacttgtcaaaattcacctgtaatacaaaaaagcaaacatactacatggccaaaatgtagttaattctataaaaaaaacttacactaaatgttaattttcaacttaaaactgataaacaaccctttaactatctttttttagcaaaaaaattgtctccaaaggccaattttgtattgttagaatatgagactaaaatgaataaggttccatcttaaaactaattggtaatggaaaaaatagtatatatcacaatttattttcacaaattaacaatgtgagactaactctaatacataatagtggaaacgaactccatttttagccattgaagaaagcttaagatgaagattaataattagttctggtacatgtaaaagaataacataccaaacaatgaagaaaagctttcttgattgattaagctaagaggttgagtatttatacatgagctgaagtaaaagccatctaagcaaaagaatgtaaaatttattacaagatgtaactaattaactcagtaaattataagttagttatacaattagctaactaatttaccattgacaaattgagctaatgttctagtatattatcctaacattgcagggttttaatatgggtcatcacacagataatcttcatgtattaatatcatgagtgcatgagtccacgtagctaaattatctgtgttttcacgcgaacgccctctaaatacacttcatatatatgcatcacttacatatatatatctttcctataccgaatttaatacaataaaattggaacaaattaccaaaaggatcaagttttataattggtttattaaaaaaatataaagtttatatcaagaatatcaagataaagatatgagggacgcatgtgactcatccggaaaggtaattaaaacttaattaataataataataatataattaatagttaaagaaaaaatctatctaaatcatgaaaaatatatgattctactactcctcataactttaaaaaaaaataaacatctcatcgttttgaattgacttgatcctctcttatggttgctaaatattataaacaataaacataatattgtcttaatatttaaataaaattctacatgtttcatagacatatatattatttatacacaaatatctattacggttatgtattacaattaaattaattaagatgataagttaaactatatataaaaaaaaaaatataatatttaaaataatatagccatacatttttttaaaaaaaaaataataagactcaaacatttgttacgtttttctccatagaaaatgaaaaaacagatatataatatatttggtagggctcaccataatcaatccattgtggaattggacaagattgttgagtcagattggatatttggataagctatatatgtttcgttgataaaataacattattaattttttgtagtagcttatagacgaacatcatgaataattatttttgtgtaccaaaaatatcaaaagaacctaataagtttgtttattttgggcaactatattattagttattttctttggcattaaccgtatttttacgtaagaaaaaatgtcacgacttgtttactctaattaatcatagatattgctccacgttaattgttgcttctcattataataattttctttgaatttatgataaaaaaatatgatgaatattgtaattatatttttgttaaaaaagtgtacgattttattagttattgttttactgtgtggtgttttttttttttttgttttttttttttattggcatgcatgtatatgaaaatacattttatagtattatattatatatataactaataatatttctgattttatgaaactgatcatcacatactatagctaatcatgcatatatatatatatatcataacacctgtgataatagtgatatatattaatgtacaaatcttaaatatatgtgacactgactatactataataatgatttggataaaattttggaaatactttgaggacagctctaatattaatgatggcaattttggcactacactagctattaccggccactaccttcaacattttcccttctcaaaatattacttatataaaattttatatataattcaaaaaaaaaaaatcaaatcttcaaagtaagaagagtcattttaatgaccctacagtgggagccatctgtaatatatataaatattaaatgtgtgtatatttatatatgtgtgcagaaggtgtctgtccacatcattttgacaatgatttaaccctttcagcaatacaaaaccatatttaaataattaataaaaataaaatctttaatgtatgcaacccaacataacctaacacaaattgtgtaaaaggtaaatgtattatatatatacactagtagtactagtgatagataacattcaattaattcaactgatcatgaaccaatctagctaattataaaaaaagttagatgattggacaagaaaagttagattctagttacactacataggttatttgatgtaaattttaaaatttaattcgatccaatctgtaatatcttaaaatggggaatgaattatcaaccctaatcactacaatatttaaggctattagcggcgaactaatatgctggtaataacctcctcttccgtcgttaatagctaatagtctgccactattaatgattatttaggatgaatttctagtcccctctgaataattattaatagcagtgagatccatcgctaatatttttggtcagttttgagataagcattattagtagaggttcgccgctaatgctcgctgctaatatattcaatttttaaaaaattaaaaagaacgataaattaaaaataattaaatataatttaataaatacaaaatattttaagttaacaccaaaataaatacaatgtttattattattataatgtctcaaattaaactacataaataacatatacataatatttataatgtcgaattgtgacagtcagtagtcacgtgatccataaggggaaacaccaggaagttgtgcaatcccacaatgcctggaaaaggtttagtgtgatgattctgacattgtgtaggtatggaactatacagttgaagaagaattaaatagattgattggcactacatgtattaacaaggtgcatcttgttttttggtagctcatcataaaagaactcaacagttaagcatgcttgacctgaggatgggtgacctcctggaaagctttcccaagaagtgtgcgagtgaggacgaaacactctagaaatactcgtgttggtctttagggtcagtcctcaatccaggaagcatctaaagtgacgtacttgtgtataagagtcatcattttgtaggtgttagggtacagtagagacttgaagtgggggcattacaagtggtatcaaagccttgacccaaccaatagtgtggtcgacgaggacgtcagaccccgtaaggggggtgattacgacagtcagtagtcttgtgacccgttaggagaaacactaggtaagctatgcaatcccacaccgcttggaaaatgtcaagtgtgatgattctgagattatgtaggtatgggactatacagttgaagaagaattaattggatttattagtactaactatatcaacaagctgcatcttgttttctagtagcccatcacgaaagaactcgacagttaagcgtgtttaacctgtgataatttcagaatgggtgatctcctgtgatgtgcgagtaaggacaaagtacgcgagaaatactcgtgttggtgtgtagggccagtcatcaatccgcgaagcatccagagtgacatacttgtgtataagagccatcattctgtggatgttaaggcctaatagagacttgaagtaggggcattaccattattaacataattaaattaattattccataaaatcatcattaaagtctgaggaaaaaatatcttgatttgcattattaaagttaggcggcggttgtggcggtgaatgaacatataattaatttgatgataagccaagtgttaattctcctgattgagcttaattgagtattggagtagtgaaatttttttactcctacgaagaactcctaagcccaccaaatatcccaaaattagcaaagtttgaagagagcagaggagactggaaaggggttccatataagaactgactttgattttatgagtgctgctattgtggagaagatcgatgttgttgtggtggaggagcggtataactctgagaagacgaaccaccaggattttgtgactaaccatacatttggataaatttttcaaaccacgagttatataaattggcacattattcatgtatcacactacttcctaatgtgtcacgtatagtcgtaacatatctgtcacagtgttctatatttcattggggggaaaggaatgtgtagctaattgactttaactagtttatttttttcctttctctttgatcctataacacacgtctatttgatagtcaggtctttccccgagtactttttcaagtacctcaaattgataactaccatcagatttcgtaccacatatatcactctgagattatctttcaagtaccttgaattaaatattaatgtgagattataatattatattatcaattatgtgttattatatgtgaataattgagtttaagttttcatttatttgatagcaaaaatttcgtaattttgacccagtaaggataaaattgtaattttattatactaggccctgataaactacattatcatgtagtgtgtttgttttattgtgttagaggtaatttttgacaagttagtgtgctatagtcacatcaggtattttagctcggactaagtttgggatccaaatttcaagtcaaatgtgtatggaaattaaatgatgttatatgatattacatgtgtatgggttgtattgaaatgatatttatgcccttagtgctctttttggagtgatttttaatgttgagggtaaattggtcttttggccatattatagtgaaaaggataagtacattattatttgttaaaattgatgaaaaatcattttcagttaagtttgaagcttctcactgacctcctcctctccttctctctcttttttattttgtggttttgaaacttagtgaattgaagcaagtttgtgttgaattttggagtattgttgttcgattgagcttagaaaccagtttgaggtaacaatttctttattttttctaaaaattaaatcttagggtttcgagtttgtgtgttgatgaattagttttgaggtttaattagtgttgttatgttcttaggagttgagatattgagtttgagctattctttttcttaagctttggtttgtaaatattgtggacattgtcccacatggaataaatgttagagaatcgagtcatatataagaacatgggctactccactcattaccaattagttttgagatggaaccttatgattctcaacatggtatgagagtcatatcctttgcaggcaagtgatcctatccgatccacaccaatacagatagtgaccatgtccactctaatacggtttaagattggtgagcaaaaaatagccaccatcttgagggagaatattgtggatattatatcccacatgaaataaatggtggagaattgagccatatataagaacataggctactccactcattaccaattggttttgagatagaacctcatgattctcaatagtaaaaattatatagttgttgagcttagttttgtgcaaattcagcatggattatattattgtgagagatgttatgtgcatgcatatacattgttttgggcttagaaatcgaaatgcgtaataaatgttaagttttggattgtttggagcattttcggggcccttaaaacatgatttttttttggattttttgaacccatgcgtcgtggccctattcatgggcaccgcgtcctcttaagtgaaaaataaagcatttgctttttaccaggcacgttgcggcactcctgtggtgcaaattcccccagttttttcccgaacattttgtgagcttgtgtttgctataatttttgacttcgaactccgttttcgaatgttcataataaaaaaaaaaacaaaaataatgacgaattaacctcacaataatggtaaaccatcaactataaaacaaataaaaaaaaacaatcttatgacaactaagaacaaaatataaaaactttcaaaaaaaaagggtctaaagcagggacagaccatgttgtattaatgtggggactatagcccccattaacaaaaatattgtattttaaaaattaaatgtaatttttaaatttaataattatagatcaaaatcgtagaaaagcctccatgaaattaaataaatctaataagaatgattataatataagtataaatatttttgaatgataaataagccttcacaaagtaaaaactctgggtctgtcactggtctaaagagcataatatttttataaaaaaataaaataaaataaaacgtaaaatatttaaaaaaaattacgtgtcaaagtatttttataatttttaaatttttgataatttcaaaaatatattcattcacacactttcaaacaaaaaagaaaaagaaagagataaattggtatatacatatgctaatgctatggtggctctctatgtttcttgatgagtaattagttttatttggtatgacttggcttggcatataaattgagtgcatgcaacatggacatgtggtttgtataaatacttattagtaatcaatgcatatggtcttctttctcgatggatatagaatcttgaagatacattaaaaatagagttgggaaaattttctaggctatatatattttgatcaaattggaaagcaaattcgattattttattaaaatttttgcgtacttcatatctttctaaatacttgtgcaaagattataacttgactaagtacatgtattcaatactattgtctctaaccaactaaataattaaaaagctacactaagtccataaaaggaccaaattagtcaatataaggccgagtaagatttctataaataattacaaataaaaaaatggttcaatttgatatatataaaaaagaatttgtctctcacccttctaatgcaccaaaagacgacccttctacctaccctagaatattatcttcatatatatgtaaacattaatttgctcaaaattttgaccccaaaacaatataattaagtttcttctatactatcttccattaataattaatatggaaacatttaaatttaatttgggtaatcaaaatttgcacgtatgaacaagaagaaccttttttccaaactttgctttttgatacgtaattttaaatttcaaaggagttgagtaagttccaagttattattataaagatataagttacacgttttaagattgtgaaatgcacttacttacaaaaaaatatatatgttaattattcactaaaccaagccaaagcaattaatgaaattcttttgcttttcatttttagctaagagaagaatatatatgttatatttcttagacacaaggaataaaggtttatcaaatctttggaataatattaccttacaccccattatcatttgatctttgtcttaaaaacccaaaaaagcaaaccctatctatcttatctaaatgataatgatgataatgatgatgacatttttatttagatgaaaatttctttcttagttaaatccaattgaaatattaaaacaagtccactctcacacgggtcatgagtcactactactcctaatatactagaactacgtacccttcccatccaccaagaggcagtacaattacaaaccccacccctcaaaaccaaaagggcccattcagggcccatttaaacccacgtgccacctcgtgccacgtgtgggcccattaacgcttccaggtagccacgtcacgagcccatgacggtccgaataaaccctgcgagtgacttggtatatgccgcaacgtgtcaataagcctagtcggatcttatcacgcatataccagaagagtcttctaattgtcaaactttttctcttgaccaattacaaaatagtaattttaatttttaaaataacaaatataaattaaaagtaatttaaaaaaacgaatattctcaaataaattcctttaaaaccagtttcctttatttatttataaagcttctaacaacattccagtactgggtggtagctagcttcatctcaaaacccattttcgaaacaaactcgaatatttattattataaatacgattaaccgttttcaaaacacaatcaaattattctcttctttcttttcgttttcaaaaatggctggtttcgtacgtacaaagcgactcagtgacccgctcgacgcgcgagttagagatcgactcgtcgggagagattccggctccgaccacggctattccagcagcggaagcgagcactctgccgatgagtctccctgtttatcagaactcgttcattgttttctcgaggaagacgagtccgagtcaactcggtctggttttgagtactacgattccgagtcggagcaagtcgaatcggtatctgatcgagacgatgcgaccgagtgtattctcaggtctaccgtagctaacaatgccgattcgtacaggaaacttcttcaggctcatgtttcccaaggcgttgaagctttttctcacatgagatctaacgaggtaatgttcaggcgaaaagtcatgtcgttattacgtgatttggggcacaatgccgcgatctgcaagactaagtgggattcctccggtggaatcacaggcggaagctacgaatacatcgatgccgtactaaaacctagctcctggtcaggaacatcagccggagaaactcgccgctacataatcgatctagacttcgcagccgagttcgagatcgctcg

SEQ ID NO: 186618 - DNA, 2066 bp, Cannabis indica
ataaaacacaaaataaccctagtaattaagacaattatctaaccctacgtaaggatagaagcttttttatttccgtattatactgtatatttggtatatatattttaaaaataatcactagatgaagtctatatatattttaatttgaggagcagtatataaatactcatcttaaaaaaaaaaaaaaaagaattggaccaagaactgtgattttgtttaatattgcaaatatcaatggccaacttatatatatactgtaactgctagctaaccggataacgaagtttctgctaactcaaataaaattcaaaatagaaaaagataaataaatcgccacttcaataccacaagcagcttataataattaaataaaaccattcatgaagtgacttattaatagctatgtgatcacgcaatctttaaattaattaaacattgtagtttgcattatttattcatttatcaaatatatatttttaacataataaataaataaaaatcgtaggttttcattgagatatacatttacattattcttatacatctatatatataagaacctagcctgcccttaaaactcatcatcttcttcattttatcaagtgcacaaataagcacttatgatacctaaaatttaaacacacacatatatttatacatatcaatttttttcaataattaatatagtagagagagtactatatataataatttctatacaattataatatcaataatatggcaaaatcaatctctggggttgtggtagcttggtctttattagctactcttctggcttcttcaatggcctcggccacaatagtgcaccattctctatatgtacgtaatcctaattagttctaaaataatttattttcatttttttatgttgatttttatatgtgtgagttcattatatactatacatatgtccatctatttatatatataaattcattatgtatgaacagataaaaaacttgactgtaaactatctatgtgaggaacaagtagtgattgcagcaaatggaagcttgccaggaccaaccataagagtccatgaaggtgacacccttgtcatcaaggttgtcaacctttcaccccacaacattagtattcattggtacatatatataactattataaattaattaacattaattatgtatatatttatactaataatgcaataatattaattgtcaatttctactataaaataatgtaaatatagtttttgtactcggtcctaatatctatagatgagttaagtagtctacgtacgtcttccaattaaatatttatagataaatatattattacatatataactttctaatcatgatacagttacaatcactaataatataatttaaagcacaaccaattatatgtaataatccttctcaaaaaaaaaaattatttatctaataatcaatttgttttgattagtattttaatctctacataattaatgaggagaggaggggattcgaacttttgaaatccttttttgtatggagaaatgtagtaggaccacaaaatacattttttttagagaaaataccacaaaatacatttagttgatacaataacaatgtatatttttttaatatttaatttaaatatatgtttttttagtcacaagtttttcactgattgttgtccctaaattttttttaaaaaaatattatagtgtaagtttgtgtatataaaaaatagtatatattgaccaagctgtgaccgggtattaatttttatttcttttttaaaaaaaatgattaaagcatatagttgaaaaagctaaaatagagaggagagtttatatctattctatataaagtgtgtctatataacagaattcttggtttatagaaattcagactttttatttatattaaaaataaaatagtttatgagaaattcataggtgactttttatttatattaaaaataaaatggtttattattaaaaataaaatggtttatgagaaattcatgggtgctttttatttatattaaaaataaaatggtttatgagaatttcatgggtgactttttattta

SEQ ID NO: 186619 - DNA, 4121 bp, Cannabis indica
tttttttttttatctatatatactaataaattaataatgtgaggtccaggataagtttaagcaatgatcaactcatcattctctactcaagcttttatgttgtaatttttagcctcggattggatcataaaatatagattgttttaatgatgacaaagctgagcttttctataccgaccgttaagtctttgcctctctttagtggatgtttatggtgctgaaagtaatgttctttttgtatgttgttgtagtaatgtatgcctccaagttcaaggtacaacacttcatttctatattacgaataattaacattgtgatatgcgattagtgattggcagggtaagaatattgaacaggggaggaactatatatctcattgttttctcttgtctcagacaaaaattactgaagcaatgccaatagctacaattgttgaacaaatcagttctatgttatttttttttttaatattatattgtttataaataaatgcggattctaatgagcatgccagatttcataactactgacactcgattatgtgtaattgctctttctttttacactttggtttattatatctaaatcttgttcgttataacttgtatacaaaactggaatttacattttcagcttactaccgttgtacaaatatatttatatgatattatatatttatatatattatatgaatcatttgaatgattacaattaaatagcagcttggtgctgatggcgaacatgtagtttcagaaatactccttgtggaactcataacgggtggatgtcttttgagtcatctcatgcgatagctgttgcagttcttttgccaacactggcatcccacaatagaagacccctgcaaatataagaaagttacttggtaaaacatctcttggtttacatgagttacttggcctgatttttttaaatcaagggtggcattttgttcacagtaattttctttatctaaaaattatatatggtatggtctttgctatgctcatcacttttgtatggtagttaactaaactttaaattatcattagaaattaaatgaccttttagttctatgacaaaagcattaatggtatttaattctcaaacggaacatctgacattttgagcttcgtggaacttttttcagtcttgttatattatttggctcatcttcatatcttttattagcaggtgatgtgatgggttgttgaagcagatggatagtaagaactatgtagcgtacatgccgacttacacttatatttaaaccacacatgctcaagtcagattgttgaatgaatttactcacctactgtcgaatacggatgctttgatgcaattttggtaaatacttctttccaatttggtcttgcgaagtgagtcctcacctgcaagaaacctttgtcagcacgcttttgaattgttttgttaatgtcaaattgtttttatagggataaaattaaattgattgagcatctatgaagttgcaacacaattctgataagaatgcatactcgggtgccagagaggatgtcaaagccatgttttgcatggttgagtgcttggaccatggtgataagggtcgatcttgcatcaccctcttcataaacactagtaaggtagttgtgcatctcaatctgaccctgttattgagtttgtttgacaaaaaaaacagagttagtcacttgaaagcttattcatttcgagtaaaagccagtttagctgaaaatttgaaatttaaattactttatgatccatttctgcaacatcatccatgactcctttaaaccattcaaaagagccaggttctcttgtaacccagtaaaaatgggcatttgtagttctctgcgatttcttcttccctccaggtgttatatttgacgaggtgaagctatttaggctatcatctgatgtactagcttccgtatttgaatcctaggacatggatacattgggtgcaattaggagaagtaaaagtcaatacaaaagttatatagacactgtaaaaaaggagacatgaaatgcgtacttgctcttctgctcttgtattgtttacaagatctctaaggatgcttataaaaggtgtagctccaatcccaagccccaccagcagcaagacatcatagtttcgataatcttgtgctggtgccccgtatgggccatcaacaagcaatctgggttggctgcatttgatgttctgttttaatatttctagagataagcagaacctaaaatatttgtaggtaaagttacttgaagaatataccttctctgatatgaaactccaagctgaccaaagtgagccctaccaatcacagcggatggatcattgccttcagtaacaactcgtttcaattcttctgtccagtctcccactgttctgatgtgaacacttaaatagtcgtctcctggggctgaggtaattgaaaatgggtgcctgcaaagaagaaagtggtgacgattggtttgacgtgtgaattgtagacagagtcataaaggacaatgaatttcttatctgatgagactcaccattcaaattgagagattggtgggcattgtagaaatatatactgcccacttttgtacttgaatccgggtggcttggacatgattaagttgaaaacttgccctggtagcactgagacctgtccaatgtcatcatctatgttagtttcattggtaagacgttctgaacatcttacataaacaaatatagtttgaacttcaccttcaatattttcaccgaataatgctctgatctacatgttcgcaggctccgctcagctacatacaatatcaatggaacagagatgtacatccacgtctggacaattaacaaaggatcaacttgcagttcctcttccgtttatataaatacagaacaaaaccaagaaaatcttaccgatttctgataccactcgtgtgccaaatacaggcattgcccgtggactattagcaaaatgtagacgaaagcaaacaggtgatgagagtaccagaatgcattgaagcctgtcaacttgttcaaaggcgctggcaatttcaccacgtttctacggaatcgacgagcagcaagcgtgaacgcaacgatcatgaacaccaccattagaattccagtcacaccctctggacctgtcaaaagatctttgtacgtcggctgtacgccatgaaaatcggaggatatgactgcaaatctttctggcggtgagtttaccagcctaggaaaatcgcacgttaagtggttccccgcatggagagtgattccgacggctataccacacgcaattaactgcatgacaattgacaaaaggtctaaagttacctttctgtgagaatattacagcataacttccataagtatgcaatttttttccctcatataaataatgacgctgctacaatataatctactgacagtagacactgctattttaataaatttaatcaaagtataacttacctgtcccatgagacagaaattatagttggcacacaaaatcgaaaccttcttttaatacaccttaatactttttacccagtcattataagatgttactttgctcctaaaagaggaaaaattattctgggtcgtgtgtaataagtgttggtgaataatgttttatggacatgataactttttcttaccttgtgaaagttgatgttgtcgtcgaaggggacaaaggacctagctctagtggagcgaagccaagtcaatgtatttcgacatacgggtaagaggataagtgccatgttgagcttaagagtttcagcagcgcctttggcgaccggcaagcaataccccattacctgaaacgccgccatatggctgtattggtagaatttccagtaaaataggcaagtcattgcggtgatccaaagcagaacgatccaccctctttgccaatttttcattacaagatactgaactccccagttgatccgccgtgccaggttcttgggtctaaattttgaacccaagttttggctccagcccacacttgctatgctcagtgacctgctgtagttcatgtaagtgtccctttgtaatagtagttcttccagctgccataactgaaacgaaggacaatgtatccatgagcatagttcaattgcttgtgagtgct

SEQ ID NO: 186620 - DNA, 1477 bp, Cannabis indica
catagaggatctcttaccaaagaatagagaaggtgagcagaaaggaccaccaatccaaactgaatacatgcataaatccaaacatgttttctcctcactaaaaacaaataatatttaacaacagttagtataacaattctctacaaatactatagcattatcttagttaagaaatttgagctcagcccattacccattgtggtcgctgttatggatgccaaaaggcctaatatgcaggaaaaaggaagagatatggcaatggcacctgaacccatttttccaacctatttatgcaataaaattagaatttgattggggggcctaagtagcagcaccaaaatagttggttaacttaccagaagttgctcaagaaaacaaaagtagccaagcatgctgacgatgactagaatgggaacatcttgccaaaccctgccaaagattgcatcaatttagcttataccatagaaaaagaccgtactatgctatgcataggaaggtaaaaacttgttatgctttattagatggttcatggatctgttcttatctagcaatacgttccatataatcacattgttgaaaacaaacagctttttatccaattcaaatgaaattatggtccagcaattctggactgaaacttgtttctgtaaatcattcttgcttttaagtgaaggagcaaggaggctctgaaccaaaggcattctcattctaaatttcatagagtcagtagaagtaatcaataacatcatatcacaagcacatcttatccattgactaacacaaaaataaagttagggattccgattctgctaggtgaaaatcaaaacagtttgatgaaattttcacttgcctgtattgagtaacctccgcatgcagagctctacctcctcgtaagttaacaccccgagaactttgaattcgtaaaagcgtgacaggtaagttccgaacgtcttgcttgcacacatcacatgttttattacctttgatgctgaaccattttattgcacattcttggtgagccagagcaagttcgcctttacagctacattccattttaagtgtatcgccaccttcaccaagctcaacaaagcagattcgacacacagcttcttcttcagggatatcttcaccaccatcatcacctccatctgaaccgcaaaactaagataagacataggttggttatcacaatttacaaaatgctggtatgcaaagaattatcttcgcactatatagataattctaaaaacctttttttttttagtttttactagcaagaagccgttgtcaaagtcaaaatagttatcagaatcactaaactgcttatttgattgataaggaaaattaaatctaacagaaaacaactgtaacctatatatctgggaataggaccaaaatgattttagggtagttggtcggaagtaatgaaacagatgaatagaaatgacatttaatacgaggaaaaagttaatttttg

SEQ ID NO: 186621 - DNA, 2914 bp, Cannabis indica
agaaaaaaaaaattaaccaaatgcaaatgtaatcataaaaaatcaaaattccgtatgttatttatatggtgatcatatacctatttacaatttcagcactcgtgattcaaaacatatagtaattattgataacatcttacagattttcaaaacaaaaatatgaattatttaatgcactaattaaaactaagattttgaactgaaaatgaaactaattgataaatgtacgaattttattaaatcatggataaaaagttgaaaggataatttcactaaaaattgatccacttttcattttcccaagtaattaacatacatatacattgatataaaacaaacatgcatattatatattcataacaattgctgatcgagaacaatacaacaataccatgcatatatatatgtcgtatatatacatacgtacataaattaaccaataaaactcaacaacactatcgtgtcagattaaatcatatatttataagaaatataacttatatatcaaactcaaaccgatcaatatatttataaatatatgacacaactcatctacctcaaattttccaacccaaatcaagtggttctcggtcgttattcaagcttatagcccccctatgcagccggtggccgccaccaccgtggttaatattactcatcatactagcttggtttccatgtattttcttagtcatgatcaccggaccagaatctgatcggagactattaatccaatcaaacttttttggtttctttgatgatggtgatgatcttgaatcattaatataactcttattaacaacaggctttgtggtaattttattgtcatttttcttggtctctttaatttgtatcttggtccctccttccatttttatgtttatattcacctcagaataagtctcttccttttcgaataatctccctccaatattattattatttttagattctcttttagtcctctgtttccggtgctgatgaagcctatgcaaacggagggcaagatggtaaattccttccttaatctcttcttccaagtctctctccacatccaactccagctcgtgccgaattttcatgatctcttcatcatgatcttcttccctcaacaatttgttttctgcctttaccttcatcatctacactttaaacatttaatatattcatacgtacttatgtaaattctctataaattaaatataatatatatagaaaaaaaaaaaactattgtaattacacttccattcctagtataataacagaagtttcatttgtggtatatactacgtacgatttaatatatttgtcttatagcttccttttgttccaagtcttctccatcatttattagttgtatttttactaatattaatagatgttgtaattttgttgtgcgctaagtgagtttttaccacaagaggtttgcttgtattccactttcaattatctctgtaaaccctaaaccctaaaccgaccgagaggtctaactaatttgctatctattattaacacgaatttattcaaaatatatatatgtcttagctaattaccggtgggtcatcaggccaagaaatttcattctcattattgctgaaatagtccagagactcggtcgataaaaagcctgaatattctgcaaaaaaacacatacataaaaaaaaaaaaaaaaaaattaaataaaaaactaacacaaatgggaaaggacttagaaaaattacatatgtgtgtatgagtgtgtgtgtgtgtgtgaacctagtaggggatctgatttggtgtgttgttcttctagctggtccatacttgaactttttgtagtaaaaaacgttgagaaatgaatgagcattttaaatggttaaagagtgatttggagtgggggtgaggggaaagcgaagggggacccttggtgctgttgggatgaaggagacatatataataacacacatacataaaaggtttaattttgttagagaattggaaagaggatggtccttaaagaagttatttggattggcttatttgaatttaagggccaaatgagtcagcccaaattggaatgatttgattgtatttggaagatgaaaatggagagagttttgctaagtgtgtatcaagtagatatatatagatggtgctttacgtggaagggattatggggtttgggtttgggttgcccttaaagcataatcaacgtacatatttggaaggatcatgatattgagtagtagtagactagtagtattgtacccacatgcttgatgtctttgcctatggatagctacccttcacttgatcagttgggtttccttcaatttaaactttgggcttttattctacgcccaattctacaaaattatgccccaattggtttatattgtaggagaacttacaaaaatactataaaacaggggaatgtttataaaaatactgtgacacagaattttttatatttttactatactaatttttcaatactgtgtttaaagtttcaaaattacaaatatattatgttccagtaacaaaaaaaaaaaaaatcaaaaataaataaaaaacaagtctagaataacttaacaaataacatgaaaataactataaaataacaaaaatataactacaaagcaacagatgaataacaaaatattgacttaattgcaataagcaaaataatatcaatttcccaatatattttggtattaccaatttttgttacttagttttgacaaaatgatatatctttttgtactatacattacattgttttttatttttttttattgaaatttgttgttacaactttattctttcaaccttttttttcttttttgagttagtgataattaaaaaaatagagaaatgctaacaaatggctttatttttctctatagtgaaagttaatgtttttttttttttagaa

SEQ ID NO: 186622 - DNA, 2571 bp, Cannabis indica
tttttaaaatttctgtaagtatacctgatgcttgatggttaagtgtcaaatcaataatcacataagttcatgattggtacaaatcattggtacaaatcattaaatttttattaaatatattaataaaaaaataaaaacgtgaatattaacttgacaattaaatccaagtacttactgaaattttaaaaatataacttaaatattattactgtcaaaacttaaatttaattatttatctacaactgaaatttaaatttattttaaccacaaattattcttaatgatatactttaatatacactttttaaattaaaatattgtcaaactattttttaaaatatttaatacatgaatgatagttattttactttttatcctaacttgcacctttaaatattattgcattaaaacataataacaaatattgtaacaaatatagcattaattcatgttttgaaccaaacttgttacaaataatacaccataacattgtagatggtcataaaattagaatatcaaatattattcatttttaaattaaaggaagataatgttatcaagtgggggcagacatttaacctttgcatgtttaccatagtaaaccaaatcaaaggcatttttcttgcataaattattaactgaactgaactgaatataacaacctaacttacgtgtgttacaagaaagtagaaacaaaggaaaccaagtttatagattgaaaattgctcataataaaaacaccgaaacctatttcgcggtgtatgcatcatcatcatcatccattgcaaaattgattttgatggattccgagctaaaaattaagtttaagctgtacacgaatactgcgctacaaggtttcgttgtctaacaagctcgtgaagatcgtgaactatcttaaatacagcatccggttttgccagctttagtgcattttctgacattaccttaagttcatcagctttcggtccaaaccattcagcaacgattttcgctatttctttaggagatttagagtacttcccgaaaccattttcaaccacataaggcacatttccagcttcctgagacaaagatgaacaatagaattgagaaagttgctaaagctatataacacaaagaaaagagtataacgctactcgtttttctttcttacctgcccagcgatgtaatcgttcaaaatgataggcactccgcgtatcatggcttcagcaattgtccctggacccgcctgcattcaaagaagtgaaactaaattagccgaaataaccacacaaacaaaccgacgaatgtctaaagtttcgaagcgaaactaaccttggtaataatgcaatcacaagctcccatgcattcttccatcttagtaacaaaccccttcacctataaaattgtaaagtattagcaactcttctatatttctatgtatataaattattgttataatggaagaaaaatgcatgttaaaaatgtacaagcacctcaatagtataaagagatatttacagcaaaaaatacctaaattattatatttgtagcacttaagtattcaaattattaggtttgtaacacgtacccaaattatttttttagcggcaaaaaatacttaaattaccatgtttgtagcatttaagtatcttaagtttaattttggttgcttaagtctatctacatggtatcaaatttccttataacttgggtacttttattgtagaaaagaataaattgactacttaagtgctacaaacataatagttagatactttcactactaaaaaaataatttgggtacttattgagaatcatgagttctatcttaaaaccaaccccataattcttgacatggtatcagagtcatattccttgtggacatgtaactctgtccgatccgcacctatacagatagtgactttgtccactctgatacggttcaagatttgtgagcaaaaaaaaatagctactgtcttgaagaagaatattgtgggacattgtcccacatgaaataaaaagtaaaatattaagccatatataaaaatatgggctacttcacttatcaccaattgaatttaagatagaatcctataattctcaacagtactctacgaacataataaagtagatagcatccccaaaataaataatccaattttgaccaactacatgacaacatggccaatcaacatttacaaaatgtgtggccattaaagggaagttcatacatatcaactccataaaaaaaaagcaacaaatgaataggtcactagccaaaatccttttccagcaaaacaagaccctactcgaatggcgaacattaacacgaaaaggcagggttttgagcgatacctcaacaggaattttccattcgattgaacgaagtttgtttgcgagttttttgttgtgaccgcatatcacaagaacctgaccaattggctccccgagaacctcatcgtataatgacttcccaagtgcttttgcagtagcttcaatagggcccattccttcacctcctcccattaacaacacagctggaaggtcttcatccatacccaaatccctttttagttcaaactacagaac

SEQ ID NO: 186623 - DNA, 2100 bp, Cannabis indica
tttttttttttcttttgagatcattttctttcagcacaactctgatttctattgttatgtgtatgttaggtacaaggaaatggaagcatgcgtaactcctgttcctgaggtgagcagtgcaaatgacgaagcagtacaattgaaaaagttccctgctagactttacgcagttcctccaaggatagccaacggacttgtacctggggtcacaactgaatcttacgaagatgacaatacgctttggaaaaagcatgtaaatgcatacaaaagaattaataagttgattggcactgcaagatatcgtaatgtgatggatatgaatgctggccttggaggatttgctgcagcacttgaatcaagaaaatcttgggtgatgaatgttgtgccttcaattgctgagaatactctcggtgttgtttatgagagaggtctaataggcatatatcatgactggtatgtctgatgatcttctgcttcttattactgtcaacagcaacgcttaatgttctagtcacacactgccaatgttgtcacttcttgcttgctcaatcaactcataaatgtcccaaaaggaagaatcatacttgtttatgagtgtattaagtaactaaaaaatgtttctgggaataaccctggagaaaaaacacattcgaaaaaccccaaaactactgaaagacagttaaaaatttatccctcaagattgagatatacgattaggaagcttaatacgttatcttctgtaatctttcaggtgtgaaggcttctctacttacccaaggacatacgattttatccatggaaacggtgtgttcagtttgtacgaaaacaagtaagaaatttctcctcaatgccattgtccatgctcggtttctacttcattagattactcttagattgaaatacaaaataattgaatttatacacaacatactatattttggggttacttcatgagcttaatatgctatatctgcaaaatgatttgtggatatctttgagaaggtttttcaaaaggcttaaatgttcaactctcctataaaaaatcaactaattggggttgcatatttcatctcaactaaagacataatactctttaggatgctagagctagtttctacctcctttcatcaatgcttgtttataaatatgtattgggttatgcaggtgcgaactagaagacattcttctcgagatggatcgcatcttgagacctgaaggggcagttattttacgagacgaagttgatgttctgaacaaggttaagaaaatcgcagcaggcatgagatgggatgttaaattagttgatcacgaggatggtcctttggtgcctgagaagataatggttgcagtaaagcagtattgggtcgccagcagtggaaacagcacatctaatgatgagcagtaaattaggtataatatgggccttgaagagagaggcattgataaaggagatacagggcagagatatgaatggtttcttgagtggagagaaaccaacatgttctgatagtaagagatgagtttgtttcaaaatttaatgatttgtttatttagtgttcattagagcataatttatatagcttgttctattgatatcacaggaaaatgttgtaacaaggatgatgaataattagttggagaatgtcaaggtggttatttgaagcgtgaaatagagttcattaagttatttttgttcccaatatgaatgtctagctttcatgcttgtttgtataagaagaaaaatacgtaaaagaatagtgttttcgtgctttcatttaagttatcgttattttcttcaaattaggatagctcattgttagtcggacagcagcgttattattctctgatttgttcagaagaagagaaactggaatggaatggaatgcaattttgtaactttttggccctgctaccatgagtttcgagtggtaccggtttcatcggatttggacatttacagctcaagttatgcttgaaagaccagagttgggtcaaaaattaggaaatgactgatatcatcacattatccttttatatccttttatttataagaaatgttaagagtttttttcacttcacactgaaatttttaattttttt

SEQ ID NO: 186624 - DNA, 3117 bp, Cannabis indica
aaatcatttgtcaactgaaataaaaaggatttacagttagtgcttttttgagcgtgaagaacctaaaatgatagaactggtgctacagtatacacaaccaaatttaatgagccacattcaagactaatatatatatatatatataattaatcttccgacaattgtttcaccagctgaagtgaacaaaaagggccttggaacaagagttcaaaagaaaaccaagaatggacttccgaaagataaaacaaaaaagaacagtaactacctggagaagttgagattatgattttgcagaaaacaaatactgggacggtattttaaacgaaatcaggaggatagtcccctttgaaatgctagacttattgtagcatgaaatagatttgaaatgagaccaaagtaattaatcagtctttttttttttttagaaagaattaatcagcttattataagggtttcttattgtatagacaacacatgtttcacaaatccgaacaaaaatcagaaaaacattcactgaagtctgatgcatcattaaatatctgagaatacacaaagttcatgataatcatcagacttaccagaagctgttgaataatgaactacacatgtatttcattttgcaaatgagatggtagaatgacaatcatatgagttagcaaaacaacagcaaaggtatttataaataaacaagaaagggtattctgtacctcaacctaccatcttcatcttctcctaggtcaatggttaccttaatgaactctgtttacagttgagaatttcatagttcttttcgtccagcataagcattgaggccactgtttggaagaaggccatccttggccatgtcagcaagcacattgaaaactgcatccatatttccttccttctggttgatttcaacaagtaattttgcgagctcagcatcactaagccggcagcttctcaatgttttggttatgacttgattcagttcattgttcatctcttcagtaaaaagagctttaattagtgctattaatgttacagtatgaggaacaaaaccaaaactcaacatttccttgtacaggttatatgccttttcaacatttccaccacggcaatgaccatgtataaggacattgtaaactgactcgtcgggcttgtaattccttttaagcattgtctcaaaaactcgatctgcttcatccatcaaacctttcatgcaaaatcccttgacaagagctaccacacttctaaattcagtactacaacaattttctataagcgtattataagtgacatcatttgggacagactcatcatagaaaagcttaagcaaaagcctctttgcttcccttgtccgagcttgtttgttaagtccattgataagcacgctgtaggtaacaacatcagggagaaaaccctttcgtaccatttcatcatgtacttgaagggctctattcaagtccccttctacacaataagcattgatcaaggtcgtgtatgtgaattcatcaggaggcaaacccatactaaccatctcttgaaatatgttgcaggcttcatcaagtttcccctgctgacaaagaccttgaataagtgatgaataggtgatagcatctggaaatatacccttctcaaccatttccaacttcgtttgaaatgctttctccaactcctgatgcctgcaaaacccagatataacagtactataactaatcacatctggagttaatcccttttccaccatgtttcgcatgactcccatggcttcttccatctttcctaaaatgcagtggccattaataatggcgttataagtcacaatcgaaggtgacaatccaatagaagtcatctctttcagaaacctgtaagcttcatctaagaacccttgttgagagaaaccatcaatcagtgttgtataagttctctcgttaggataaagtcctctaacccgcatctgatcaaaaaactccaatgccctattcaaatttctagccttacacatactacttatcaatgctgtataagtaacaacattgggagacaagccattcctaaccatctcagaatgcaaaataagagcttggtgaaaattatcgtccttgcaatatccactaacgagagtgttgtaagtaacctcgtcaggcacgtaccccttccttttcatctcctcaagaaacttacctgtctccttcaacctcccatgtcgacacaatccattgattacaacgttatacgaaatcaaatttggctccaaacccttcaaagccatcgaccttaacaactcgaaagcctcatccaacttattcattttacaatatccatcaatcaaggtattatatgtaaccacgttaggtaagcacccatttttctccatttgggcgaaaaaatgcaaaaccatatccaaattcccagccccagaaaaaccccgaatcagaatgttgtaagtgaacacatttggcgagaccccatttttaagcatctcaataaaaacctcctccgcctctttaaccgaccctctggacctgattatggagtctataatagcattatacgacaaaacaccaggcataaaaccacgagacttggccaagttaacgatgttgagagccttactcgtcagtttcaagtggcagtaagatttgaccaccaagtcgaaaactgcggagctcgaattgcagagctggaaagactcgctgagacagtcaaagaccaaatttccaccttcgtcttcggatatggtattgagggccacgtcctcggcgagggtttgggcgctcttgtagagcttgaagcgggtgaggatgtggagggcgaggcacttgcagcggaaggtgaagaatttgcgggtccgagcccagtggaggaagctcaagatcagggttttgtccaattgggacttgaggagtaaataggaggctgcatcaggggtaaaatcggaagaaagagagtcaagctggtaagggtggcgtttgagatattggattgctttgattgcaagatgagcatcggagggagaacagttgactgaaggtattcggagaatatttggattccttagggacatttttgtaatcccacaggtcaggttttatcagtgcagaagaaccagtactgggaagaagaagaagaaga

SEQ ID NO: 186625 - DNA, 8651 bp, Cannabis indica
aatgggttatagaccgttgggtccatatactgcttcttctagcaaatccgggttgccttccattgacgcactacgtaagatttgccgtggtaatatgatacccatttggaattttttgattacccgggtgaagtcggagaagactgtggagaatatccggagaaatataacagttcacggtggtggtggtagtggcagtagtgatgggggaggaggaggaggaggaggaggaggagggacggtgagttctgtaaaagaagagggaaggagtagaggaagtaggaggaaggagaaagtatcagcggagggttccagtgtggcggagactagggaagcggcgttgcaggagagggaaatggtggcaaaggaggtggagagattgaggaatattttgaggagacagagaaaagatttgaaggctaggatgttggaggtttctagagaagaggctgagaggaagaggatgcttgatgagcgtgctaattacaggtaaatgaacaaacttgttactgtttattaagagaaaagtagataaaacatagttttggatatttgagaatggaaaattgaaccttaagacttgattttaaagatgtttaatagctcaggatgatgaactagtttagtttaggtggatgtttcccactctttgatgttttatactctaatcaatgaatggtcattgtttaatagctttaacatggcatattcttttatgggcattggtttttaggcttcatgttttaattcaactgcaggcataagcaggtaatgctggaggcttatgatcaacagtgtgatgaagctgcgaagatatttgcagagtatcataaaagactgcgtttctatgttaatcaagcaagggatgctcaaagatcaagtggtgactcttcttctgaattgtctaatagctttaatggaagtgttgagaaggaatctgtctattcaaccttaaagggaagtaaaacggcagatgatgttattcttattgagaccacaagggaaaggaacattaggaaggcatgtgaatctcttgctgagtatatgattgagaagattcgaagttcgtttcctgcttacgaaggaactggtgttcattcaaatcctcagtcagaagcagccaaattgggtttcgagtttgatggtgcattgcctgatgatgttagaactgtgattgtaaattgcctcaagtgtcctcctcagttgcttcaggcaatcactgcgcatacgttacgattgaaatctgtaatttctaaagaaatagagaaaattgatgttagagctgatgcagaaaccttaaggtaaattcttccctttacttaattggagacggttatcactttcggatactctcctttttagctgttttcaatcttaacaccaagcatatactattagttgtgatcagtctaatcaaagaatccttaaataacatttgtggatgtaaagcttatttggttttggagccatgttgttcatgtcttctacactatgccgtggtcctctttagaattctatctgctgtattatgtttatgtgggtagcaacaaagcaggtgggaaaaagaaagtgtagggagctttccagttttgcaatttactaacataatgatttttcatctatactcacgatgtcatataaactgatccatttgtattctatttggctcatattaagacttcatttctgggggctaaacttgcagtttcttgttgttaatctatttcactcaattttggttagagcacacagtgctgatttgcttgtgaaagaacctcttaatgtaaaattatatttgattttttgttaagacttaactaacaaatttttattgccattaggtacaagtatgagaataaccgagttattgatgtttcttctcccgatgtgagctccccattacactatcaactttatggtaatggaaagataggaggtgatgttccttctaaaggaactcagaaccaactccttgaaagacaggttatcttaaactctagttagcggctttttctcacatatatgtgtttatgttttcatttttaaaagttttattatggaacttttgatccacttttcatatttgtatattggactcggaatcatttgcattttgttaggtgttgaggcctgtcatttgaaaccaggaaaaaataaaagagaatagtaaaactgtttttgttgtttttacttttgaaatttaatactatatcctgacctggttttagtgcgcacatagtactgtttaagcgatgatttattggatttttccttcagttgctttattttgtctgtcaattttttaatattatgtacaccatctttgtaggatatactgtttgatacttggtttttgttgtccacacagaaagcacatgttcaacaatttttggctactgaagacgcactaaataaagctgcagaagctaggaacctatctcaaaaacttattactcgtttgcatggcagtggtgatacagttccttcacactctcttggagttagtggcacatcacaaaatgcaggcggtcttaggcaatttgaggtaaatccaaattctaaatggccaattgttattcactaattagttgcggggaagagtatgcaactaatgaactttgcttgatttatctttgttcatatgtgtaaccgaatgaaataataggcaaatgaatctgtgtattcccattagaggttctatctagtcaaaatcaagattacgcttttctgatcttgttattttcacctttaactatgccagatcattgttttgtttttagcggcaaagtcagtttagcatcattgctatataggtgctttagtctccatgtaagatgagtaagttagatgaggtctttatgggtgagtggtgccttttggattaattaagcgtcgaattatctaagccaaaatctcgaattggctgatgctagtcattaatgaggccaggtggtgaaatctggagggacctttgtatatgtgcaatataatcaagaaaaagtcctttgctctctaatttagccataagaagttagggtggagttctttgctctctttatcgtttctagttggttatttttatttttgatattgaggaagtcttagcaattgagttcaagaacaatgaagtatcagcttgagatgctgctgggtcaggtcaagacattcatgttcttccccagtccatttgttcattaagatttcaacaaaagttaaaaggtgttaaataatctcagaagatttttgatgtaaaatttgtttggttgcgtcattttttgaatgtcaattagtgcaggtttcatttttttttttgcatgttaattagtatactgaccttcattccaaggaagctcatctgataatgtactggggtagtactgattgtaatgttgatgtcaaataaactcatcttgtgacacaattcccttattcatgcagttggaggtctgggccaaggagagagaggttgctggtttgagggctagcttgaatacattgatggctgaaatacaacgattgaataaactatgcgcagaaagaaaagaagctgaagattccctgaggaagaaatggaagaaaattgaagaatttgattctcgtagatctgaacttgaattcatatatagtgctcttttaaaagctaacatggtaagtcttgtattttcattgctcctatcaattcaagaataaagatcactgtgtgtagtgtttctttttgggcaagtttggtatctggtctacaatgaatattacaatttttaaaacatgtatagaatcagtttaaatatatttttgatttttgatttattgaaattttagcttatgagttaatattgcacccatgctctctgattttatccaaattaattttaagttttcttcccttataaaagttttatatataattcttaaagtggttttgtttatcatttaggatgctgctgagttctggaatcagcagccaatagctgctagagagtacgcatcaggcactatcattccagcgtgcacagttgttgtggatatttctaacaacgcaaaagattatatcgagaaagaagtttctgctttttatcgcagtcctgataatagtctttacatgcttccagcaaccccacaggtgtgtataactgcaagcacatgagtaattataatgaggacttgcctatgtggtgaatttcacactaacacacaaacacaatcatttctctctctctaatatacacacatatatatatagttactctttcgttaatatgtaattttccactaagaggctagtataccattcacgtttctcaatggtgattaataattttttcttcctctatttctctctgaaagtttggggtctcttattttcttacttgattttttacaggcacttttggagtccatgggtgcaaatggatccacgggacctgaggctgttgctactgcagaaaaaaatgctgctatattgactgcaaaggcaggtgcaagggatccatcagcaataccgtcgatatgccgcatttctgctgcccttcagtatcctgcaggtgagttattagttagaacattagaaatatgcccaagaattagtgcattgttgtcttggggtaagcttaggtttttgaaagacattgtgccttcgacattgcttttggtgaagaggagtttcttctattccatgttttaccttaactagatgttagttttgtttgtggtgaaatacattattgtgttctattcatatgctctcttcgtacttaatatacttgaaactttattgagttttaatgatgatttacagatatgtattgatgataatgtatatttagctcatgatctacaggtatgtcttgatgtcaatttcttcttttttcttgtgtattgaacataacttttgtggatttataggtctggagggttcagatgccggtctagcatcagttttggaatctctagaattctgcctgaaacttcgtggttctgaggcaagtgtgttggaagacttggctaaagcaatcaatttggttcacatacggcaggatcttgttgaaagtggacatgcgttgttgaaccatgcatatcgagctcaacaagaatatgaaaggtaggattgcaatgagtgttcatgtatttcagataaaatttactcgtactattcttgaagcttactccttggctaacatcctcttccaaagtttgtcctacacaaattatattacttcttttggttaaattttggctttatatattgagttgggtgttacgtatatgtttcatattccaaaaactgtggttcagtttggcttttactaggtttgtgctatgttgtatatacaattagttgatgggaggagagagtttaggtttacacaatatgactcataagattttgtccaccaactttgattaccaccagaagccttgaatctaacaacaaaattgattgggattatcttttgggattttgttcaagtttgagatcaccgcctttgtcaaaaatggatacacacatttatactaaactttgcatacaacacaaattagcagcatgaattgtttgctaaattgtttttctacatgatgcaggacaacaagttactgcttaaatttggctgctgagcaagagaaaacggttttggataaatggttgtctgagcttaaatctgcagttttgaatgcacaaaagtgctcagaagattgcaaatatgttagaggattggtaagtgacttctgaaactatatactctcttgtttctttatctgtggtttctatgtttttacttagttattaggacatatgttcagttctcatctttcttttttttttctttaaatgcggttttgcaaagcaatatatatcataaacaatgcatcatgattacttgtatgcaagtttcatttccctgaatctagagttctaatgtactttagttgattccagtccatagaagagaaaggagagagtagagaacatattatgtcttttttgaagctatctagtggcttacactacagccattgtctttctgaccttatggcctgttgaaattttcttttcttttatttatttaccattttcttctaagaatttcaagctggaacatatctctgcagcttgaggaatggtgggagcagccagcatccactgtcgttgactgggtcaccgttgatggattaaatgttgcggcttggcataatcacgtgaagcagctccttgcattttatgataaggagctcttgtgaatatcattatcgtgttaagtgcaacgaaatgtgttctggtttctaactagtttactgcctactgctttgccactttcatgtcaatagccacggaaaagaaattgcagccccatcaggggcaggctgctcgcaagtcgaggaacaaaaggatagggaagcattcaggtcaaggatattgattttagtacagttgggagggtaaaggagaggggagagagtctgattattttttttgttataggccacacaggtttccttcattttccatttttaaattttgtatagaattttgttggtgggtgctttgtaccataggcaatgttttggttggcatattccctttcaagggtagtagtgtgataaagttgtagcagcctttgcatttgttgttttgaagtgtgattaagcctatttgagttgaaatgatactgttgattgtcataatcaacatgtaaaatacctttgtggtagtcttgtttgtattttgttgattctctccctattaattacttaattcacagtttttcttttctttctttctttgggctggtttagaattctactcaagtacttttttggtaattgatacacaattttgtgggtatcctaagtacataaaatatgttgttggttgttccaacttccataaccatgatcataattattatactcatttctattaattaagaatctcaattaatgaacttttgttctttttgtcgttttacactaatactagaggcgtgtcataataattatgtgcattttaagaaccccaggatattctaaagtcattgttaagacccctttatgtcattttcattgaatatttaaatcatcatattatttaggatattcattgaaaactctttgtattgagacacttgtgcaagtgaacaaaggttttaagtcgcccgtgaaggccagagaacaagatagttcggaacccgtgattatagtagtcatttttcttcatgattagacaaacctctctattttgattctaatgttaaatatatgccatcgttttaaaaccctaattatgtgttaaacttgtacataatttattggtggtcacaagacaaatatgccctctggtgttgataaacttgaaccgtttaatgaaccaatgtgcgaaagcataaaaagatttactttgatcgtgtcaagcggtggctgctttttaattattaataactcacagctgttgaataattgtattaattcggctacatgatttttgtatataaaaatagaactacttgcctatgtaattctctcaaaagtcatctaaaactaaaactgggtcattttataaactgagtgtaataaaatattaaattttaatctcgatattttaaattatttaaaatattttaagagtgagcaattataatatacacaattatataaaagaaaagaaaataactatccaagtctcattgacacttaaaacacggtcgtgtgtactagtaatcccgagaatttgcctatggtaaatacaatgttacattgatattatatttgagtcttcgtttagggtagagaatataagaatgatgaaacaataatacatgaaataataacctctaataataatagatgaattaatgaaagagaagttcgtactacactacacaacacatgggggtatcaccaagttctaggactgactctgttgcgagtgcatatattttggaaaagcttaataacagagattccttttgtcatctaccacctcttaaaaccttttctttcattagatttagtggccactttgctgtaaaataatagtgacatggtcattctagtaagtcaagtacatcacaaaatataggccaagttttttttttttaactttggttggaacaatatcatgattcatcttacttatatatatatggtatggcttgagtgaagataagttagatccaacacacaatatatacaaggagcacaacactgccacatgttctctgcttctatagctgtttgatagaaaatatataatataatgtatgatatagtataggccaaagtattattcaatttaattatcacgtcttgcttatgacaacaaactcatattgaattgatgatgagtacgttatcctcattctgatgaggtttagatttcacagtatgtggccactcccactgctaacaaatgattttaactgtttaactagttaaatactagatatgtatggtttttgagagatgtgaacaaagatatataaatatttatatttatatttttatatatactacaaacaaaaataaatgtcttgttcaatctgtataagtcacggccaaatgtctcaacaaaaactttgtggctggttttcgcgtctcgtgaaccaacaggggaccctactataatacatactcattttagttctttatactcatac

SEQ ID NO: 186626 - DNA, 2877 bp, Cannabis indica
ttttttttttaaaagagaaatatattctatcgctagtaggatgcaacttatatagaggttaagtcaataaaaacacagttagaagaaacactaatatgatcatgggtcatacgcagttaagaatcacgtttgctacttatgattgttaaaaataattaattaattaactaaatattttattaaataattttccagtaaacgacagcgtgtgcatgtggtggttcgggtgacattaagggcctaaatttaaatctcattgttgcatcttatatacactcttaaataaatttttctatctcgtgtaggactctttgcaataccacacacttcacttctaacattttttttcccttttctttgtaaaattcacaaaagttccaacagtaacattattaacaatagtaagtgctggaaaattcaccattgcagcattctgtcatttgccaaagtataaaagtttgctgtgtgattaaggcagaaacatattttccaacttggcaagggaaagaaatggcatattttaactttttagtgcctgttaaaacaattacaaatcctttttttaacacattctttataaaaataaaagttagtataggctaactccacaaggggaaaatggtttatacatgaattggtccttgccccaagagctaggaaaggaaagaaccatccctactaattttaggaagccatatacatgtgatcatattcactatgccaatctaacggggcttactatctttgtctttcttcccagaactattaaattcttcttcctaacaaatgggaatataactgcttaattaattaaaatgtttagttacgtgacagttaaattgagattgaggtaaatcactccctggggcgcgccaaccacagtgaactgagtgctctaaggcgagagaagtaatcatttataacgagaagagcacgagcagcttggcgagtagtcagaattcgatgcatttgttgcagtgtttgctgcctcaaaagatcagcctaacaagaaaaaatgatgtggaaaacaattaagttggataaatttttattgtctcatcaatgttgttgatgatcaaagttaagaatgaattattacttggtaaaggaaattctctagagtagccagcttgcccattgcgatcgccatttggcccatgtaatcggcaacattgcccgatccagcaggccctagagtggccgaggaaagcgtctccacaagagattgctgcagagcttccatgccttgtgacaaggcatcctcagcctgttgagaagattgctgtaggttacatatgcccaacaactgttgatctgtcaaaggttcaaggtggctccctagtatctgaatctccatcgcaaggaaacaatcaatgagagaaaacaaaagcccaagagcttaattttctttctttcaatctataatttagtaaaaatgcaaatataaaagagaaggaaaaaaaaaaactgaaactataggtgaccaccttgagaacttctgatgatctaaacccgcctaaccacataaaacacctttctgcaggtgtcttccacatgccggagagcatgtgaaagacatcagccttggcaccaatactcttcaacctgaatatttcatcgtagtgtgccatcactccatcgacaagaacacgtaactcattgtcgcccatgtgggaatttacagccgatcttagatcatttgtaagccgttgttgctcatcaagccagcgtgcataatccaagtcaaatgcaagggcccctagaaattggaaaaaaaattaataaacttgatgattgttcacttaaagttcagcacagagcacagagttaatcaaagacatctaagcattttaacagggtctataaaatggtacataaagttccccatcatggcatcattaatgtatatttgttttcccaaatttgagcttattatttatttagttttttgctactttttaatttcaggtacctctctgttaatttttctttcatgtctactgacactcaaacatcttttcaaaacatattttcttctgtaggtatattgctacagttctttgtacagtagtcaatggttcaactttccatggatttcatatcattaattgcaacaataaatagaaagcaaaagccttaaacactctaccaaactcttttccctcctacagaaactattagatgaagtttacacaattgcaaactactttcatacccttatccaaccaaaatatttccaaggttttattttactgttaatattgaaccccagctggaacacagtaaagattgctaattaataacacgtaccatttcctgccatcaactgattatgatcacttgaaaatccagaagcaataaacataccctgcattaagacattaacaaagttgggattaaaccagcttcaaacatgacaaagcaaacatcccacttccccggaaaattattatagccaggaaattttcacaatgtacctgttgacgtgctcgttgaagttcttgttctagttgcgaaagcctaagtcggctactctccaattgctggacatatgcctatccaaaaccaaaacctataaatcatccaaatatattccattcattaacttaagactttgacattgacattcttttatttttccatgttttaaaagttaaggagcttcaaaatttccattcaaggacaccaaaccagcttaaaataaatttttttcttttagtgtgcatttcttttcatctacattgctctaattatcttcaatccaagccacagagtacatttaaattaacatacttactttcttccttaatcgactctttcttgctgcctctcgattctgagccagcctacgtagtgtctgaaaatttgatgaacaat

SEQ ID NO: 186627 - DNA, 1259 bp, Cannabis indica
aaaacaaacaaacaaacaaaacagagacatttcggggccctggaagatgatatgctctgtcatagtctaataagcttatccattaatttattcacaccattacttagcttcaaattaaggcattttcttttgatcttatccactttctctattttgtggatgctctctttgtatagtgttcatatatattcgaatcttcattgaatgacctaacatgatcactttttttaaaaaaatatatatattaattaaaaaaagttagtcattaatttatgcttatacagattcgaaacagtggcttatttacaacaaatttggtgggttgaagtgattggagagttagagttagtgttgggagaagggagttatagcctctactttcgactacaattaggaaaagcttcaacaagatttgggagaagagtttgtaatgttgatcaagttcatgggtgggatataaagccagctcgattcaacttatcaacatccaacggtcataaagcttcattagaatgttatttgaacaattatggaaaatgggtccattaccatgtgggtgattttcaagtggaaaatcctaatatgatcatcaagattaacttttcaatgcttcaaattgattgtacacacactaaaggtggtctctccttagattctgtgttcatatacccaactcagatttctaataagttgttgaaatcttagtgtgtgtgtgttttctgtgacaagtgtacaaatgtgagctgagcaagtaattcattataaattatattttaattaagatgttataattaaataaaattatacttaaacaaaaattaaaatattaaaaaaatatcaatgtaataataataataacaataaataattattaatactaaatcataatataattattttcaaataatataatatttatacatatattacaggttaaaataaaattattaattttacataaataaatttataaaatatatgtagatgtaatttttttgtatatagaagtatactttattaataagggacttagaatatgtacaactaattataatttagtgaaaattacaccatatatgagattctataaaaaagtttcataaatatggcttttttaactttaccactcttatatgggatttgtctaaatttaaaattttttatggtattttctaaccacatttttgtaaatttaatttttaaatcccataagtaataaaaggaatcattttaaacctaaacgctactttctctctctc

SEQ ID NO: 186628 - DNA, 1529 bp, Cannabis indica
gcatatagaattacatcagtttctttcttgttttgtttgttttgaatttagtatactttttggcagaaatttgggcgatggttagcatttgttattaaaattgattctaatttgtgtattttagattagtttggaagcttcatcaggaaatggtatacaacagtgtgatgagaagcaaaaggaacaaactcctgatgttattggtgtttcattaactgctaaaagtgagtccattgatattcctgaaaggagcctcttgatttgtgtagaactttagtatataattatcaattgatatcattgtcgattcttctttagaacttattgacactcaattaattgtgtataattaattagcagtagtgatatttcagattatgacaagacatattcatctacggagttcatttcatgtgaaagacaggataatatgcttgtttacacaaatgacattagtagttcatctttatcgacctcgctcaaaatcaaagatgagcctcatgatgacaataactgtcaaaacttggagggcaatgcttgtgatactttttcctttaacatgcctggggtaaaagctgaagtggaaatctcaaatgaagatgatgaagatgaaagagaccatatttgtctaggagatcgtacaaagttgctgaagttaaaagatgattatgagataaaatctgtgccttttgccactgagggtagccctatagcagcggattctgcaaagccattcagcatcaatcgtattcgaaaaaggaaaaagactgctacgtaaaatatttatcttatatatattatttgtactaatattgtttaatgttcaatataaataataattttatcaagagccaatcttatgattttgtttgtgaaactaattgtagtgattcagctgaaacagcgctggaggaagatgctcctggactcctccaggtacttagtactggtactattgctctttcgaagttggtacaaaattagtgaaattttatttgtgcaggtgttaattgagaaaggaatatcaacaaatgagatcaaactctatgggcagatggagagtgatgaagctctcgacgagtcttctagtggaagtttttcggagcttgaatcagtgataatgaaggttataaatatttatttcatgatgtttgctgcattattatgttttcatgtttcttacctttcgtgcaacatagtttatgtaatttatttcaacaaagaccttttggaagtttctatatagttttagaaaaggttcatgttaggcctcaaattagcctaaacatgtcactccataggcaacgttaattaggattatggtacctgagttgtctaagtactttgttgctgggatgtaatgttcttaagtgagatgtcaaatacttagatttctactggttggccagttaggagtctttcctagtctagcctataaattctcacttatggggtgatggatgagtattgtgtgattgtttagagtacaagattactcaaggagttttgtcaagttttttttttttttt

SEQ ID NO: 186629 - DNA, 5217 bp, Cannabis indica
aaatggatcaacaacatatatctgaagaataattcaatatggacctatgttctaaagcttgactcgatttggtattggcggaagctttgtcatgtgagagataaatttgacagcttggaggtacaaagtgcaagggcctcaggtaagtttaaaccgcatctgttatataacagtaaactatctcaggttcctttcatttacagcaagagtatttcgagctcgattaatgttccaaagcatcggttcatcttgtggcaagctgtcaatgctcagctgttaacaagagataaatttcctcagttttcgggtctttttggacagcaatgagtgtccggtttgtgctgaagctgctgcatcaaatcaacaccttttctttgactgtagcctttctgaaagggtgattgatcaggtgagtatttggctgggagcaaggccttggccgaaagagtttcaagcttggaaaaattggctggtgcacattagtaaaaatagattatgcagaatatttacctctatcatggttgttatgatttatagattgtggattaataggaatgattgtattttcaatgattactcgagcacagctacaagaattgtacaagatataacaaaagtcatattttatagattaacaatagcaaaaagagggagcttgaataggtatgagaggaagtatatagagcatttattttgtaaataagtgtgtttctttagcagctgagtttgttttcagcttggctttgtttgtaattgtttgtgattaatgaattccttcttgataaaaaaaagaagatgaaactgtggaaatgaaataccgagtttatttagattacgttcaagtatgaaaattttctcacattctactttatctatggtcttttaggtcattcgaaacatttttgtgtgacattgtttgatactccagtagagaaaattgtcaaggtttacggtccttttatgaaagccattaagaagccaaatgaagcttattacggagaaatgattacatactaaactacaagataccaagtttgataggtgtattaaagttgaatgtggtgttcatggcttttccagcgagaacgtttgaaaaatggaaaacccatcaattttgaattctctagtcgtaattagtggtggagagattcacgcaagatcaaaggtgtttgatctcaatcccacaaatcaggtagatagttctactattggtagatatgtttttcctaaaaagtgtcaatgtctttgaatgacgcgccagctagttatgtggaagggaatgagctagatttaattgttgaggatggaaattaaattaatgaagaagatcttacaatcttggagcttaaacgtaaaggctttcatttgatgggccaactgggtcaactaatatttaacaagagatggtgggttgcactgatgtggatagggtggataataataactctaatgtgggctcaaaaaatgagcttttagtgggtgctggtctccaagtccatcgcttatcatgagtattttaagttagaattatcgtggacttggaaacccaagggtttttagattcctaacaaaccttgtggtccataagaagcccaactttatttttgtttgtgaaactctgtgtcgacaagatgttgtggaacagttacaggttactattagtttttatggtgcttttttggtggatgctaagggtcatagtggtggtgttgctttgttatgacaacataaagaaaatgttcatttgttggggtattttgtgtgtcacattaatgttgatataaaaattggagtggatcgtgtaaattttttccagttaacgtgctgtatggagaacccaaccgatgttaacattttaagacctcagatatattacgttccctttcctctaagagtgttcttccatggtgtgtaattggtaatcttaatgacactctctctcacttgaataaaaaaggaagtaatccatatcctcaatggattttggaaggttttcaacgagctgtggtggattgtcaccttcatgatatggagttatttggctatccctttacttgggaaagaggtcaaggtactgaaaaattggatagaagttcgtcttgatcgttccttggtgaatattgattagtctgaaatgtttaattcaactcaattgtttaagcttcaatttcgaatcattgccctttgttacttgaacttgtggtacgtagctttgttcaaccagttcagcattttttatttgaaaatacttggcttcgtgagccaccgtatcttcaaatcgtcaaagatagctggaactcggggataaataaatcggtgggtgataaaatcaagcttagtggtgagaattttttggcttggggcaatttaaacaacgtatttcttcttgtaagaaagaaattagcagtttgaaaaaggcttgtgatccttagtctttggatcagtactagaaggcagaggaaaaactatatgaaattttaacgaaaaaggaagttttttagaggtagtgctctagacaattgtggcttgaagtaggtgaccagaatagcaagtttttccatgctaaagctacttctaagtagaaaagtaatattctttataagctgcaaggtgattcaggttcttgggttgattgtgataatggtttatctaatgtaattctcaattattttaccgagcttttctcttcttttaagtcaaactagtttgatgtggtggatggtatttagccttaagtttcttttaatcacaatgtggaattgctttgtgatgttactgatgaggaagtttgcaaagtcctcttccaaatgcacccagataagtccccaagtcctgatggtatgacttcaggtttttttcaaaaatattggtcagtggtgggaggtgatgtcattgctcaagttaaggattttttccattcgtgtttgcgacttattaatttgagtaagactaatattgttctaattcctaaaaagaagaatccaacaacaatgggagatttgagacccatttcattatgcaatgtgctctacaagatcatatctaaagtacttgccagtcccttgaaagtctttcttcctcatattatttctgacacttagagtgcttttatcttaggaatattgatatccaacaatattatggtttcttttgaggttatgcattacctcaaaaaaaaaaaaaactgcaagggtaaagagggttacatggctttaaagttggaccttagtaaagagggttacatgacgcttaagatgggatttgactcttgtatagtcggatctttttacaatcacagtttctctgtccaatatatggttgctaatgaggggtcgtgagatgggcccttattgtccccgactcgtggtcttcgccagggaaatcctttgtctccttaccttttccttctttttgctaagggcttctctgtactaataagaaaatttgagcgacaaggtgacttaaagggttgtaaagtagcaaatggagccccaattatttcccatattctctttatagatgatagttatttatactatcgagctaatgatagggaggctgccaatgtgttacagttattgagtacttttgaattggcctttggacagaaagctaagtatgctaagtcttctattttcttcggcacaaacattcctttggctactcgaatccgaatttgtggagttcttggaatggcaaaagcggatgaaagcatcatttacttgggtcttccttgtataatgagtagatataaaggtactattcgtggggttacttaaaagacaaaatgcaaagacagatttagagttggaaggttcgccttttatcaaaagcagttaaggaggtgttgttgaaactgtggctcaaccaatttctattggttttatggtactaaattagctacgtagtggaacaattattactgattatcattgtaccatatgctaaagatcaccatatgtatatatattaaatagaatgtaaataaatgaaaataatatttacctctcaaagcctattagggatcctcaaatcttttcgtatgttgtattctccaaacagtgataacaaaactcataccttgatcttccagatttttcaccacacacaaagagtagtgtgggctagtagaagaatagcgtatataaagttcttgtattctcaacacatgagcaacaacaatcttgttgtagcgatggagagaaaaatgtaaactagttaatcttttttgggcatttagaaaagttacgtacatttattaaattttgtattttgatttgaattttttttatacgatatattaaataaactcaataatttttttatttaattattcaaaattattaattaaatcatactaagttatttgaataaataatataaccaaattatcttataggtatttgtattctatatataactgattgatggaatctttcaaccacttgagagaatattttaagttaattaattaattaacccaaaaataaatcaagtgaggacacctatataggtggcgcctacactgtgtttagacacaatctaggtggtgcctccctccgtcttgattgagagaagaaatgtgtcttttgtcctaaaatttatcttatcccaatttatttaattaattaatttgaaaagtaaattatctattataaaataaataattactattgtgacaattcaaaatagatttttccgaactttcatatatagttttaatccttccctttgatagtgtttcaaggtggtgatccgaggaccacagacctataactttaaactccaataaactagattatttattgaatctcatcaaccaaataatcatatttattaattctatgattactccactataaatatggaattgaactctcagtaattatagaattatatttactgagttttattacagtgtccattgatataatcaattccagtgattagctctcattgtgttggttcattattagttttggtcaaattatcattttactcttctaattacttctttatcctttagttttgttaattcactagtgaaagtataatttagatccaatctaaattcacgctaattttagttccagaattaacacatacagggaaccaatatttgatccgttaagaaaatcaggattccataattgtagatcatgtttctaactatccatattattagattctcgaagcagaagttgtaagaattatctt

SEQ ID NO: 186630 - DNA, 2841 bp, Cannabis indica
gaagatctcggggcttatcaatttcaccaaaactagaaaaaccctcatttatttccaaatcctagtctcaattagagaccaagtccaacacattataaatagtagcagtagctaattcaggatacccaatctttcaggagtttaaaactgattattacaactcaaattcacatatttatatattcttaaaactaattacttaacagaataaaattcctaacagaaacctaacaaactcaaacagaaacataacaacactaataactataaaactactaagacaactcagctaagtaaaacaacatagcttagcttagttagtgattcctcttgtcgtgcctcacgtaagttgatagttaacataacttgacattttcgtgcagcactacatatggcttgtgctaatggatatcttgacatcgtggaatacctaatcagtaaaagagtggtgagattcttgccttaccaacattcattgtatttttttatttttcatgtggctatttgttgagttgatataaatggccgttttagtcagatttcttgaagcctttaatttgctgcctatcatttttttatggttcttgaactctgttgtattagactctagatcctctgtgtaaaagcatggtactgtccttaggtttccaataaaagttcatattgattgtttattgaaatttgaaattcaaatatttttatttttttcatattgggagaggagggtttcaacttaggaccttctctttgtgaggagagttgtgaaaccactagactatgcttatgaccacttaaaactcaaatattaagaaccaacttacttttacaattaagttataaaagaaaaggcatgaaagcaggaattatatttctgattattgcaaactaaatttacttcggtttattgttggagataaagaaattctgcaacacaatggactccaatttattttctttcacatgttcagaaactcataaatagtgtctttttccttttctatagttttttttaatggttatattcttcttttaagcaggaactcaatcctactaatgcggagaacaacacacctttacactgggcttgccttaatgggcatgttgaggtattaataaaattaatgtacaatcttttttttttatgctattctcaagttccattgaccaaatttcttccttttatacaggtggttaagaaattgatcttggctggagctagcgtaagtgcacttaataggtaagttttttttttctttttttttttaaagagctcttgtggcaagttaaaatgttaatttggttggtatagttctattatttttttttgttgttgtaatttaatgaagtttatttatggtcattattgttatgggttatgtgtgcagctatgaaagaaccccaatggatgaagcagtgagtaatggtaagatggatgttattgatgccatcaatactgcggttgcacaactagaacttgctggcatcagtgtatcctaatcatgtatagatgtatgtgttcacttcaatcacaagttttgttcgaactaatgagagagctagtaatgccattagactattatttgttggaaagtttttagactaatgtctagtattctaaatagagaatacgccttggaaagaaaatagtgaatatgtacttatttaatacgtgtgttttacaaaatacacctaaaattatctttcctttggatttggtatgatatcatattttggattatttactataattattcaaaaaaaaaagtgtagtattgcaagctcatattcttagaaaaattcacaaaacttgctggtgctttctccctacctgagtgcacacgcccctgggctccaatcccgtcaagcacgtcacggctgttggctccaccatggatgccaatggtctctctccctcaagaaataaccatccaaaactaccatataatacaaaagattaccattcttcaatcacaaagatcataacatactcaatactacaataacatcaaatatattgcaataaaatgaagacaactcaagtataaggtgaagatcatctttctcactagggcaactaattgaaatttgagaaaataaccttgaaattgtctccaaagatttaaggtgagaatttgggtgatcttctatatttaatgaatgagcctgctttgaaattgtctgcattgggctcaccctcaaagtatatgctttagcatgaatcacacaaaggtggattgatacaatagaaacttttggtaaaatgcctaacctaggagataaaatacgttacttacccgttttaaggattggcaactcactcattcagtgacatgttgcttgttgcttagggtatatgatcaaatttcaggttacatgtttcttaagtatttcactccaattctaaaattaaatgctctaattccattgattgagattaagggcaccccctatttagggggttcactagagtttgaaagccttgatcatacttttattctttctctcgctctaaaagttcagcttttatccaaaaaaaaaaaaaatgatcaagattgcttaattttatcatttccttagacttacgtaattactttattatagtaaaagtaattacaccaagacttgaacactttttactagaccacaatattttattattgtaaaagtaattacatcccatatatcattttagtaaaagaaaaaaaatattagataatgctagaaaatatgggagttaaaaataactaaataaataacaataattaatggcataaatacttaagttgaactcccagtcgtaaataaatacctaacgtttaattttttagacggttaataata

SEQ ID NO: 186631 - DNA, 2637 bp, Cannabis indica
caatacaatacggcataccaaaccaactataaatatttttagctttactaattgtaattgatattctaattccatagcccataattttcaaaatgatcatttctttagatgatgctatgattttggaggcctgaacttccaagatgtatttgagagaatgctcggttatggcagatgcctaatgatattttattgaaaaaataacagtatattagcatttatatatttattaatgagtattttatttaaagacaaatttattgataaggatgggtcttaattaatcttctacataccacaccccacgtatatactactaataataataataacatattgttgaagccttattaattctttgttatatttttgttgaatgtgatatagataagtaataatattttggtcacaatcacattgtacagtaagtgggttgtcttcttcatgtgtcaccataatggggaagaggaggcattcatgcgtccatgattaggggacagtttcatgctcaagaggaccctttgcctataccctcataacccaacttagtggccactatatataaatatccttgataccattctataataaaaaaatcaccaagttgcaacattagaaaaattaaagcttctcttttttcaggatttttttaaaagaaaaaaatcttaaaaataaaaattattaatgtttatattggtatatcatgtattttttatgtccttttaaaaaaaaaagaagtagatatttttatgtgtatttttctagggcaatttttgcgagtagtgttaaaaagatatattttaatatatttttttatttataacatataataagtatattttaggggttggggaaaagggtttaacatggtcacacgaacacgaaaacaatacgaattttataggttttggtcaaaaaaattaagcatgacatcgtccacttaacataatttgacacgttttgataattttctttttaaaaaaagaagaaaataaaataaaataaaatattattaataataatataatcatgtaagaacatatatttagtgatttaatgttgagttaaaagaactaaatttaaacaaattgaaattattttttaaaaagtctagttttaattatatatatctatatatatttttaaactacatatacagatataagttttttaatagaactctaaatctatattttttaatggaaaaataggtcaaagtcatgaattaacacaaatatgatacgatttttaatggccgacacgcctgacacaaaatgtaagtacaagtcaaataaaatataaaataaacacgatacaataacatatttttccactcttatatagtagtttagataaatttcaataaattaattgatatatatttcattcatgacctatattataataaaatattaaatgtttatgtttgttttacttaatgcatttgaagggaaatagagaaactttaaaaacatatttaaaacactttaaagcactcatatcaaatgcttttattaaaatagagaacctgttaaaatattgaactaattagactaatgctcaaaattcattatatatttaaagtttctttaaaatttattatattttgtattctatatttatagaatactattcattggtcaaaatatattttactaattattttaaattttaatataagaagcactaattacaacctcttagtcaacctccacacctaaaattacatgtcgaaataattctttgtaaaaaattttatcataacaatattcgttatagttacaattgaagcaatgggtagtattctctaaaggagaatattagttcttcgataagaagtcactaatcattgaaagcttgcgattcagaagtctgcttcaccaaggaagaggttaggaaagtgtcagtttaggttcaacttagacaattagagctgaaatattagggagaacgatccatgacaaaaattgtaagtacagttgggtgaatgatcaagcaacaatgaacatggacaaacttgagtttgccatggtttttaatagagataaatgtgatgaatgattttctaaatcatctcaaattttaagatgagaaggggaagaaaggttttatggatgtctcttatgagtaaaaacccgagaaatgtgatatttgcaaatgtattggacactccagtattgcttgcaaaaatataaaaatggtggaaaaagttaagacaatgtggaaactgaaaatggtagcttaaagtataaacaagaatcaacctccagacaaaggcaaagatgtgtaaggtttcaccgttgtcaaagggaaaaggatcaagcaagacattctagtcaaagtgaaaaccatcaatactatgttttggaggagatttcaattcaataagttcaagttgggaaagtgttctgtgagatgcaatatccattatggatggaggggaagatcctccaccaataaattgataaaattcttatttggcatgttaggggtatcaataaatcttcaaagcaaaaaagatgttatgaagttgattcataacaagaatttatgatttattggccggtctccttgaaacaaagaataaggctcatagaatgggagccttataccttaattagagatggaaatttatac

SEQ ID NO: 186632 - DNA, 4158 bp, Cannabis indica
gctttgtcctttatatctctctttccctctctctctgacacgaaaaaattgggttgggaaacagagaggggaggtgagcaatggaggtggtggggctcccggaattgctttattagcttgtctcagttgaaacttttcaggggcttttgtctttgaatttcgttgtggggtttttacaagaaagttgacatcaatggcggtggaatatcagtgttgtgaaactgggtttttcattcatatagtggtgatcgttctcttggtggtgtttgctggtatgatgtctgggctcaccttgggcctcatgtctctcagccttgtcgatctcgaagtcttggctaagtctggtacgcccaaggaccgcatatatgcaggtaatttccatattcgttttcttcatctatttttttttaatgattctctgtttggtttctcggaaaatattatgaagtgaaggaaacagaaaaggggtaatttgtatttaagtaaatggtagcttcattatgatgtcggacttttggtacttttaataattaaataagaagaactttaagctaacttgtttttaattatatggttcaagtgtttgaccattatagaaagtgtttaatgcaagtttattcattttgtttctccatatgggctacagattagaggattattgattctgtttttgaatgattattattgtgttatttgaccaatcaaaatccatatgtttgatgagccaagttcccttaatgaattctttttcaatttcttatgcctatgaaaactagctttgtctacagaaagaaagtagatgactgtattgggcttgaacaaggttgctagttgccaatcatttgttaccttttagtgatttgttgtttctagtttattactgacttgtatggctattgtatagccattagaaaatcaaattgaatcttgttgttgttgtctctcttagtcttagtattgtgttacatgaatgtgcaaagttgttgctcttgctcataatgaattcttgaccttaatgttgcagcaaagatattaccagtcgtcaaaaatcaacatttactgctttgcacactactaatttgcaatgcagctgccatggaggtacatttactaacacttttccgctatctgtaatgtttggaaatgacttcaaaggttctaaatggctgttcaacctgttgtcaggcacttcctatttttctggatggtctcgtcacggcctggggtgctattctaatctcagttacattgattctcctgtttggtgaggtgagtgatgagtatacatttattttgcaactataggagaagatgacaaggtagctagaaacttgaattcttttgattataagcttcttggtgtatggtgcttgcatgatatcgataagaagtttttatagctgctgattgtagattggcctagttaaactaaatggtagattcaagacactggcatagtttatgcaaagtactagagaatttaggattatttaattctttcctatttacttttccatgctttttctatccattgtcattggctgtggttatgtgtgtctgagattcgagtatttcatgtacttgtgtgatcagattataccgcaatcaatttgttctcgatatggtttggccattggtgctacagtagccccagttgtccgagttcttgtttggatctgcttcccagtggcatatccaattagcaaggtagctagtttcttcctgttatgttaatctatataaagtgatacaatcaaatgaacaagtcccattggtttctctacttgtatttcccagcttttagactatctgctgggacatcgacatgttgctctatttcgcagggctgagttgaaaacacttgttgatttgcatggcaatgaggtgtgtacaatttctttcgatattttaaaacttccacatcataacctacgtcattatcgtttcaccattttaccagttgaagtttgattgtttaactgtttagtcgactaattttaattgtacaacttattagatgcatattgagggaaatctaacagtctttccattacatctaacttttgatactatgtcatgttttaaggctggaaaaggtggagaattgacacatgatgagacaacgattattgctggagccctcgagctctctgagaaaacagccggtgatgctatgacacctatatctgatacttttgctattgacattaattccaagcttgaccggtatgatattgttcataacatacattagaaaattgtcctattttaattgtccaattgtcttatgagctggactaacacttgttgctacacaggaatttgatgagtttgatattgggaaaaggccacagtagagtgcctgtttattacgaggaacctacgaacataattggacttgtactggtaatttcttttcgaacttctgttactcatgaatgaaggttcaagtcttatttcgaatcccactagaaaaattccaaattatattaggtttattctttatattttcatgatgtcttctcatctgttcatttgcaatttaggtaaaaaatttgttaacaattcacccagaagatgaggttcctgtgaagaatgtcactatacgtcggattccaaggcatgtatagttgatggaattgcattcgtgtaactcaagtagattcgtaaaaatgtttagtagaattacatgatatgcatgtaacacgaaacatgaatctgattttctgctaccttcttacagggtccccgaaactctgccattgtatgacatattgaacgagtttcaaaaaggtcatagtcacatggctgttgttgtaagaaatcgtagcaagatcacagaggaatctcctgggaaacctgctgaccgtaaaaaaccagcttcctttataatgcttgtattttctttgtcttacaataataattggttggttctcatgttctctctctctgtctctaaatagattcagcaaaagatgtaagtgtcgacattgattccgaaaggcctcctctagagaaggtgttaaagagcaagcgatcgctccagaagtggaagagctttcccaacagtggaaataattcatataggagtggatctaggagcaagaagtgggcaaaagacatgtactcagatatactggaaatagatggcaatccactccctaagcttcctgaggaggaagaagctgttggcattataacaatggaggatgtcattgaagagcttttacaggtaaataggaaccactcaaccatattacctaatttgttttctcccacactttcccattcatgggttatacctacattatatttctgctttatgtaggaggagatctttgatgaaacggatcatcatttcgaggactcatgacgttggcctctgaatgaatgtgagtacatattatgacgaaaaacagaattgttgtatttgttttggccactagagaggtagtccggaatcgtacttgaactatattgatagcccttttgggggttgagaagtgaaaacacaaatacatattataaactctagtgcagttattatctatagtaaagctaccaaagaaaacaatctttctaggtaacatgtaagaaaggattgtgtagtgtatttcagagtgttttagagtgaaatgtttacttatgtttcttctctttccacattgccatcactggtgcctaaattgtgcttattatattcttgcttgcttcttttctcctcctttcacctctatttattgttttattagttctttggtaatttatcatcattaaatttctcatttttattctagaagaaaaattaccacaataaaaaaaagtttaacatgaataagctgctgaggctaaaagatgctggtacagtttggagtcttttcaattctccattatttttctttttaatgaagaattgaaaatagggatctctataatgtacttttgtttatgtattgtttataattagagcattgctattgggcaccagtagtgtctaacatcttctataagtgttatcttgtatcttgtaattggttagtgatattccctaaaatttattttcttaaattatatggaatctgttatttaatacaccatagtgttatcacactaaggaaggtgttaggcactggtggtactctttagcaattctcttat

SEQ ID NO: 186633 - DNA, 3118 bp, Cannabis indica
atgtctaaccaaaacaaaatcaaggactcatgtccacaatcgtatatttatatttagcatatattcttcagcaaaatatatatatatataatatatatatttctaaaaaagggtatatttatgatctcctattacaccaacagcatacctgctcccgtctatccacataagcctgtagaagttctccaatataatctataaatttctgaaagcagccataagaacaaatattgagaacaactgaacaagtacagacaggagaaagtgacgtcaacaaggccaatgcaaaaaaatcaaagttaccatagcatttgatgaaagaagatcattttctgcttcctttattggcaaaaaaaaatggaagtgtgtgttccaagacagtcatcttttcaagaaatgacttgctctcaagcacacaatgatacaactcgcaaggttctcctgcaaatcattttcataagagatcagattccccttgttgctaaatgtcacaatcatgtcaataaccttagagttcatgtataaaatcttctagacaatttatgttgtacaaaaattatcacaagcagttgaaatatcaacactacagattttcattttgtcttgtcagttgggttcaccacattcttaagcttcaaggtatttcttcctaataaattttatctatggacgtagcccgtggactaggtttattgaaccacataaattttttctgtcatttagttttagtaattttatttctgtaagcattctattataccagtttgtaaatctgatcaaccagagataaaaactgttataacagattgacgttcaaataacttgtacagtattccgtatttaataatcacttggtaactactacaaatgggactttcaagctataagtgacttatatgctggagatgaaaagatggtaccaaatgacccaatatcttcaatttgtaagagactttgataagaaatggaagtttatttggaactgcagtgttttggcaatgttgcaggaccgttggttggagagaatgacaggattttccagggtagaggaaatattgaccatgtggagtgggatttttaagattatggcgttgtataaaaaaggggtttgggccaaagtggaggagacgaatcaagagatgcctatcttcagtatcccattctattttcatttttcatcaatgggaagcctagaaaagggaataaagtggatgacataaacctgacaacaggaaacataactgaatagttaggacgtttaacataattagttgagataataaaaatcatttcaatgttacctgcaaaagatgtctcatattgtattccaattcttgccccttccaagcagcaaatcacctgaccaaaaataaggtaagcaatcagaagctagttcagaaaacattactgcaaactgctgtagaataaggaaataagttgctaaccaatttttctataatcagttacacttccataaaacaacattatgatgagataacttaccttcacttaatttaaaaatattacagcattgcactagtatttatatttaaccaaaaaaaaaagaaaaaacaattgaaaatataggctaaaaaaacattctagtataaatatatatagaaaaatagatagataattgataactattatacaagcagtaaatcaaggccaaaaacctctattaactattttcaaatttcaaccatttaagcccctccaccaagtaatcttattaacaaactaagttgcaatcccaaggagtacattcacctcctctttccatctctgactaacaaattatttgctttctcccacaaaatctgtgcccagtccaagaaattccacatataattatgtaacatagttgtgagccctccttggctgttttttctcccaaaatctaccattttccatgattgaaaccttttctgggataagttaatagatgatcactaacccctaagaaatgcccctttgaaagcaaatgatagagaaaaactataattaacttgggaagaggaatatgtagccttgggtttgtattatcttagtcttggagaagagatgcatctctaaggtgatgtacgacatcctgattcaacatgccagaattattaccttacttccaactttatacgtaactttttcctgaacaagaggacttgccaaatcatttgtgtctcccgacattgcctttctgtctgcctccatgtgaacctgattaaaatccaaatcaactgtgagatataattccacattcatcaagaaacatgaaagatgaaaacgatcattaacatcagcagcctgaatcatgtaatcataaatcaacaacctaaaccatattcaaattatcaaaatgaaccaaagtaaactcaaacaatgcaaaacactataatactgtacccgttctcttatggtagctaatagcccatcattccactcttctccatctaaataaatctctaaaagaaaagaaaaagataagaataatttgtcaaactaaggaaaagaaaaatagagggacagaaagaaaagagaactatgccaccaatttatgacccgacaatccagaaaggaaaagttagcttttacgtgagttgaactgctgaattcaagctaatttccacatttgtatgagctttcaaattatctctaagttccataactctaatctgtacagctaagaaccactggatttgagaagctcatttataaagctaccttgagtttgagaagatcgagctgcttcaaattcattttgtagacgctcaaaaatcatcttgtcagaatccctattgaaatcaatgaacaccaaaatgtagtatgagtttaactactataattgcatcttttgcaatctatacattgtttaaacctatgatcaggatattccagaatacttaaaaaaaaaagaagctagaccttgttgaaagtaatgtgtaggtttccaccaaaatataatataaaagttctcaccaagcaattatattgtttgatattttaagtacaaacatgggaatgctttaggcaagttacctttgtctccacaaaaaaaaaaacaaaaatgtgtgtttgtagaaataagaaataggataacgatacaaatgaccaaaaggat

SEQ ID NO: 186634 - DNA, 3010 bp, Cannabis indica
ttctgctgtcaaactaaaggtcatactgttggaccccatttgtctgttgcccttggatgttggtattgaaggttccaaggcctactcgtaatatgtaactcaatcatgtcgccattttatgacttattaatcagactactagaacttgttcaataacgacactcctagcaaccacttggcaagaagtatagatctcatgcaatcaagtagtttttcaactttcttgttccatcataccttctatttttttctctttctaacttcatatttcatgcaagcttcttttctggcatacatgggtcatcaaaaaaatcttctaaatttaaaccacctaacttggagctttgtaaggctaatgaacactgcgagttgttgctactcagtggaatgatgctcaaatagagatcactcgttttaagaaaaactttgaagatttagagaagtccgagaaggaactaaaggcagaagttgtcaatttgaacaacaactactcgagcccacccaaatagaccttgatgaggccaaaaaagatgctcgtgcaagggttactttgatggccaagtgctccatttataaagcttggttagcgaacaaaaatatggacctcaactatgtagacttagttttaataacatcatattttgaacaatgaccttctgaccgagacaatatctaaccctttgtgtcatttttatttatgtaattaattctattttgctttgtaagatggccaacttagctttaattacactataatttatgtcatttctatttatatatattttctctacttttgtgagaaaattttatttgagctttcattatgttgaatatgttatcatcaatgagtaagttttatttacataactttatccaaataaatctttttgttttgtttcagtattcgttaatttatcaagtaaagagcgaacttaaatattttgaacagtacttgactgttttgaacatttttgatcgatcatgtgcgagtagttagtgctccatctacaccttagcttgtgtactatttatcaagactcactatgggatcttgtttataatactttctatgtatgagagctatttttattcagatcgcatttagcttaatatcgtttgcaagactttaataatctcatttacagcaaatgctatttttatttctacttaagaaagatttaattttttttttttgctgctccagaccagttttaatcaaatattttcatctctttttttttattttgtatttcgaggcattgtcgagcctaattattatacatttctaggcactaccgagcctagttattatatatttttaggcactgttgagcctagttattatatatttctaggcattgtcgaaccttgttaatatatattcatagtcccccaagtaatttgaaagaaatattttataattacttaaaataagatgtcttcattaagatgaatcacttttacacaattaataaaataaaatagaattaactactgataatagggccttaagtgctcgtcgttctaggtgtctattattagcgagccagggagccatgttaatttataaactcatgttcctataactacttctacaatataggggccgcccagttagggttaaatactcttattgcagggccttgtgtaatagcaaatacacttcgcaacaccaaatctcctactttaaaaagtctttcttgaactcttttgttaaaatatcttgtgattcagtattgataagcaacattttatgatttgtgactcagtgcacttttcatcgagcagatctaaggagaatttaagtagttcttggttttgttcctggtcgtaaaattcacgtatgtgtgtcgtaatgttaacttttactggcaacatagcttctaagttgaatgctagtgaaaatagagtatgtctggttgccattttttctatcgttcgatggggccaaagtacctgaggtagctcttctatgttgtttttatggtactaaattaggtacgcaacgaaagagtttcatcttatctgattattattgtaccatagcctaatggatcttcatatgtgtgtacattaaatcaaaacataaaacaataagtttagaacacatacctctccatgactatgaaggtatcctcgaaacttctcatatgttgtatcatttactctatatgatgaggataatacaattgaactcacaccagtgccttccaaatagatccaccacatacaagaagtagtatgggctattaggataaagtgtatatgttgttcttattgaattctcaacaaaatgagcaagaacaatttgagagagaaaattgttttctttttctcctatgtatttcaaaaatagcagtgtgaaaagctttattaattttaaaaattatgttgttgaaaatcttcttctaatttctcaaattaggcttttatttatagtagttaaattctattaattaaatcatatttaattatttaaataaataaatatctataacaaaattcagttactaatagttatgagggaatctctcaaccacttgagagaatatcttaactaatttgaaatatctttaaccacttttcaaatttaaatatttatttgattaaattaataaactcaaaaagacaaacctccatagggacagacgcctaccatgtcttgtttaagataaggatggtgtcttttatcctgataacttttgtctcaatgaatattttcttgacaaattttatcttaataatttttgtcttttctctatttaattaatttgaaaaattatttattgattacaaaaaataaataattactatttttttaatttaaaatagattttttcgaacaatattatactacttttttccttcccgtaatagtattttaaggtggcaattcggggaccatggacctataattctaagctccaataaactagattattcactgagtctcgtcaaccaattaattattgtttattaattctagaattaatctactataaatatagaa

SEQ ID NO: 186635 - DNA, 2533 bp, Cannabis indica
atcatcaaaacaccaaaccatcccatgtaaagacatttttcggtgctggttatctagttacagaaacgacccataggctttcactttcgcgtctctctaaaattaatgaaaaatttgaaacaaattaaaatggtatgctttactcagatgaaaaacgattacgtacatggccaataataattcattcccacagagattaaaattatttaatacagtagaattttcaaccattaaaatccaatccatgatacattttctccagtctcccttgtacacagtgtacattatacatctatatatatacgattacgattacgaaagcctactattagagctttgctacctaacttcaattaagtaaatataatataattacttttcacaaacccaatcccatatttagagtaaaacaattgttttttccttcttcaagtcacaataatgaacacagaaaaaaaaaacaaccaccctttattcgtttaacattcaggtactgccaccagggtaggtgcagccatcgtagcctgcaaaatcccccaaaagaaaaaagagaattattattatatcagaatcacatacgctaaagtaatgcatgcttatcccaaaaaaaaaaaaaaaataactcactgggattattggaagagagagtggctgtttgggagaaatcacaattccatggatcgtgaccagctgtttggtaaaggatattcatggcgtaggcagcgtgggaggccaaagtattgggctcaaaacaagcaccgcccggttgaattggaccacagtcaaatccatgtccacaaacataatctatgttagcctgtaattgggcatctgaaacacctgcctttggaacacaccaaacagtcttttttgcctttggtgatgatggagtcactggtgtggtactgggtgacgacgatggggtctgagaaaaagtaattgattgttaacaaaaacgacaaacaataatgaattttgtacataaactacgcattgtaatcagttgttaaacttgtacatttgtactgagtctagtctactgacctgggtgctggttttagaaaggccaacgtcgtaagtcatggaaagatcgggtttgaatagaccaaaagcacgctctgaacccgggccaggtttcaagtcctcatcgtacagagcaaataagtaagtatcgactgatttcccaggcatcaatggggttccaaccatggaacggaggtgggcaatcaggtttccattataggctttggcgttttcctcacttggaccaacctcattgctatctcctttgtaaggccaccctgtctctgcaacaacaatctctacatgactgaaccccaatgagttcaatgcagatcttatggcatccacctgaacaacaagatcactgtctctgttaaagactttagtctcattcaacaagaatagataaagaacctcagcaaaagaaaactctacctgagcatcaaacatgttcatgtacttgatctttgtgttggaatcgacacgcccagcgttaggttggaagagacaaaacgccagcgtttcgggtcttgggtcgtcccggtaagcgaaatacgggtatgggttgatcgcgaaaggtgaaccggtagcgttattgaaggataacagacctttcaacgtctgaatatagtccgggtggaagctaccggctgatggcggctctgattgccgaagcacagccatggaatgtacggtcgagaccttgacttttccacccaatgatactgaatcgagggcattttggacattctgcacagccggaacgagctggttcacaaggttctggtcaccggaggtcatgacttcgttgccgacagttatcaagataatcttgctggatgggtagaaaggaactacatttgagttaacccaatttttagcgaaattgggatcggaagcaagtgccggaatatcgccgttagcagcaccaatgacaattccgatgccggtgttggcaagtgctttgataatagccgggtccgatccatataatcggaccttctcaattgaagtcgactgaagtagctttgctgtggctgacggcggtggaaggttgtcggcgacttggccataatttacaccgatgaatgactgtgattctacatcataacggttttaatcagttttcaatttaaagaagaaatccatatgttttagtttccttcctccttcgttttcttttttttttcttggctaccaaacaaacagaaacccaatccaaaaagaaaaacaccatagcataaaataattaagcattaaaactaaagctccactgattcttgaaacaagagaacagaggaacccaatttcagaaagaatcaactgaattgaaaacttacttgcaagattaaaggtgagcaagagggtagcgaataacaaagctgtagtagtagcataagggagtgtgatcgccatagtcgttgaatcaaagaagactcttgtgttattctgtttctgaccagaatgtgagaattcctggttgagagcgcaaagataaaaatataaagac

SEQ ID NO: 186636 - DNA, 4042 bp, Cannabis indica
aactatttgtccatctattcttgcttgaatttgatgcactctacaaaatcatttcccaaaaccctcacaaagcttcaattacacggacaaccctacaacacaattaataagaaaaacaaatcatgctcaccaatctaaatgctgtctcaaaaatatacaagattcttaactttttcaaatgtcatcttacttctgctaaaaattcgaagaactagttaggaactgctagatcctatacaactgaacttttttcttttttctttgtgtgtttttcccccctcctgattgagtcaaatcagtcaactggaaagttctaatctcatccataactatagctctggtttcaagcgccctggagaatcaacaagatatattgcagttatggttagaaatacaaatgacagataaaatgcattcacagttcgataaaaatgaagagaaattagtaccatttggtcccaaattgtcaatagaagcagtagaatcatatcccatatgaaaaagaccttgaagttcattatctagaactgcctgcaagtaaaacgaatgtttgtttaagattattggcagaacaggagtttatatagtaattgcagcacagcttgaagattcttaacttacctgaggcaaagaagcaaattgctgagctgaactcggtatacttggaaggtttgcctgaaagattccatgcggataatgttgagaagaagagcccattccggggcctagcccaaaaatagctgcgttgctgcctcgcgagttgagaatctagacacagaatgatgagtaatatgaatttcagacgtaattgttgttagggttcaacacttacgaaaagttacgcgggaccaacctggcttgcatctttggatagaagccgctctatatcaatgttcagttctggattcacagtcgctagtttcattgacaaaaactgcagtgaggtgaaaataaaagagaaccatttagaacatggttgcgttcataagggtacttgtttgcttttcaaatgtggaagtaaaaacagtaaggtggtatgcaaaatatattttccttttctttcttattaaatctgtgattcagcatggtttgctagaagttaagtagtaaacaacctataaggagcaactaagaacttgcaggagtatattcatcagtagagaaactcaaaccagaaaaagggcaagcatccgaaattgtaatagggaataaggataaattctctttcatgacgctttccaaggataggggaacaaactaagctggaagtaattagcacgaaacttaattttatgaggactaaaaacagcatagcattaagagtaaaattcctcaatatagattcgcagaacaacatacctcgacctgctgctgcagcgactgtacatagttgatgatctcatcaagcattaccgcctttcccgtaatctaaaatgattaaatggagtattattcagcactaagaatgcaatgacagaccagcactactcttgaaagttttatagtttctaattatgtaccttattgcatcctggaacaagttcttgaagcaatctcatccgctcactaattttttctcttctcacctgcaattggaaagaaagttctattgtctcacagtatatatggaaacaggaaggaatttgcttattatgaggcactgaaggagaacctaccctttctgcaaggctatgactattggtagcctgacccctccgggctctcacatgaatgtaattatccttttgagcatctccactgttagaactctccttagcttgtttacctgctgctgctgttggcttactacgcatatttccgctagtaaattcttcagttttcagtttcttctcatccggctcctttcgaacattggaattatctccagacagatccatttgttgttccccttcagcattctatcaaagaaaacaataaaatccaatcctttgggaacacaaaactaaagaaaagtgaaatcaccaaatagcataattgaatttcttaaggtacacatgatcttaccttctccggactgaggggaaagcataaatcgggaacgcgttttcttctttttccagtaggtgaggatcctatggcaccatctgaaatctggcaaccatcttgagattgtgtcccaattcttgatgtcctctcactgcctttctctttgtttagtgtgtaattttgaggacacccattagtattactagcaatctcagcacactgaggcaagccaaaagaaccaaccatttctgagaaccccgcattgtcaaagcacgaaagctttggcaccatctcaacgaaactcgaatcggatggatattgaactagctgggagttgctactcatcccctgattttccaacgcaacagggtatgagggattgcaaaattccccatgagaaatcactgaagaacctccaaaattctcactctgactcaatgaaacaagtggatcccaaccagaaggaaagaaatgttcttgtccattggaaggtttaaacatagtcagggagctcaatggtattcctgaaaccttttcaggaagggcgtttgtgctcatccctgaagatggacaattaagaaagtgacttctatgttgaaaccccacatcctcgttctcctgaccgctcatctcttcaactcaaaagttctgagaataaaaactctcccaaaatcaacggagttgcactatacaaaggagaaaacccagacaaacagaagataaaactatatacgaaacaaaaggaaaagtgagttttgactaaagttgataacttgcaggaatcaataaggggcaagtaaccttgacagctttattaaactgatggggtgtaaaagtaaaagaagcccttcaactgtagtaccctatagacacaaagtgaaatgacaaataacttatttcattcagaaaccataggatcaaactactcaactgcatagaaggaagaaagaagaaaaataaatgcttcccacagacaagaaagtgaacctttcagagcataaagtagacataggcaaacaaagacattagctaagtaacagctcagccgagtagcgaaaagaaagcagataccctttttcctttttgtttagaggagaagaactaaattttcataccttctaatcgatcaaatacatcaatatgattgacgtaaacgtttgaatctccacaacaaggacacaattgaagattactacatagatttacgaagaaaacaaagggtgtttaattccgtaggaataagtctcaagggggttacaacaagttgtttgttagtaatagatgttccagaaccaaaaccaagaaaaaggggtatggcaaaaacccctttcaagatattctcaaatgggtacccaataaagaccaagaggcatcaaattatacttgaattgtgtaagaactgaaatgggcaggttgtttagaacagtccccctaattggtcttttattgtaccttcaagagcatcaaatgcttagctaaaattcggctaagaaaactcaatttcatcaaattgggtacttgcaaaaacaacaaagaaaccatcaagttccaacttttatagatcacagaccatactcaactcaccccaagcctagctagagagagaaaaacctaaaaaattaaaataaaaaactcaaagattgagaccttgcttacctgctcaagttaacaggtgacatgtatgattttaaaagacagactaactactgcgccaactgcccttgttcgaaaaattattacagaacctaatcttttttcctcccacactttactgtttcaatttctctaactttctctctctttttgactgaataataatatagtataactctattgttttttttttttttaaagtaaataaactttcagagtagattggagaggttcttctcttcaaggccaagcttgctaccttgcttgcttctttgacatactttatttttattttttactgacacatttgccaactattctaacagacctctctttgctgttacacactcatttttctcagtgccaactaaacctctttcat

SEQ ID NO: 186637 - DNA, 4362 bp, Cannabis indica
aaaaaaaaaaaaaaatgtttgaaatttgagctcctctattattgacttaagtcttttaattttatttatttattaaaaatatcataattaatttactctaacaattgtgattaatgccataaactaaggattttagtttagttcagttttttaaaaaataaaaaataataaatgtacttaaattaggtagtaagaatcttcgattttatttagattaatgctttgaatgagtgttaatgatgataagagctaggttaagcttttttagagtcttaacgaactttcctcgttcacctactatggtggctttccctctctcttatcatcattaaaactcatttcaagaattaatctagacaaaatccagattcttactacttaatttaagtacatttattattttttatttttaaaaaaacctgaactaaaactgaaatccttaattcatggcctttaatattcacacaatagatatgaaatctcgcttcttttattttaaattgattttggttccgtctaataatttttctataataaaaaaaaaatgaaataattcacagaagtactttattaaacaaaaagtgtacttaaaaaataataaaaaaaattgtgggaaggactaggaagtagtagtaggacaaaggcaaagcggcgtgagagtaatattattataaataaaacatctatctgtgtaaccgtaatttgcagtgcacgttatatttttctgcttgaagagaaaaaaattgataaagaaaaataaaaatctgtgggatgaatttgactctttggttctccattagagacccgagaatctgagctttttacgagttgggtttttgtttgtttgtttgttttgttttgaattgggttgccttttttttttcgtctagtttcgttaatggcagatgaagtggtgatggaaaatgacccatcatccatggcggcggagaagaagactgtggaattgaagaataagttgcagagattggttaaagccattgtagatgaagaagaagtagaagacaaggagggcaacgacacagacaaagttgaggataaagctttgagggtcttgaattctttgaaggatttgaaattgaaaaattattcgtatgatgacagtcttgctgttcctgaagaattcaaatgtccaatcacgagagaactcatgggagacccagttgtcttggccactggactggtcagattctcatctttttctttctttctttttcttagtgtttgcctgccattttcgccgttcagctttaatgcttttgaacctgattgattaagcatgcaaactttaatttattgtcgttatattttctttcttctttaagggtttttctctcttacttttgatcattctgcttctgtagtttttggtttgattctaatgaaattgcatattcttgttagtactcaatggatatatgattctctgaaatcactctgttattttcaaccttgggaatttggaattgaaactttggataattctttctgggatattgattctttgaacttgcatcataggtccaacaccacactgattcctcttaagtcactttgggtttgctaaacaaatttgttgttttctactgtataattctttttgattccttacggagcctaatttccatataattgattgtgatgtagcagcatatgtacaaagttgattgactgtaaaaaagaaaaaacacacatcttccttaactctaaagtttcaaagactagctagctgctaatcaaattgtttattgtaaaatggaggaaaagggtttttactgtcaagctctaagatgataagccatggtgaaatttttgtgtgttgtacctatccttgatggtctagtctttggctagtcatatttcttggtttcttgatgataagcatttttgtgttggatgttaattgtgttagctgtcaacttcaaattttcaaatcttaataatttaccttttacttaataatgatttttttaagtgcagacttatgatcggccattcattgaaaggtggttgtgtgaaggtcacataacatgtcctcaaacccaacaagtactctctcatactggactcactcctaattacttagttcgaaaattgatttatcaatggtgcattgagcgtgggattgaacctccaaaagtctgccaagatattgatgtgatcgtgttaagaggggatgacaaacctgacataaaatctctccttgagaagctatcgatgttggaatatgatcagaatgaaacagcaaaagaaattcgttctctatcaaggaagagtccatttactcgggaatttttcggcaagtccacagaagcaatcaccaaactgcttggcccactaacaccaggggaggctgataggaatcctgatctacaagaaaatataattgaaacacttcttaacgtttctatagttgatcagaacaagaaattagttggggaaaacacattagcaatcactctgcttgttgaatcaatgcaatgtggaaccattagaaccaaaggaaatgctgctgcagctctctctacactggcagactatgattccaacaagattattataggaaactccggagctattaagcctttgatcaatcttttagaggaggaggaccaatgtgtggttaaggatgctgcttgtgcactattcaacatttgtacctgccatgaaattaaacagaaagccattaaagaaggagcagtaccagtgcttgtgaaaaggattcaggaagatgtgatggtcgaaccgttgttttctatacttgccctgctttctgcccatcagttggctgtcgatgaaatgaacaaggttaatgtcatgcctttgttgcttagcattataagacagaatacttgtgagaagaccaaggaaaattccatttctataatccagatacttcttaacaatgatcggaggaaaatgagggcaatcaatgttgaggaagctaatcatggtacaataaccaaactttctcagactgggacttcaagagcaagaaggaaggctgcaggaattcttgagaggctgaaaaaaggtgctttcataacacatactgcctgatatgccccctccccctcaaagttagattcttagacaccctttgtctatattcatgtcaccactaacttttttcaatccaattatatacacaatacatgataagttgaagctattggccctggaaaattcctgtgtttttcttaagagctctcttttcatgtatcagttattgtatagatcaatccagttaaaaaaaaaaagccttttaacacatctgtagaaaaatatttgatttcattcattttgtacatagttttggcacttgagggttatagacaagcaaaagatattgtattttcacttctttcagtaataaaagtgctacataattatgagtcctgatctgttttctctgtttcaaatgtttccttgttttcttcttgtgctgacatctctctagtttggggtagccttttgaaaaaggctacttatgtttacttggattattatggtttttgaaactcttgtcattcaagagaattgattggtcactggtttggacctacatcaataacaagaaatgtggggtcattcattgttcttgtcatcactaccaacctttattagtgtcggcaggcttatcactattttctgatgttttcattcaattaaactctgtttttgtttagtaagactgaaggtagtggattaagttccactacaaagttttgatattgacatttttggagtgtggggtttagggggtaagaacctaataacaatacaaagtgaaaaagggatgataaaaaaatggccttgctttcatttctggctaatgttcattatccaaaatttaagataaaaccataaaaattcaaaaaagttaggtacttccatggactttgttatctttcttaaatgttgatttttttttaatgagttccaaccaggaaataattaaggaaagtttctttgttttaatgttgttttattctattaagacatagtatttaaataggggatatattgccatgacatgagaatagtttataataatgataacgacaatcccattaaatagacattttcatgcttatttgtttcaattagtgacaaaacaagacatggttagatagtgtgctaatttgatatttctcaatcacaaatacttaaagtactattattgcacctaatacagccatgagtttgacattagtatttgacaagacatggtaacgaccttttataaggcataaaattagtgcattcataatctgcaacatctattttttttttttctggtgaagattagctttcaatggttgatgtcttaagttttttttt

SEQ ID NO: 186638 - DNA, 1877 bp, Cannabis indica
ataaaaaaaaagcattaaattaaagatatattagatccttattttttgggccctttgtagtagccagcttgcacagctatagagttattttcactattcagggatcgaatttaattttcatgtgagagccattacgctgttaaaaactacttataatcttcacaaaagaattatacaaaaaactcacttgtttagaatcttgtgatcttggtatttgtaagagtaaaatttagaaacttatataaatctctgtcatttattgttcttagtaattataatttatcaaaaaacttatttatcaaaaaatggagatcaacaataatataaccaatgtgctatactctactacctcaccaaaaaaaaaagttgcacatactctaaatagttttaagttaaaatttgtaacaattattaatattattattttttctgttatacactaatgatcaaatattgtacaggagaaacagctcctgcagctgcaataaatatatgcatatatttggtattaatttcacgaaaatgaaagggagaaaatagttatagaagaataggaataggatcattgatgattgatcatgaagaagggagcattaatagaaaatgaggttgatggatatgaaatataagaagaagagtttgatatgagttgatatgatatgatgtggtaatgcggcatgcatagaccccatcaatgcttctgtccccccaagcgtgcatcttaatactactactcactccactctactccacttccctctcaatcatattccaattttttcttttattactactaaaacacacttaaaaaaagggtttaatttaatttctttagcatttaacaccttttttctttgtttaaataaaataaataagtaggagagagagagaagggtaataatggaaaaaatgaaatataaagaagatgatttgaaggagaggagaagggttagatgtctcggtcagaagccggcaaagcgacttcaaatgccgctttcttgtcccccaatcacatttgcttcccctgttttcctctgtccccttcccactctccctctatttaatgctcctcttaactttcctattatacccttttctttctttcccattttgccctttctttcattttctcgcctcccaaacactactctccccatattcatcattattacaactgttatatatttgattctaaattaattaatgtatttatttattttagagagaaaaaaaaataaaaagatttttgaggattcggagggacaaagagtggttgaaacacagtatcttttggctaaacaaagtgacatgtgtctgctcaactttgtaaatattattcttattagagaaatgtcaaattttagtactacttacttattattattattattattatttgtcactatgctaaagttactcatattctggacaataaagtaagaaaagaaaaaaggagttaaattatacctccatacctggccaactcgctgggaaacataaatgaatacgtactataatttctcatcatactttcactgatctctcttttttctgtttttattttttaaaaataataaaaaagctcatcaatgtctacactcaaaagggagaaagattaggattaaccacaaaattataactctttttaaatgcattaacttatatgggactgttattaattgcaaaacttgttccattccataaacagttgaaccttttatgtttccgtttcttaaaaagtattcattgtttgattcaccaccctaaaatgttcatatatagcatttaataagacataagaatataaatattaaaaactatgtttttaaagataagtatggtgcactcaaatatgacaagtttttgttttttttttt

SEQ ID NO: 186639 - DNA, 3745 bp, Cannabis indica
catgccttcattgacttaccttgatttatacttgaattttttcaattcaacattccctgatttcatatcaaagtgtaagaacttaactttcttagacatgtctcaaaacagttggactggttcaattcctgaatctgtgttttccaatcttgtcaaactccaatctttcaatctcaccaatattggattcaagggtcatttgtcagccaacatttcaaatctttctcagctcacacaccttcattttccaaataactttctcagtggtgaaattcctcaaggaattggtttgttgcataatcttgaggttcttgaattgtataacaatacctttagtgggagtattccttcttctattggtcaactcaagaatcttttgactcttgatcttaggatgaatttcttaaactcaacaattccttctcagcttggttcttgcactaagctcagttacttggctttggctgcaaataatctcagaggggaaattcctttgtcattatccaatctgaatagtctcacagaaattggtatatcagataacaaactttctggtcctctctcctctgaattgatctctaattggacttctctcacctcattacaacttcaaaacaacacacttagtgggaaaattccaaaagaaattggcttattgaaaaacatcaccttcattttcctataccagaataacttcactggttcaattcctactgagattggtaacttggagcaacttggaagcttggatctttctggtaaccatctcacaggtccaattccaaagtctctatggaacctcaaaaacctcatttctatccaacttttctacaacaatctgaatggaacaatcccaccagagattgaaaatctagaactcctccaaacttttgatgtcaacacaaaccaactttcaggagagttaccagttaccatttccagcctcagaaacttggagggcttctctgttttcaccaataacttcaaaggaaaaatcccaaaagactttggcaagttcagtcctaatttgaatgtcattagcttttcaaacaacagcttcaatggagaattgccaccccatttgtgcagcggtttaaagctcgaaactttaactgtaaacaacaacagtttcaccggatcattgccagaatgcctgagacaatgcaccaacttaaccagagtcagacttgaccagaacaatttcacagcaaacatcaccaatgcctttggttctcaccccaaacttgaatcaatcttttttgatgataaccaattcattggtcaaatttcaagcacatgggaaaaatgcaagaatctcaccagattgcagatgggtcgaaacaaaatctcaggtaaaatcccatctgagcttggaaacatgaaaaagttgcaatatttgagcttggaatcaaatgagctaagtggggttatcccaactcaattgggaaaccttagtctcttgtttgtgcttaatctaagcaacaatcatttcaatgggaacattcctagaagcctctccaagctaacaaggcttgaaagttttgatctttcttcaaacaatttttctgggttaatcccaacttggctccaagattacagaagcttgtcaagtttgaatcttagtcacaacaaattctcaggagaaataccacaagaggttggaaacttggtttcattaaaatacatgttggatctcagcagcaatttgttatctggagaaatcccatcaaacttggtaaagctttcatctttggaaatcttcaatgtctcaaataatcaactcagtggtgaaatcccatcatctttctccaacatggtcagtttagtttcggttgatttctcttataacaacttgactggtgaaattccaactgggaaacctttccaaaataaaaatgctttcttgggaaactctggtttgtgcataggagaatctggtggggtcaacaacaaccttaatctgaatctttgtagctcaacaacaaacgacaacaaatcaagcaacaacaacagaacaacacatattcttattggggttcttgttccaatctgtgctttgataatatttgcaagtgtgacagtcataatttgcttactgagacagaaaaacagactccttgatgatgagaatcaaagctctgaaaacaacaagtttgaagaatcactgatatgggaaaaagaagggaaatttactttcagggaaattgttaaagccacagaagatttctcagagaaattctgcattggtaaaggagggtttggtagtgtttacaaggctgttctttcttcaaacactgttgctgtcaaacgtttgaatgtatcagattcaaatgatgttcccaagagttacagacagagttttcttaatgagatcaagactttgactgaagttaggcacagaaatatcattaagctatatgggttttgttcaaggagaggttgtatgtttttggtgtatgaatatatacaaagaggaagtttggctaaagtgttgtatggtttggaaagtgaagaacttgtttgggaaataaggatgagaattgttcaaggattggctcatgctcttgcttatttacaccatgattgttctcctcctattgttcacagagatgttactttgaacaatgttcttcttgagtgggattttgagcctaaattgtctgattttggtactgcaagattgttgagccctgattcaactaattggactagtgttcaagggtcttatggctacatggcaccaggtaattttctttgaccaattcttgttaaagttcattttccctcttataccaagcatgagcattttacattactcaatttctttgataatgccttgttaaagttcatttttttggtactaaccataagcatttatctgtgtaacaaatccttgttaaatctcctttttacaactaagcacaagcatttacatcacccaatttgtttgacaaaatcctagttaaagttcatttctttaatactaagcaataagcatttacaatacccaatttgtttgacaaattttttgttgaagctcatttttttatatactaagcataagcatttaaaatagccatttttttgacaaatccttttgttaaagttcatttttttattactaagcaataaacatttacaatacccaatttgtttaacaaatccttgtaaaagttcatctttataatactaaccataacataagcatttacaattcccaaatggtttgacaaatccttgttaaagttcatttctttatactaatcataagcatttacaacaccctttactgattattgatcattgtttatcatgaaaaaacagaattggcacagacaatgagagtaacagacaagagtgatgtgtatagctttggagttgtggcattagaagtaatgatgggaaggcacccaggtgagatgcttgaatcactctcatcatcatcatcaacaaaagcattgtcaaatgatactgaagtgcttctcaaggatgtcatagaccagaggttgccacctcctaatggaaaattggctgaggcagtggtgttcatggtgactgtagccttgtcatgtgctagaaccaacccggataggcggccaaacatgaggttcgtggcacaagagctatcggctcacactcaaccttacctggctgagccttttggctccataacaatgaacaagttaaccgggtttcaaaagtgagaaatgaaattgtaagtattggtgttttgagcaaaaaaaaa

SEQ ID NO: 186640 - DNA, 4957 bp, Cannabis indica
gagccaagtaaagaggaggccaaattaattttttcaagaaggggccaacactataaaaaattaatattatcacaagaaaaagtatctatccttttttatttttctttcaaatatttgggaggctgccaagagtatttctgctgctggtcctagtcaacctgcaacgatgatcaaacgagacatagtgcctacatttacttgaaatataatgcattttcttttcaaccttagttttctggttgtttttttaaaagacaggaaagacgtggttcagaaaagtatctcttgtttgtgtaaaagggtcagatagactgacaaccctttgaaggtaacacatgaccacaagcttcctgtggtaataagtaataacccatacagttttcagcaatcctcaccccaccaattaagacgcataaccatttttttcattttgaataaataattagcaagaaatcctatttcatatgaatgagctcgagaaatgttcaacatttaccttatctagcatcttggattacagtttaaaaaatgatgtcagcctaaccatccttcctgcaacaataaacaaattatgtgcatcagaatactcgctggatgtttttctttccctctttttattctcaacacaaaacagcactttattgatatcatattctacaatggtaaataataaaatcctaaactatttatacatactttctctttcttctatcagccccagtattcctcatatcagtttttggaagagaagatccttgggggttagcatattgcatgggagaaagaacaggaccaggagcagcagccattccaatagttgaagcagccacaggtggcatagattgctgaggtggtacaggagtgggagcaggaggttcgggaagtgatcttggtaatatgtgctttaatcgattgtttctgtagttcttccagaagtaaaattgctgtctatgtgccaactcctgaaaatgataaaaactaggagataagcatacaattgatttaacaaatatgataacaaagtggtacatagaggagataaagaaacgaattcaacacaattcagttatttttaagggaaaataaagttaacaggtttcaaacaactaaacaacaagaaagacaattgaaaagacatagaaacattaaacactaaccttgctgccaggatgtgccattgcattacgaaagtttgcattttggagaagttcaagaaaatataggcaatgaggatacctaggataagcaaaagaaagtacaatatagtaagctaagataaaatagttcaacaaagttaatttttttataaaaagaaaatccaaaaggataatttacaaagtttttttatccacaccggtagctgataattaagaaatgccttttacttaacacgagcaaaacattactagcttagcataatttcaaagtactggctcacattataaacttcatgtactccggctgctgccaatactgaaggtacttcaagtatccaatgaaagcctcatcttcaaaatagcgattctgagccaaatctgtaacagaaattcaaatttaaaaaacgtagttctagtgttgtaatgatttaggattttcattataggtcatttcaaattggctttctagttttccggaagtattcaattttaaaaaatatagcattgcattctctagtgatttatgatttttattataggttatttcaagtttgctttctagttttccaaaagtatcacaactccgtgacctcttatggattagttgtacgtaacattcaaagcagataagcaacttgttagaatacttttcatcatttttgtactcactatttcaatgatacatgcatcgtttgaaaaaaaaagagagaaagagagagaatgacggtatcaaacatgtagaacacaggcttttcttgcttggttaagcattttggtgacgatcttatagataattacaataacttattaaggcattgtttaactgttataacactctaaagaatagacactacacaaagagagtaaatagctcctaaaatacaagttatggcttaagaatctcttggacactacacaatttctatagttttctgctctctaaatctaaatgatattgacgatcaggcggggtgccagttcggaaatttctgactagtgaaaaaaaaagaaggaactgaattgaagaaaaaagactcacaatggatgtaagtagggttagcaaggcattgaacaaactccagttcaagcaagaaacgctgccgcccatcatctggatccttgtatatgctcttttgcctacaatatcatataaattttcaaattttgacattaaatttgtttacaaaattgaccaggaaaattaacctaaaagaggggaaaaaaatcaatttttgttttactaattttcttttcgatttcctttcccacagtttctcaattagggtaatgtagagagaaggagagaaagaatataaagaattggagcttacgaagatggagattcggatgaatcgtcactatctttgccagaagccatggaaaagctcgagcagcttagaaaaaaattcaaattatttttgagagattaattcaaggaaacagatcaaggtgaggctccttaatcagaacccagtctgactcttacacacgcagacaatcgcgaaatggtggtgatgggcctaacagctgggcttgggcttgggccttgaacaaatttataattttaccactttcttataagagaaatttacacaaactggtcgcacatctaattagtaattttttccccgaatttgacatgtaccaaatcatgtcccctgaactttttttgccgttaaaaattcctcctaaactattgagattgttagatttaagaatttttgtctaatttgtaaaaaaattctaacatggatgaaagttcatggggcatgatttaatacatatgaaagtttgagggatatcaaagtctagggagcatagttagtacataaacaatcactgaaacagtaaaactgaataaaattagacaaaaatttttaactttaacaatctcaatagttcggaaaaatttttaacggcgaaaaaaattcaagggatatgatttggtacatgtcaaagttcaagggaaaaaattactgattagctttttcttatgagtcataacctatattctaccgttttaagtgtaaagataaataatcaatcatcatttataattatgtcacatagtagaataatagatcgtgcaaattcctgtagaacattgctcaagttatttttaaatttagtaaaaattaacttacaacagaaacccttatggtatcagaccgaattttgaaaataagctgaatttttcttcttaactttccttattcagatgtattatagaatatacaaactcaaccttaaaaaaaaaaaaaatcatccgcccccaacaccaaattcaaatccaggttccaaacattcagttcccagatcccactggcaattttaacatgttataacactacagttggagaactttctattcatgatttcattatcaatttcactgttgaaagccttataattccatgcaaaaacactttgtttagctgatatgaatttaaatcctcaattgtttatctcatccacggtgataacttaatagaattacaaatgtcacatagggattacaagtaagaatcatttcccagctcctacaattggctattttatccaggtatttttagctttcttatattccctgaaaagcaaataaatgcatgctttgacaaacacaatcacaatgtcttctccaaacgcttctaattcgcgataaatgatctagttggccattgccatgcaaacaatgctagaagttctttcatccctgactacagagctgaagttaagaccactttaaaacatttaactaatagtccttccataatggttggttggtgccatccccgacaaggtaaaactcctcatcagtatggtctgaacctcatgggccgcctgaaccttggaaccctcctgcaaaacagaaagattagaccatgcacatcaaatcttggatgcaaggtttgggaaaaacatttcgcttctcatgcagagtaatcaaagagaactagtcaccaggataaagggttccaataatgccgtgaactataaataagctatccatggcagactggtcagaatttacttgtatataagtaaatcaaaaaagaaaaccaatttaatttatctttgtaaattctaatatggaaagttcagcatctcttaagtgggggtgatgtaatattctacatgctacatagtcaatagcaacataatattgtaattggtctagctagcagacagtagccttaaaatggggtcaaatcacaccaccaaataattgagataactctatttagtagatgatcttaataattagacaatcacaagatagtaagtatactttaattaacttctatacagaaacagaggcagtaaaaacaatctagtgctcacccataaccatatgaaggatagaatggagaagcaggcgcaaatggccttcgagatctgaaggggccagctctccttcctcgaaactgtttcattccaggaacatttgtccgcttggctgaaacctataagttaattaaagaaaattataataaaaagagtaaagcataacaaaaaaaatacgtagaaaaaaaaaaaaaaaacaataccaagcacttcaattgacagttcaaaaaagaaaaaacctttaactgacgaccatgcaattctgattcatttaacagaagagcattctgaacagcttcaacctcaacaaactcaacataagcaaatccttttggctggccaaacttatctgtcaaaattcccgtaatctgttgacagttccacaagattgaaaatgctgctggacttcctcgagagtgcagtgcatagtctaacctagaagtaaacaaaaaaat

SEQ ID NO: 186641 - DNA, 4580 bp, Cannabis indica
attcaaataccatattaaagttgttatcataaaagagtaaatcatggaatgggatgtaattttaaattaaatcatttaggtatagatataaatagtatatataagtacggtatattaagtttgatatgagattttgataattattttagatatagtgtgtagttatgttaaatcccctaacattaaataccaaaaaatgcataaattattaaattaattattatcataaatatttaattgtatttccttttatcatcataaatacttaattgttttttctttaattacattaattagacaaaccaccatgagttttcacttcaacataccaaaattcaattacttgatgacctcccaaaaataccctaactttattactaactttgcaattgattagaagtaataaaatagaatgaaattaaaaaaaatgaagtttcattttattcttttatttagttacattttaaaatattagaatgtaattctattaaaataattttttcggaagaatgataattttgaaataaaaagaaacattatttcaatgcaatatgaaaacttattaatatttttttgttatgcattttaaattttattccatttctattccctttctctttccgattccacttgtatgatttcttaccaagcactagccattcatacaaaagtagcagaatcacaaaaaaaattacacccttttcagtacttgacattgcgattgaaagaatttacagtaaatgttatgtatgtatgtatgattatgaacaaatccccactcccaaaaatatagatttatgtaaataatatcactctttgtgttttgctaatataatacattacgctgagataaatttataactatcatcttcaatcccaaaagttatatgtctagtgaaccttggatctccttgaggaaaattggatgaatggtgagaagtaggaggaggatgaggtgggaaggctttttctctgaactcttttcttatttcccataaaacctcaccacattttttcatggaaggtcttgaatttctcaaaggagctacgcattcttgagctaatttgagtactctctctaatgccatgtttgaagctggatttctccttagtcttggatccatggcaagtactggttctccatgtttcaacttctgcattgcctgcataattgaatatgaatgtgttataatcacttgtctatacttctatgataaaatataggttttttcctatataccaactaagtttgcagttctatgctcattgtttagaagattagtctgcataaatttcttaagggatacagtatttcactggccctttctatgctatcaaaacttgttcttccatttttgataatatatagtcagtcatctatgtttaggtccacagatcacatgaagaaaatagcaagtgatcatctaattaaccacttggcttcttcatgtgttgaatgtcttcaacattatggtatgaaaactgcatgaagatatcctaagcttcatgtatagtataggttatagcaagtcatagagaaaagggtatatttgctttttttaaaaaaagccatttgtgataatattcaccacttccatacagctcataattttaaagatcagataaaaaagaggtgttatctactacctactaaacggattgccataataacagtttttattattagcataggttaaatttgcttctggttcatcttaatgttctagatggatattttattctttccttaattaacatctctaccagacaaagcgtactaaagttgagctaataacatgtcttcatatgatctgacaagtagattattaaaatcaaaacaaagattgatttgaaggtttctatagtataatgcaagttttaacttctgacaatgtttgatttgattgggaacttagaatgagtacttacccatcttaatgttaatctctcactatctggtttttttgtttcaatgggctgtcttcctgtcatgagctccacaagtagtactccaaaggagtaaacatcactcttatctgtcagttgataagttctaaggtactcaggatccaaatagcctgctgtgcctttaacttgggttgaaatgtgagttgcatcagtttcttgttctgcagttctccgtgcaaacccgaaatctgccacttttgctcttagcttctctgtgatgaggatgtttgatgcttttatgtctctgtggattattggaggatctaccaaaatagcatgtgaagacttcagatatttaaaattttataaatacaataatgtttagttttacatttctatttgatatttcaatggtgcatcaagtttaaattggaactggtttgcatacctgtgtacatgtggagataggtaactgcatgagctacatcagttgcaatatctagacgctcggccatttctagtccatccccacgtttaccttcattttgaacaagatttgctcttatcaaaaaaagtgcaatggttaaaaatatcacaaagttttcctctgatgaccctttggactatttgaccatacaaacctgagattaatgaaaacaaatacagcaggaagattggttctccatctaaaccatcctaaaagctcccaaatacagttacctgtgtggattggtttctgaagtttgtatttaaagtcttactacatatataatatggatatatttatatttatatatatatatatatatgcagacttaccatctaaatgttccctaagtgtcccattgccaacatattcaaccacaatgatcctctcatcttcatgctccaaatatccatatagcctcaccaaattcatatgctcaatagtagaaagggttaaaatttcattactgaattcagctgatatagccctgtcatatgttttctgcaacagtcaaagattgatgcaaatcatcaatacttactgatgagcaaatgatctttatccctataagcttctaaccatgatttaagaagtgtacaaattatgaggaaaaattaaaataaatataaagtgtttgctaacaaaatctaccttcttagcacgttttacagctatcaatgtaccattttgaagtaaccccttgtacactgctccaaatccaccctcacctagtttatttgccagagaaaatttctgggttgccttattaatctctgcaaaagtgaaattgggtgtcccaatctttccactcgcggcgccaccattagagccatatgactcagataatctgtattttgatgatgaatttctgctatagcttcctgttgaaacatcactaggagctgcaaaacacaataataggagaatttaattattggcctgcagatccttacaactgcaccattagaccaattcaatcaatctaaaacgttgaaacaaatgtaacagttttgttacatgaattgattaataagatccaaccccttttactaaagaaaaaaaaaatgaagaaccctttaaaattggcaacaaatgaaggtaacttactggaaactcctctgaattggccattattagtggcttttaagctggccttgctttgtttgaagagaaaagccaatgtgataattccagcaaatttcttagctgcagccctgatataactaagggcagattgagaacttgggccttttttcttagattcattcctgtcatccccatgtttggatttggagaattgataattttggtttaattgagggctataaggaattggacttttcttcatttgcaggcagaggtttttgactcaaaagaggtttttgaatctttagattgttatcttaagaagaaaatactatgtattagttgcagaattcaatcattataacatttttaataaagtgttgtaggaccagttcaagcaagtagagtcgtgctcgctttcatttgcattgatttccatatccatttggcatcaactgtattttttttttttaaagcttaatttaagttggtcaaacagaaaagtatccatttggtgcggcttcagtactgggcctctgttcaagtgcacgttactcctcacattgacagcccaagcccagtttctaagataataatgatagggacttttcacttctcaggagaatttgaccagtttttttttttttttttttttttggttcaactgacatgtatattgatgtttttagtctacgtttgactatcccattgttaaaatttagcagtttggatggtgttgttaattctactacccttcaaattaattaatagtactaatatttaaaaggattctttaaaatcataagttaagatccaaggcactccagccaaagaagtgtgatttaataatcaaacaaccttatgaggtggaattaatgggcctgatttgttgtcatggtgatggaagatatggaaaatgggtgtgctgttttgactaggaacgtataataatgttttccctgagcaaagagtcattaaaaaaaattgaaattaacaataacaacaaacaacaaaaaacaacaataaatgataatacaaaccttaatcaattgtagaatttaataatcaatagggagttcgtgttaaattagtgaggtat

SEQ ID NO: 186642 - DNA, 3961 bp, Cannabis indica
tcgcgatcatgaagtaccgaaaactatagtgaagtgaagataaattaaacagttgattcatgtttgaagatgaatcagtggatgttgaaagagagaagagtacaaattataatgtggggaaaaaaaattaaggaaccctaatctacatgaacttattgtacaccaatctacagccatccaatcgaaaaagaaaagaaaaaatgttgtgtctacagtttacgcgcctctttactcgatttgatttttcgaaattaatcatcaaagaacaccgaaggatgcttatccccgagtttaagaaccgaagttggagagtgctgtttggaacaaggacgaaaattgctgagatgcagtttggtcgtcggctttgatcttgatttgagctttggaagatgatgtgttgattaaacactccacaaggaatgtagaagattcttcagccttttgtgcgtagaagaagaacttcaattcggggattggccaccggatgcaatgcagtggatggaactgttttgcatgtgtcgaggaagcgtttgaggtgttgtcaaggctctaactccttcagagcttaaggaatactcctgaaccagattaagatattaggcacgttaatacaaatgatttcagttgagatttaaaattagaacaagtatgtatgtacctgagatatcgatataggcagttggcgccacttctgctgaaaagtgcttggatcaagagaagctttcgggttgagtttcagagaaggtggtggaggtgttggtgcaggttcagatactgctgttatacttaggccgaggaggtcatcaattgcgaaactggatgttgcatttcctgaaccggtgatgcttgaactcatcaagtctgattgtccttgtgaagcagcaatggagatcaatgaactatcgtatgccggggcgctaaatgtatcattattattaggagctctagtttcttccttctctgaggtactaagaagaaggtctttgtcatttgcaacaacactgtgacccggaacaccggtatctgtaagttctgttccaatagacagatttccaagctcatctgaaacctcaaatagacccctgtgttctctgtccgtgaacatataagatggctgcaaatatatttatgtatatatatgtatatccattagtatctcaattccaacaaatctattggtattcaaaaccagctcaaagaacatccaagtgtccgtgatctgttgattaaagcagattaaaggtgtctagactaatttgaattcaagtgattatcaaacttctccatgagtgaagagtaaatcaatgcaaaagcgtaaatgactaattcacacactcagatagacatcaaatgaaaatatcattatttgattaagacactccgctcacgtgaactataaggtgctagttcattgagaacgtcacaacgaaaaaagaaaattcaacattattttggccaaaaggtcactgatgcaacctccaaaaactcggtagctaaaaacaacagatgaaatttcacttatagaagctatacgtaacttttacttattttattaaaaatatatagaagtttgatttatttaatcacagagaagaccatacagtgtgataggtgcaagaaaaagatactaaatatctattcttggatcatacattctcaataagaatatggtacagattccttcaagaaattaattttctgtggtggatcacaaacaactttagcggtgaaatcactaacaaagccaaaaaaaaaacatagacgacagggttggtggctatttagagaatggctacctatattttatgtagttttgttgttctagctttctcgttacgatttcatcctaatgtttgcttgtactgattattatattaatgcaagcttaaatttgtttcaaaagaaaggccagctatccaataaaggctgaaatttagttaccaaaatcttaaatgatctaaaagaagaaaattaaacttactttctggtaaacaacagacaaactgttaaattcatcaaatatgcgatcttttatttcactgctctgtgtatcagcaaatacagaaacagcttgctttggaggattcaccacacgttctgctactgttatgttgtgctgcaaaagcctgtagtagaatacggctctatcatgaacatcctgcaaccaactgaaactttcgatgaaaattcccaggcaaaatgcttccacagaacatgagttaataaaatcggaagtctataaatcaataacctgatatgaaaatgacttgatatgtagcaacatgtacctggtgaaaatcagcaagccctgcagccaatgcagctcccaaagctttctgagtctctggtgaccttttgaaaaagcacttcattactgctgttagaagatgtaagcgaacctgtgcaattacaatgaaacaatcatgtcatgtataataaggtggaacatagcccaaaaatcggacgaggaatcttgttcgcgtgacaaatgataaccaccaaaatcatctatttcccttttttaactttcttattcttttccctctgtgagatttaggcatcaaggggaagatgagggaatcaacgaatctccacatcacaatagaaaagcgttccagccaattcatggttaactttgttcattgaaaggtcaaataaatttattgtggtaacttaataagaacagtttaaaaaacaaaaaagaaaatgagcaactgtaagtcaagtgtaaccacaaagttttaaagaggccagaaattggttatttacctcagcagagtgctcttcatcccaattttcaattaaaccctctaaaacatacggtgcatcctgcatgtcctgggaatattctcccaacatccatatgagagctgccttggccttgggttcttgaatatttttgctgcttatatttccaacaactgcaatgcaatcatgactccattgtggatatttcctaagtagatcttttacgaggacctgcgtagaatttcaaacttacatcaataggctaagcaatggtcttgggaaaaaccatgcttttattgtacttattattatttatttttccctcttaatgaaaaataaaaggtcgttgacaatgaaaatgaatgtattccgcaaaataaaggacgataactatttgagttagatctcaatccagtatctaacaggcataggcatgaaatttaccagagcttcagcagtcacatagtccttttccatctccagaaactgaagaagtcgatccacgattgcatttacatcatactgctgaagtgctattttcccaactgcacgaattgactctcttgcaataggaatatcaacatttgcagcatattcacataattccgtcactgaaattgacacaagaaagccatgcattagtcataataaaaaataaaactaagagaatatctgcacctgtgagtttgtgaccagagaaaggtcacttaacataacaggatgcagattcgaaatgtcatccaaatgttgtttgcttaccaatttcataagtgttgctctcatttgccactgcagtcaacatgtcgagctttaatttctttacataagttggctcattgtactggcaatagaaatgcttgtaatcattggaaaatatatatggtgcacgcatcaccaagagatgcaagtggcttagaactgcataagattgctctggactccccgagctcactaatgttaggagaggagctttaatgcgttcatacacctaaccaaaagatattttcattagtacacttgttcgtttcataaaaggaacatatttagaacaagacaagactgcaaaatcaatgagacacacttctactgaagtaaacatcaaagcaaaccaaccatgacgtcacagccacactaaaatattttccctaaaaccacatcctagtcataaatgtctttcagccagttatcctataagaacttttctaatccaaac

SEQ ID NO: 186643 - DNA, 3874 bp, Cannabis indica
tatttctcataagaaacctaattatgtctttttatgtgaaacaaaatgtaaaaaagatagagttgattggttgggccgtgctttgggttttgaaggtatttttgtggttgaggctaatgggtttagtggtgggttagcttttctttggaaaaacaaggatgatggggctttgttgggtttttctcaaactcatattgatatgcaacttgtttcaccagatgggaataagtggagaataactggggtgtatggagaaccaaatagaaattgtagagatcgaacttggactcttttgaagaacttggcagggagatcaactcttccatggtgtgtaataggggatctcaataatgttcttagtcaggaggataagaaggggggccggccgtacccttcaagtttgatccatggcttccaacaatgtttgaatgcttgcggtttggaagatatggatttgttgggttatccttttacttgggaaagagggagaggtactggtgagtgggtggaggtgagattagatagagctttgatcacacaatcttggagttctttatttcctgatgctaagctaactaatttggaggtgtcatcatcggatcattgtcccttgttcttagaaccggttctcaaggcaagctttcatactccccgtcgctttcgatttgaaaatgcttggctctcggaacctatgtgttttcaactagtgaaggattgttgggagtctcaacttcaaacgggtatttctgggaagattagctcgtgtgcagaggtattggctcggtgggggaaagacatcacaggggattttaaagctcgtattcatcagtgtaaaactaccatggcaattttgaaaccgaagatggatgctgcatctgtccagcagtatgcagaagctagaaatcggttgtttgaagttttagagcaacgcgagacattctggaaacaaagagccaaacaattttggttgaagggaggagacaaaaacagtaagtatttccacaaaactgctagtagtcgtaaacaccataatacaatttctaagcttaaggatgatcatgggaattgggttgattggaacaatggtctacccactgttatgaaatcgtattttgcctctctgtttactactgctaatacttattgtcctgaggtaatagatagtgtctcggctatggtcccagattttgctaatgaagaattgtcaaggttagtcacggaagaagaagtaagaaaggccgtgtttcaaatgcacccggataaaagcccgggtccggatggcatgactcctgcattttatcaaagatgttgggatattgtcaaaaaggatgtcactcaaatggtgcaatgttttttccgaaatggtctcttggaggatggttgtggggatgctaatatcgttttaattccaaagaagaaaaatccgcaacatatgaaggagttacgccctatagctctttgtaatgtcctatacaagtgatcactaaagttatgaccaaccgtatgaagcctttcatggacggtatcattgcggactcacaaagtgcgtttgtgccgggtagacttatctcagacaatgtgcttgtgtctttcgaggttctccactacttaaagcggaaaaggaaggggaaaactggtttcatggcactcaaacttgatatgagcaaagcgtacgatagaattgaatggccattcctagaagcaatgttgaggaaaatgggtttcttggaaagttggatacgtttagtgatgagttgtgtctccacagccaagtatacagtaattcatgatgcttatgaggttggtccgattcatcctacgagaggcataaggcaaggggatcctttatctccttatttgttcattatctgtgcggaaggattgtcatctttattgtgtaagtatgagagaaatgggtggttacatggctgcaaagttgcaaatggcgccccaagaataactcacatgctgtttgcggatgacagctacctctattgtaaggccacgcttcaagaagcacaacgaatacaagaattattactcaaattcgaaaatgcttcgggccagcaagtgaactttgctaagtcctcaatttttttcagcaacaacaccgattctaatgttcaaactcagatatgtaattacttgaatatggatgttgctgatgatggcagtttttacttgggcttaccaagtacaatgagtagaaataaaactgctgtgttgggctttctgcgtgaaaaggtgaggaaaaggttgcaaagttgggaaggaaagttgttatcgaaagggggtaaagaagttctcataaaatcagtcgtccaagctctccccagctatgctatgaacgtgttcttgcttcctcttgagatcagtaacgacattgaaagagccatgtgcaaattctggtggaatacttccaaagatgataataaaggtattcactggatggcttgggacaaactttgtgctcataaacgaggtggtggaatgggctttcgtaatttacgagatttcaatctctctcttttaggaaagcaaggatggcgtctgttgactcgtcctcaatcattagcagcccgtttgttcaaagcaaggtattatctgaatggtactttccttaatgcacaactgggttcgaatccaagctttgtatggagaagcatcttggaatctcagtcactaattcggcaaggtactagatggtgtgtgggtgatgggagtcggataccgatcttggatgagccttggctcccccatgaagaaaatcccaaagtaatgtcatctcacccagctttggaaaatgccacggtgaacgctttaatgaagataggggaattggtttgggatgatgaaatcttaactgacatatttgaagatagagaccgagagctcattcaaacaatccctcttaatgtcactaggacctttgatcatcttgtttggaccaaggagaattcgggcatgtactctgtcaagagtgcttatgctcttttgcaaaaactgaaaggccaatggtgtaatgattctgatagctccttttggcgaagattgtggcagctgaagttaccttcaaaaatgcagaatttggtttggcgagcttgtaataattgcttgccaacggtagttcagttacgaacaaagcacgttggagtcagccccatgtgccctttatgtcaaaatgaagaagaaaccatagtccatgccttgcttacttgtcgggaggttcagaagtgctggaaccgtgtgggaatcggcaccatagtaaacgctggtgcaagctttcttgactggtgtgctgctactttctgcaacaacacggctgaagtgaattgcagaattgtggccatctgttgggccgtgtggggagccagaaacaacctggtttggaataataaacctttcgtttttgaagatgttgttgcctttgcgtttcgctaccttgatcaatggaaatctgctcaaaaatcctcggattcatcttggccaatccttatggctgctgatgtgtgtgagcagtggactttaccggttgataatagcatcaaggttaacgtagatgcggctatttttgaaaatggtaggagctttggtttgggcatggttgcccgaaactctgctggtctcttggttgaaggacggctgaagttcaccccggctcaagtggatgtggctgttgcagaggcaataggcatccgtgaagtgctgagttggttaaaggatagacactggccccaagtttccatcgaaactgattccctgtgtgtggtgcaagctcttcatagttcaattcatatgatatctttgtttggtagtgtcattcaagaatgtaaagatttgcttgcctcttgtcataatgttgttgtgtcttttg

SEQ ID NO: 186644 - DNA, 3386 bp, Cannabis indica
tttttcaattaacaatagtaaaaaaaaaattgtcaaaacaagaaaaccaaaatcattgaaataattcactgtacctaaagttttcatttttcctattaagttatttaatcatgatattcagttaaaaaaaaatgaaaaagtggtagtagtaaagttcacatttttaatgatcaaattgtatctcagcttgagaaaagtacttcaaagggactaggaatctaagatgagtaatactacaattttaaaaatattcataataatatatatatatatatatatatataaaagaaaagcttgtaaagaaagaaatgaaaagttacctttgaagagatgaaaaatagtaaagcggcgtagaatggttattggtgttggccagaggagaatatgaagagagaagcactgtttttagtaaccgaacgtcaatggaaaaaatgtctaaacgtgtgttattattatttttttttaaccaaaaaacgtgtgttatttaagggatatttctaaaaggttttttcttcctataacttatttattttgattcttttttaagaaaaaaaaaacaaacaaacaaactttccattttatataaatatataaaaagtaaaattaactcctttattttttagcatttgttgtcttaatgtacgtaatatattttagaggaaattctacaatgcagatgtacccttatctgttttaatgcccgaaataattttttagtcaaattttttctcacggtcatgtactttatagttatttaagacatcctgcaaaattttaagaaatttggaaaagtttaacacgctgaaaactaagttcaaacaatgtattgcacgcgtgattattttattttatatgcgtgtaaaatagattgtttgaacattattttctatattgtaaattatttggaatttctcaaaattttgtaggttattttaaatagttataacgtacatgaatatgaaaaaaaattcgactaaaagaattttctcgaggccgaaacaaattaagagtgtattagtacatcctttttaaagaagtacattgtagaatcaatctatattttcttgtcttgtcaagactctctcctaaaaaaatagtgttctatattttgttaaattaatttaaatttgatagagactatactaataaatttttatttatgtattattgtaattatttgtgaattttacttgataattataaaaaattaaaaaaaaatggaaaagtgagcatagtgagcgtttgagatagtagtgggagagatttgagtgttgttagatgagtcaaattaagcaatgattagtggagagagattaatttcccactctcatcttcacaaccagacaacctccaacttcatttaactgtcatattatcttatgccccttttttttcacggcaagcatcaattaagtaatactatgcatgtattgcaaattttgtattttaatttctacacctaatcaccatttagtgttatgaaataggagtgtttacctggttcaataaacactatttcgctgtatctgatttgcagttagtgtggattttatattttggatccaatttgatccgcataataactcaattcaatctaatctgcaaaaatgttgattgtattgattattttgaattgattattttttaatattaaattatttaatatttatcaaaaatattttttttcacgtaactaacaataaaataaaataaattagtgttgttttatgtctccaacaacaaaataaaataaaaaataacaaattcaaaacaaaaaaaaattataagtataaggaaatgtttatttatgttttagattatatttttttatataaataaaaatagaatatgtatttaattcaggattgagtgagcgattcaggggtacgtctcgagccccaaatactcagggctctaaaattgtaaaacgagaaattattagtatataaataaaatattaaattaaaaaattaacaaatattatttgatgtaatggtaataaatttttgaaaaatttatcattacactaaacactacaactatcatgttgataataattgaattatataaaagccctaaattttaattttgctttaagtctcatataccttaaaatcgaccttaatttaatttattatgttttaaaatatatttatatgtattaaatttaaaatttattttaatcggttacttttacagatcaattaacataatctgcacaagtacaaatattctcatcaacaatatagagatttaagtcaaaataatgagttactcgaagaggaaaagtctacaaaaataaagtaatgaaaatgatttattcttgttgttgttgtaacactttattttggcacatttacaatccactcaaaccaaaaataatatctacaataaaattatttcattaatatttatttattttctttctattttgggacttaaacatcatagcaaaatggttaggagtgaaaacataaagtatgttttgagccttcacaaaatcaaatcacaaaaataattggcatacaaaagctattatatctttaaatgtaagaagataacatgatgatgatgatgatgaaactaaaagtacataatattacacaacattggagtcaagatcatcttccatctcatgaacagcctgaagtggaccacttccaaacacaaatgcactctctgaaaacttattcagaggactatttccaaacaagcatacctgaggttcgatctggttcaaccggttccactcctcgtccgataccgaccaactgaaaatatctacattctttcttatcctttcactcatcagactacaaggtaacacactggttcctctttgaagcccccaccgtaaataatctataaaacaataatcacatcaaacatacccactcatgttatactatcacttaaaaaaaaggtgcaagacaaataatttggtgatgggtaagttgaaaactcctaagctgttactcacatttaacattcactatagatcccacatcattggacccacaagcgacgatgcaagagttaactcaatgatgaaagtaatgacacaatcaaattactattgaagattgaatatataatccaaaatgctatgcatccaaagttgaaaaaaaaaaaggtcatgacagttcatattccttcattctagattttcattattcactgttacttaatttattctatctcatattcaagattctctctagatattagagtcgcgtaatagttttcttgtaagcaacagctttgatggacgttatgctagttaacattcacacaaatatagtactattcgttcgtgtgtaaatgattcatttgctagtgtgatcatagagcataatcttggatgtaagccttcttaagctgaccac

SEQ ID NO: 186645 - DNA, 4316 bp, Cannabis indica
ataaaataaaattaaaattaaaacggaaaacacaaagtacaccctttttttagaatttccctaaatcatatatatgcattgaaccaagtcatcactttgtaaatcatccttcacctaacccttactccttcccatacacccaaatgatcaatgtttcatttagaaggtacaaataatatgttagacatattaattcttgaccaagatgagaaatattttatttgaccaaaaaagacccatcaagaaacaactctttatgtctctatagcaaaaagccaaaaataaaaataaaatcatgtcatattcaacttataagatacatggaaagataacatatacaaagccatattcatgcatgaatgtataccctttttattagataacacaccaagtatcacaactacaaccctttttatcatgttgcctttgaattataaccaacccatccatgtctttttgctctctattttcaatctcaatatctctcaaatatataaaatcaaatctttcatttctgctaagttccttgtattgttccaaaagagaaaaggaaaaagcatatagtaaaatttcagactagatacttgcatgggggacccttttattcaatttcacaaaggtaatgaagaagctagctagtacttgataaagtaatatcactacttactagtatatatattataaaattaagttagctgaataatgctagatagtaatagttttattgagagcattgtaattggacatcaatatgtctagtaatattatgaggtgatgacttataattagtattagttagcggttttctataatctttattaaagtaaaataagtgaaactcttacaccaacatcgatattacatctcacaagggtcttagataatatgagtgtcctttagcatttttcttttatttattatgggttaaaaaaatgactgtttttactaataattttttttggatagtttttaatcgcaaaaaacattttattgtaatattactttcacccacaaatgtttttgatgtgtacaataatttacatatttttaatatctttaaattagatgtaagttttttttagtattgtgaaaactaaaaacaatggagagagacagagagagaatcactcaatctaaattagattggcactaagttttatttatattgttgaattacaagaagagaaagactaacaaatacaatagaaagttgttacaaactagctgagcaaaaacaaactaaaattaaccaactggtgtgctcttcttgtattccaataacatcccccctcaagttgcacatgtcaagaccatgtgttaacttgttcttaaagtgatgaaaaggagtttcagccagtggtttttgtgaaaatatcagcaagctggtgtgtggtgtccacataccgtacatccaattcttgagctagaactttgtctcttacaaaatgaagatccacttcaatatgtttagtacgagcatgaaatacaggattggaggctagagatccaactcttaagttatcacaccagagtatgggacaatgctgactttggaaaccaatttctttgagcagggattagatccatactagttcagttgtggctagagcaagagcacgatactcaaattcaaactgcttctagccactactatttgtttcttagagcaccaactcaccaagttttcaccaaagtaaatgtaataccctaatgtagactttcgatcatcatagcagccagcccagtctgcatcaataaactcttgtaaatcaagtgttgtggctggtttgaattgcaatcctccatcaagagtgcctgagagatacctcagaattattttacacgcactccaatgatctgacgtaggggtctactagaattagcttaatcaatttacggcaaaagcaatatcgggtttggtcatggtgagatattgaagtgctcctgacacatttcgatacattgtaggattcttcattggagtaccagtgtgttgagacaattttgtggtcgagcacataggagtaggttgtgacttatttgattatcaacaaaaagaattttggtagaaaattgcatgcatttttttggttttgtccagccctaaaatcgattccctcaccctctctatttctcatctcttccaaattgttaattcttaaaaagtcatcttgaataaagtttggatttgtgattgttggtgcaagtttgttggaaaagcttgaggtaattgccttaacctctgaatttctaagtttaaatgcaaattattgtgataatttcttgtgctcttgatgttcaaggtgattgaatgtatgttgtagtggattgaagtgaaattgatgattctgtttgaacttgtaaaactatgggttatgcatctagagtctagactactttagtgagtttttaaagttgtgattgtattaaaaatctgaatattggttctattttggttgtttacaagcatgagttttagttttggtgttcaagctcttgaatggagaattttgatgatgcagctcaagttttgagcttatcttgattgttgttataatctgatttttggatgcatagtttgttgaggattaaaagcttaatttatgtgttctaatgccctgctatgataattataatccatggagtatgaatttgaagtgtatgcaagttttggttgggatccttgtgcatgttgggctaaaaatttgaaattggaatggagatttctgggtttggaacctaggcaccacggccccactcattgggcgtcgcggcccgccttgtggtttctgggcaaattgatgtcgaatcttgtttcgagcataactttttgatccggactgcgatttgggtgctccgtatattgttggaaagctcgttccgagctctatatgtttgtctaaatttaaatgccaattttataattatgtgagagtggatttagggattaaccctattttatgaatctcgaaaattgtgagtgggattaccagcacttggtcaggagcacccaaggatttggaatctccgtaagcaggtgcctccagttttttgggaggttcggatgccatgaaggtcgaagggttcactgtaaaagaaagaatcttgaattacatgggcgttgtcaaaaatgactgagtgacttgcgccacctttcagttctaggaagacgcactcatgtggtggaagttagtatccctcacccaagacatcactacaataacctgagaagagtttcaggatttgttcaacgctaaaattacgataaggcagtccgtagtgctaagcggaaagagttcactgaattggttcagggagaaaatatgtcaacaatagattacacaacaaagtttgactgtttagccaagttggcttcgggtatagtacccacagacttcagtaagaaagagagatgcctggctggttaaatgcaaagataaaacatgatcgtgtaattactacaagtgatacaatgacttatgtaaaatggttgtgaaggcttttcgagccgagggtgccgtgaaatttcttcaggagtttgagagactccaaatattggtgggaccaccactcttcctacttctagatatggtaaggatggtggtgtttccactgttgatcaaaagaggaagacttttcgacatatgatggtttgggaaaaaaaataagaggttctaagagaactaaggtagaggttgatgtcagggttattcttattctgagtgccctcgttgtaagaaacactatcctggagagtgtaaccggaaaacatgtttccagtgtggcatggttggacattttagaaaatattacccttagataaagagggaggaacaaaagctagaagcaaaactcgtacttgctcgagtgtttgccatcagaacatgtgaatagatatgataccaatacgaactacccatttcaattgttgtgctttcttaaattgcagtcgaaatcaacttgggagctcttccttcttcttctgaaaccatagctcacgcttgctttttgctcttgaccgatcttgacttcagacaaaggaatcttttcatgttggttcttccttctaatgactagcttatctatgattctttgttgccaaatgaagcagcaggcatcggtccatagaacctataaaaaagagatggttgtagtgcaaaatattgtgcatctaggtcactcaactcgctcacaaccccgtcctgttgtggtatggaataattgaattagagatccacttgagtagatttgacgtctatgttttcttacccatgttgaagcatacttggtaattttcgttggaattaaaatcctat

SEQ ID NO: 186646 - DNA, 3297 bp, Cannabis indica
agcactctccttcgtgtaagaagcacaaaatccaacttggaagtattctcttcgatcttcttactctatgaataggacagacagttccgcgagactcgctagatgactcactagtagctgaaggactgggtgaagatgatgaatttgactagtttggaggtgactggtagtctgagaatagacgggctaggaggtcgtcgtcgatgcaattgtcactatcccaatgattagagtatgcatttacaaacatgagtataatgaggtaacccagaaataagctaaattcacttgataaattattcaagccagttaataaaaactaattcaatttcaaaaattaggtgcaaaactaaatttgattaaatcaaattggaaaaatctaattttgttaaattgaattagaataaatctaatttaaattaactaagctaaatgaattttattaagaaaaacattttattttttggtttattttaggtatattaaagtttcactatgaaaaattagaagcaattatttaatttattgtgtccttgctacataaaagaaatatgtgtgcgctcaaactcctcaaagaacctttttggtccaccaaaaaaaaaacaagggagctgattggctctaacaaaggaggtgaatgcttttactcctcactaagaggagccgaatgacaccaagagaagccgaatgacaccaaaggagccgaatggcaccaaaagagcctattggcatggctctattatttctttaaataaaggtagaataggtgaactgattgccatcaatatacatatatatatatataaatatttgaaaaggaagtgacccgcttttaggttgtcattattttttttttgtctttccttcgcttataatacttttattgttattttattccctaaagcttaaatagccacaaacacatttttttctctcaatttcaaatctttttagattaaattagggacttcaattgttcatcaccatcatcatcatgttctttattttttctcaaaaagtttatcaaaatcacaccaaatatataaatctctatcatttccaaaataaagagtggattaaaataacccatagcctacattactaagttctattcatatattctaaaaattacaaaccaaatttccattcatataatgttgtgaatttcacaacattatttttttttcaaattaattacactctcacatgacacttatgtggaaattttcttaacagccacattatcattttgtttgccacatgtaacaaaacttaacataaggaccaattaacaacaatgtgaatagttcgagaattatttttaacgggttaaaaaattcaggggcactataattgcataggtcatagtttgggagcaaaaatcttaaatatgttatgctcttgttcttcccatgttggagttttgaaaatcctttctggtgatttgaggcctactaggttttctttgagattgaaagttttcattctaaggttcctcatttgtggctattactttcttttgtgtgtttatttgattttagtcagacaaccaactattactattgatttgcgtaattggaagtaaccaattcacagtgtacatatgatgcttgtagtgtatgtttccaaattttaaacttcatagtcattgctgacctttttcaggaaaagaattgcagaaggggaaagttcagcccttctaaactcaaaggaaaacgtgttattgaacttggagcaggatgtggagtagctggatttggtgaatttttcttcatattattttttttttttcagaaactcatgcatgttttataatcttcttgaaattagcctcgtttacctagaactgcttggtgttgttgcctttcctgattggggctctcttttcaggcatggcattacttggatgtgatgtagttatgacagaccaaaaggaagttttaccattgttaagaagaaacgtagaacgtaacacttcaacaatcatgcagatgaatcctggtttgggttataaatttaaattttctcttgtagtgtgatgaccttaatgagtgaaagggacatttttatgaatggtattcatgtttcttgtagattcatttggttctatcaaggttgcagagttaagctggggaaatgaagatgatataagggctgttgttccaccatttgactacgtcataggcactgatgttgtaagtttattttcttttatgcaatttcacaagaaaaagtgtagtggaaaaattttacttcctaactggtagtcgatcggtggagtagaattggtacttccattttttttttcatgaaatcacatagtggcattattttgtatgtgcttttggtctcattattttatttctgctccttgcatcttcatctggcaccaaaatacatgctttaactttccgataactgccaggatagaagtcatagtagcattctttttttccgataacttcttccatttttttcaaagtcacgtagtagcattattttgtatgtgctttggtctatttatttgttttgttctccttgcatctacatctggcatggaaatacatgctttaactttttccgggtaaatagtgttacaaaactacagtcaatccattttcttattaaggtatattatgtattaaataggtcaatggctgtatgtcaagttatttcatcgttgtcttgcatttgatcaaaacttaagttgtctcagaattccttaatcaaggtctcatgcatttaggactggaaatatcattacttcaacaaatcatttgatcctcagaacaggtgctgccatgataggatggagaattgattctcagaactgttgatcctgctaagaaataccagcaacttttcccacaatcaatctaattcatattacttttcgaaaattaaaattactatgattcccttgtcaaataaaatcaaaatcaggctcctgaattatgagtcttttttaacaccccttattcaactgtacttggatgataaacttctaattattttgaatttaaggtttatgcagaacatctcttacaaccactgttgcaaacaatatatgcgttatcaggaccaaaaactacattgatggtacgacacttgatttgtttgtctaaatatttctttataagtatctcaaatctcaaaagacatatgtatactgctagacaaaacagaaagaaaaagtatagccttctaaatataagtgtaaacttaatttacatatttacaacatatcatcacgactccatgtatctcagtattggatattataaaaattataatact

SEQ ID NO: 186647 - DNA, 4764 bp, Cannabis indica
aaaaatcctaataagccttttttttttattgtgttttttatgctatatttttgttatattttctttcaaataccatatttgattttttttattaaataaatctgaaacacaagaaactagttttttatctagaatctgttttgggtagtgggttgttggtcgagttttggagtttctgagaagtttgtaattagttttagtttcggtattgtgttagatttgttcaatattccatacagtaaactaaaatacaaaacatgtgaaatttatataaattttggtattcataactgatttcttcattaagaaactagttttgattacatgaaaataactggtttcttaattcattgccttaacaaaattatttttaactggtttcttcgttagaaaaattaattttgattatttagaagtaaaatttatatatgaatagtttttaaattttttatgatattccttcttatttatgatgatttatctcatattattaattttttttctttctataaatgtgtaaataacccttatttaattatatgattgacactaaatccaaattctcattgcttgtttagttttgtgaagacttaggcttgactgttgctttgcttgaatgttaagttccaatatctttgagtaactcaagaaccaacaatttcaaggaaggtttactaagatacaattttggctatatggtttcaaagagaagacaaaggagatcatttgctaagaattgaaagagagtaagaatgaaaaaagtgatgagaatacgtaaaaatacaatacatgtatgttttgatatgtactacaaaaacacacattttcgtttttgtaggtttgagctacaaaagtggtcattgtttgtttccgtagatgctagggaaacaagcttgggctatgaaaacaaggtaatacttgttttcttaagtattatgaattgttcgtttttatagacttgtatttttttactgaagaatgttcttttgattttttttttctttaaactctcattttttattaataattaaatcggacataaaattacataaaaaatcattcattcagcataatcaataaagatagactaatcaatctgtttacaaatatgtgttaacattcatctaaaccaaactcatattatttagccgattgtaactatatatacataaaaaaaaacaaagaatttctaattaataaaaaaccaaataaaaatattaattgtattaatggatgattattgtacatatacgaagctacaattaaattaatcaaaggtgagcactgataatttgtaaacaacaaaatagaagtagactgtaaagtctttaagacactgaaatggtgccgaccaaagaaattctgataattaagttagtgaaatttgtaacaagtagactgaaaaataaaataaaataaaaaacttagctacgatcgtcttcaaaagactagagattaaagcgaagattgaatgttgagagaataagagttagagtaaataaaacacatagagtgtaagatgtagaagataccaattgtcagatggtccttccttgagaaggatcgatcctttaaatagcattcgctcttcgtagagtaaaactgttatttcttgcaagactaggtcgtggagtgacgtggcatctaatttgttgcactttaggttgcagtgctagttgtaataggggtttctatatagaattccgtaaaaataacaaaaaaaaaaaaaactattttgaagtgtaaaaatgaaaaaaatcctattctctacgtttagtcgtaaattgattctcaattgtagagtgaaccatttgaaataggttatacgtcatatgtttgatttcgttgttaagtaagtttgactttgataatggacttgagtaactatgacttggcatactagcatacacagatatataaagtagtagactgaaagtgtactctttgggccatgggtaggggtgcacacgggacggagaatttgtagggagtgctcctcccgtccccatctccgttaaaaattttagtccccatccctgcgcacccttgcttattctttgctgaggacggtgccgggactcccctaatggaaaaaataaagtttattttaaaatttaaatgtataaaattataaaatgacctaaaaattaaaatattataaattatttactatacaatatattaattattatacgaaaacacaacttaaaaattataaaaataacattaatatactaaaaaaatacaaacacatattataaaatatgaaatattaatgaaaagataattaataaattaaacgggtccctgtgggggtggagagtgtcatccctatccctgttccgtttaacatttagcgacaaaaaaatattctcatctccatcccattccctatttagaccaaaaattctcgcctcattaagagtgggtctctacaaagcccattcccataagagtgtcaaaatccaatatttttgtaagttagcctaagaaaaaaatgttgcatccctagccgtgggctgtggtactattttttatcactacaactaccacaaccaagtgaatcaataacataatggtgatggtataaaactttcaacaaaaacactcaatttcacaaaaattatatatatttatttgattaaattgttaattgtttaaaatacaaagttgagcttttggcataggcagcacaaagagtgtcatgcactacttggccagccaagaattgatccacattttatttattccttgcaagtaacaccaaagatatttatttttttcatagaaaaactcatgcatataaattttaaaaattaaaaaaaaataaaatggtttcccaagtggtacacttggtcatttgcatttgcttataagaaatggttatgttagctcattttggcatataaacaagaaaaatactaaaaacccaaatgtgccatgttaggttaggttagaattgaattctacacattattactattattattttttaataaaccaaaaacaataattttcttttattggcatgaaataatttaaaatctcaactaaattacaaccaatattgttttgaatcataaataaccaagaaaaagaaagaagacaccttctccttttggcattggtgagaaaatagttttccttttccaagttttaagatcaaacaacttcttatatatgttctccttttttttctttctttttttaaattcttggtaaaatgaaaaattaaaaaataaataaataataataataaataaataataaatattagaccataaattttgcaaaatttactcatcgaactatttattttttaaaaatgataatttagattctgtattttctaaaataatataaaatactaccataagctcagtttttttttaatataattaacttgaagtcaatttctaacataaacaaatacaaaaaatataactaaatttgtcataacatctctaatagtattatattttattttgacgaaaattaaactcaaagtatcattttatacaattttaaaaaatatataatctaaattataatttaacaaaaaaaaaaaatctaatcaataatctatataaacacaaaatataaaataaaatttaccaaataaatgtcaaaggtgagatgccaaaaataaaaagtttcaacatggcaaataagaaaataaagcaaaaagataagggtaatttggacaatagactttttccttgttcaaccatttatttattaattattaataaattaaattattttcttcccatttaaaaaataaaaatcaaatcaaataaaaatatattaacattgaaatgaacaactccacccattatcgtcatcttcatcttcatcttcatttcattcaacattctcaactatccattttcatccttcgctttccactcaaacaaacccttctcttcattccctaaagggtcaaaaccccatatctcaaaatcctcacttttcacctctaatggcgtctttcaccatttcttgataaagcaaaatttggttcgaaactcagttcaagactcaaaatagctttaatgagttttaatattgttatagtaaggcttgcgatctgatttttgatattcttttcttttctttttagatctctaagtgaagaagaagaagaagaaaatgggtagtaaatggaggaaagcaaagcttgctcttggccttaatacttgtctttatgttcctcaaactttggaggattcttcttcaccgtcaaacggcgccgtttctacgagactatccgatgccgctttgccaatccaacctgctctttctcctactgatcatggctctgattaccgacccaccacaccaaccccttcttcttctgggcttcgcttatccaaaagtggaactaagtcctcaaaggtttgcattatcagatattatttgggaattcaatttttatgtttaaagttttcatttttaggttttcttgttcttaattatcaaatggtttgtgttcttgttttctttatctgaatatccatgtttagattcttagatttttgatccgattatactttttctttagtattccttttcttgtctacaaagtaaaaattgattcattttactgatatagaatatgtttattctttacattgttattactaatgttttattttactttttgctcattgtgtctgttctgttcatgtggggtattgatgaataagatgagagagagagagagagagagagagagagagagagagagagagagagagagag

SEQ ID NO: 186648 - DNA, 2270 bp, Cannabis indica
cttatttacaattatactctaatgtatgtacatgatagtaaaacaaggaaataaatataataatattgatgatcatttaatattttattgaaaaaattcaaaaactattattttttattattttagtatttaaataatggtaatatggtaaataaacaatgtaaattttagtaaaaatcaataaatcataataattattgatattgtagtaaataaaaatgtaacatatattgtgagctaaatttagcacaatactttatcttgtgccaaatttgacaaatttttaacatataccaaatttaataaatttttaaaaacattattggagtgcgctagaatataaaaatatatcacctttttggcgccttactaaaaatgctcttaatattatttgtgtggtataaaagaaggaagaaaatggctatgaatttctaattttttggacctacaaaaaataatccctccatatatataggtggatatggattgactacaaaatattatcaattcattttttaaataattaacatttttttttttaaaataataaagaaaagtaatcaatctatcacctcctctcatattttcacaccttatatacaattcatccctaatctatttcatctttcataccaaacgaaaaggtaaccctatactaaagtttaattattgataaatattatgtctgtgattgaaatttatagaaaaatagaatatttattatgtatgtattttgtctaccatgatagaatattagtaaatagttaggagtttgaatcctttactggtttaaaattaatattatatatgcaatagtttatattgctaaaagtatatatatagaaaaatgtaaattaagttacaaaatacttttttagttcttttttattgattatttacattattagttatttagacccttttcaataatttttctattatattttttaaaatacaccataaaaatcagaattcctttattttccaacatatttttatattacactattcatcaatttttttaaaatacattacaaaaattctattttattagagcgtctactgtaagtggttgtttaatatttttaaattttttctattttacaaaaactattgtgagtgttcttaaggccatttgtaaatttttaattatttttgaataatttaaaatgccgaaaataagatttacatatattattacacgcataattatttttttatatacataataataaatcgtttaaatttgatttttggcaaattatttgatctttttttaagacttacaaagtgatgcttataaaaagaaaattaaataattttttttaatgcataaataaataaaaaatctatccgaaccatactttagagggactagtactataaaaatttcaaaaaatatattgataaagtttttataagattaatattattgggaattttcctgattacagaataatgtcgccgtattacgtactatagatacttctctgactataaaaataaaagaagaaaaccccacaattattattattattttttatattaattatattatattaaattaataataatagcttcctccatattcatttatgataaccccaacctcaacctcaaccttcaatcaattaaattattgccttttttttttaaaattattatttcaaacatattcaatttctcgcgataaaatgttttccacgttgcgatatctcctctaccatatatatcgtaatcatgatctgtaccactatatcacgtgatatataataataataagttctctctctattcagacagaaaaactagactggtctttttttttttttttttgtagggaaagaactcgttatcataaattaaaacatagagtcatttacaacaacagagtaaattggcggaggaatacactccaaccatgaacaagcttcatccacccctaatgcaaatttagccaaaccatcagcagccatattggctgtacgcttggcatgtgaaatttttaacattagggaaaaaggaaagaagacaagaaacatcaacaattaaatcatgaaaagatgaaaatagctgctcaaaggagaacataaagcagtgactaccatcaaggcatcagtttctatgtgatgaagatcaatatgcgagtagactagtacgtggtactttattacgcctactttttccaacaactactaaaacaacgttttcttttttttttaagaaaaaaaacgtaaaataattaatttaaagtaaaaaaaaaaacgtta

SEQ ID NO: 186649 - DNA, 2282 bp, Cannabis indica
ccaataataatagataggcacgtcctacgtggcattaaatagatactcaactcgctttgcttttcaccactgtgtcaaaactatcttttgactcgcttaagacagtgtttggtttattgctttttctaacgcgttgaaatgcctataactacccctaactaccaaacaagtccttaacagtttcgactctctttcctttcccactcttttcaaccatttctcaacttttctactcagagctcttcaattcatcagattcgtcattctagagagagagagagagaggctatttgtttggccatgttagggtttgaaagctcgtagatttcagctttcttcttcttctttctgggtatggagttcaagaaggaaaagcttgtcaggtacacttggtttaataattttattgattatttttggtttgggatgaagtttatgaaagtatttgattttgttgttttttgttggattcagagagagaactgattgagctagctcaatgaaattggatcttacatgtttggggggattgttaagtgtatttatgaaagagttttagggaattgacttgtgtgaagttttttaattagtaatgggacccatgagaaattgaaattttttgattgagaccttagaaagcttaatgttttattcattaattgtttgtttggtttttgattgagatgggtttttcacaatatgttgaacttgtcgttgatagttgtttaatgctttgtttggtttctgaaaatatatagaaaagtctatctgtattaaacaaatggactttgattaagattgggaatataaaaagaggggaatagagatgacttaagtttctttagttgaatagaatagaagctctgatgccggcttattggtgaaattgaagtgctccctagtactattggaagcaaaaacaacatagaataaacatcttttcttatgatttattaggattgttgaacattttcatgttatacattgtcatttgggatattgggaacgacttccttttcttgtgcttaaaagttaaaacttcagtttctgttgaaagacaacttccttgaggtccactacaattcatagggaaatgttctaacaatttttcttcccctttcggatttcaggttccgttcggatgggaatcagcaaaaggaatctgtgtggggtcatcatggtcctcagtggcttgataggtcatcatctacatataaggttccatcatcttcattactggaatccaatggtggagttcttgggggtaaaattaaactttctgatactttcaaaataggtaggtctaaagtatttccagaagatcacgagccttggcgcaacagaattcttgacccaggtggtgagatcatgttgcaatggaaccgggttttcattgtttcgtgtttagtggcactttttgttgacccactgtatttttacttgcctgtggtgggagggaatgaaaactcagcatgtgtgaaaacagactttaatttacggattgttgcaacttgctttaggactcttgcggacatattttatttattgcacgtgattataaagttccgaacggcttatgttgctcctaacactcgagtgtttgggaggggtgagcttgtgatggacccaaagaagattgctcgtaggtacctgagatctgatttctttatagacctcattgctacattgcctctgcctcaggtactttttagagttccattttctggtttttctttctgcagattttcttacaaatgtgtaattagaaattccttttctgtttaaataggactttgtttaaggtgagggagattagtgggtacttgctaataatgatgcttaactgcatatggaccttttcctcttcatttgttttcttggaaatttttacaattgcagaactttttcaattttttttaatgaatagatggggggtgggggaaatgctaaagtgctatgcctcaaattcggtagaggaaatttttgctgtattttgcgaataacgttgatctatactgttattttgtcctaattttttaatacattgtgtagattgtcatatggtttattataccagcaacaagaagtgctcgaactgatcataacaacaatgccctcgcactaattgttctgcttcaatatgttccgcggttatatctgatttttccattaagctcacaaataatcaaagcaaccggagtggtcacaaagaccgcctgggcaggcgctgcatataatctgctgttgtacatgttggctagtcatgtatgcaattccttttt

SEQ ID NO: 186650 - DNA, 5876 bp, Cannabis indica
gactagtctgcttattgcagttttttttttttggtcttgaatatgcaagctatcacttattttgcggttagatatgctatttatttcataacatgcaaatcaagacttcatcgtccactgtcccaagactattggttgcctcatgtctgcagtttttcttggggcaatatatgaatgacatgagggagcttttcatgtgttggcctttcgctttaatcactagtctcccttccactttcaggggaagcagtttcagatcttcaagttgatctggaaacgatgcatgccgatgtaatggatgaggaagttgcaccacaagactgattacaagtgaaacccaactcatctcttttgatgaacaactcatatgatattcacatttttcttcaaccattgtgggagactacgttatttaattaccagaaagcaatttcattattgcaaagaagagactatttgcttaaatggtaaaagctgattgtaattccgatgaatcaataacataagcttcatcacacgtttatttgttttcctttccccctgcatctgtcttacaattcatctattggtatttaatattcaaagtggcttgatcatgtcaggttggtcagcacttaattagcagcagcaaccagaggatgtagctcattaattttgatctttttattgatattccgaaaattaaataaattggaacgaattacccaatagcccattaattttgttctttttatgctggatagtgttaagaattaaaataccagaagttgtaggtgctggatatgatgtttctaattaaccatatctaaccacaaaagaatcaaagaaaacaggaaaaagccatatctgaaacaacaaagatacttagctccaaaacgacaatgaaacttcagccccttaaacaattttttttttttttgtcgcacaaaatactaaaacgatattggaattgaattgtaactcaaatacaatataatgctataacacaatcgtttttttttttttggagtaacacaattacatgctactacttgctttaatatcttctgaatacacaagagaattccaagaaggattcctcggaagaaaagtgtcggagatgtaagtgcaagtggggatgatagtaagggagcgggatttggcgtgagtaaaggcagcaacacagaggtgagaagccagacctaagcctctcttggaagaagggacaaaggtgtggagcaattccatcactactttgcctttacctttatctctaccgttgccaccatactcctctgtctctctctccacatactctaaatacgccttcttatcttccgtctcgaacctccgttgggtcccgttccacacaatttttggaacctccgccggaatttctcttcctgccatctctctctctctctctctctctctctctctctcgtttctatcaaggtagctatttttgaatgaactatctaaaatccaggtcacgtgatacagtcggattgagtgagtgagtccaccaaaatctcgtgcccaccccacttcaatcttaatccatgtaccatgtccatgccttttgccacgcctcacacgtgtccttcacacaattaccattttccagcttcgctcgcttatacaccacacacacacgcaccatccgtgccaaactcccgattcgcacactctcgcacgcgcgaccccaaaaccctaactcactcgcatgttcgcacgtttcttccttttcatctgctccgacccgacccgccaccgtccgccggtttcttagggtctcattccccggagatctggttcgccgttctgagacgaagaaggacctccactccggccgccggaatttttccgtgcggacttcatcggaggtggttagggtttcttccgtgggaaaaggtggatctgtttgagaattctttgaataagctttagtggaagacaaccgaaaatgttaggattttgaagcgtcagttttcggtcaaaaagctggaaaacctgtccagtttgttatatatataaaaaggtaatatacaccttttaacttttccttaaaacttgtttgttatatgggaaaaagttcattaagtttaggaagagaattcgctgtttctttttggttgctactgaaactgtagcagatgtcaacacagtgaaagagagaagttttggccttttgtttgttttttgttgcttctttgataatttactctaatcacaaccaatttttttttgcaacggaagatgattgactgtttcaactcctatagaattagtagaattgagtttaagcttaattcaataagttctctttttctttttgagttaattttatctttgatttgttgttatcattatttttttatttatactgtgatagtatcgcaatgcttactgttatttatcaacaattagtgaaattcagttcagactatggcattgttgttacatgaattaagttgtgaggataattgggattaaaagagaaagaaggttattatggcttcagaaatgcacaagttaattggagctagtgaagaagatgacgaggaagaaatggaaatggatgttaaagaggaggatgatgatgacgaagaccggaggaaacatgctgctgcttctgcttcagtaatggtcggttttgatggagggatgccaactagtagcagcaataataatcatcagtttcaagagctacagcaagtacaagaagtaagtaccccaggtggaggaggagctcgtaggtgtaggccactagaagagaaggagagaacaaaattaagggagcggcatagaagagctatcactgcaaaaatcttggcggggttacggaggcatgggaattataatcttagagttagggctgatataaatgatgtaattgcagctcttgcacgagaagctggctgggttgttcttccagatgggaccacttttccttcaagatctcagcctcaggtaattatactacgaggaaatttttcaatattggtcatattttttgctacattatttaacatacaggagaattagaaggccagaaccagattgtgaaactcggaactattgtagttctacctacgtgctagtcatggaccattatgcattttatggacacatgattagttatgtaggacttttgctgggttattgtgatagccacttctgaagattgttagggaatgagttaaataaagatagatattctcttctcttttcagggttcaagacatgctgttgtcaattctactgtagctacttcatcatctggacatgcagcaccacagcaaactctaccttccttaaaagcttgtgctgctggctatcaaagttctgtggattttaatgcaaatagaatgaaaggtgtttatatgccctgctcatcaccatacgatatttccacaagtgctcgttctcaaacttcaactatggtgggtgatggaggggaacaaacagagagtcatcctcatattgtgggctccattgatcccattgatgacaagcaggtagtagagcaaatctctttggagactatgcatacttcattatcaaactcttttggcatgtcgttgctgattttaattacgctgacatgatcttttatatgatcactactcatagctcgtatgacgtcttgaacacatgataaataattctttcatttgtttgcagattatgtatagtctatttgagaatctgtgatattgatttacctgtattcatattaaatttgtagcattccttttatcttgatgtaatttatgaaacttgtgagttcctttatggccttagcgtttagcagttttctattttgttctacaggttgttgatatatctccgaagttatcagagcgtgatttttctggcaccccttatattccagtttatgtaatgttaccggtgagttttgtaatttgtatttcggctgaatttttctttttaagttttcatacacacgtgacacccccatccttgtactgtctgttgacttttattgagtggcatgcatctttttagctgccatcttaccttttatcattaccatgatattccatatgctaattcatacgctgttgctttttgagtccatcccaattcccaatttattagctttcttcttaattttcctttgtttatggttattaattctttttggtacttgtgtagtttggataattaaatttctttctggtaatttttagtttacttttcatgacttgctcttttgatggcagttaggtgttgttaatatgaaatgtgaactggttgatccagatggcttactcaagcagttaagggtactgaaatcagttaatgtggatggtgtttctgttgattgctggtggggaattgtggaggcacatgctccccaggaatataactggaatggttacaagagactctttcagatggtgcgtgagctcaagctcaagttacaagtgagtttaaatgagctttactgttcttcagtgcttattctagctgatgtcccttttttttttcatggtgaatactatagagccacggccatactaatgttcacttcctttgtaaaagtaactgtttgtaaaatgatttccatatgcttcagtatctagaagacaatctaagaagcttgtgttttgtccttttgattgatttatatagttgtttggtatgtgtgtttattaaatcagattatctgatctcacggaaaagtactaaaaacttaaatcacatttttactacaaatggtcaccattgatagttgacagattttgactaagtttctatgctctgtatgctagcattattctttgaaaggggatttatttattctcattcaagtttttttatatacatgaaaattgagtatcgtgtgcaaatattttgtagctgtagtttgaaattatttttgtggacttctgagtaatggatccccttgatctaactaaaagccaacttgtggagcatattgatgtttggaggttggtgatgtgcttttaaatgttttgtttcgtgtcatatggaatcaattagcagaataattatgatgcatatttagattccttattcagatgatgctgttctggttgattctcctggcatttatttttagtttgatagttaaaatctcttatttcaggttatgatgtcattccatgagtgtggaggtaatgtcggtgatgatgtttgtattccactgccacattgggtggcagaaattggtcgcaacaatcctgacatctttttcactgatagagagggaaggcggaatcctgaatgtctctcgtggggaatagacaaagagcgtgttcttagaggccggacagctgttgaggtattctatttattatttaattatgaggatgactgttaacactgcttactgtttaaatgtttctttttctaaatggtacaagaacagttttacttttaaagccataatttcttttttccctctctctgtttttccccctctgtttaattgcgtacatgtgtttttactttcttctcttttatcttctacatgatgaaacaatgttaagtgcctgctttagtaattgccaagttcttgtgtacaacagtaatttttttgagaattgtcaaaaaagatgaaacaccataaagtttatcattatttcctagcttgtcatgaaggacctcagtcccctattcagtcactcaattttagcttttcttttttagcaagctgtaaactttgacatctcatgcagatttgaagaccttttcttgccatgcagtgccctgatttataaatctcctgtgtacccttttctttttttttttttatttttttttttattttttttatgtatttgtatttcagtaaataatagattactagtgctctaataaatcttaagattgatgcaggttct

SEQ ID NO: 186651 - DNA, 4023 bp, Cannabis indica
atatatatatatatatacatcctcctgaattttctctgcaaccaaacgaatccatagtttttgctatattctttttgacttctagtacgggagacaggcttgaattcttatatgctatatctatcaccaacttaattgaacaacaaaggaaaataatcaaaacgaaagacacggcttaatgccctggttactttatggtattttttaagctttggaatttggattatttctctcaatttatctattttgtagctctgaaaaataaatttgagagtattttgaaactttatcactcttaagtgttgcagctgattttatgggattagagataccagggaatttgtgaatttgtcatcattgtttgattttaatttttctagattcatcaataaaacctttcaaaaaaaaatcatgaattaaactttcaaaggagataggtaggtaggaacatgtatgcgataaataatttcgtagttatggcgtctgtcctctgtaatagttatggcgagaagatttttgacgtattcctataatttatatgcaagctccgattggagtcttaataaaagcattttgtgttgtgatcacctagatgagtttttgaacagatcgattttgatttgttatttttagattaaacggtacgaaaataatctttaagaaatcttctccagctgaataatatgaatagaaaataattttggtcaatttcacgtcattcatatgtggtactacagctatttgtttttcctattatttttattaaataatttagcccgaagaaagctccaacaaataatcggactttgtgtgctcactaatttgatgcaaaacaaattatcttttgtacttgttggacttttcggtatcaatgtgcaatcttttgttttaaactttgacccattgttaataaaattttgttttagaattatacttaccccactcggacataaattagtttcactggaaacattttaatattgtatttagttacaccacccaaattttaagggaactatggcctaagcaaaataagttcacgcacgcttatggtgttagttatatctcttgggcaactttttttaattggatattattaaatagttcccctattaaatatgtccatatatagataaaaatctggcatatttaagtgtgtatggatccctagtttgcttctcaattcatgctacaaagttataattgtccatgaatttgtgatgaatgctcatattctgataaacagcataacttaattgctactgactcatgctcgaatactacagtctagttttatcttttatgtagcctattgtacactgccaacttttatgtagcctattgtacactggcaagtcaatttttgtgagatcaattttcgaattgattatttgtcttcaagtgcaggatggacgtcgagtgcatgtgattgaaagagacttaacggagccagacagaattgttggtgaactactgcaacctggaggctatctcaaattaattgagctgggacttcaaggtaaattctgtttgaacttggtaacttgctggattatttgtgatagtacaattatgtacttgataatgagtagtttcagattgttttattccttcctatgaaggtagaaatagtttttatatgaaggtcagattgtatctaaatgcagattgtgtagaggaaattgatgcccagcgtgtctttggatatgctcttttcaaggatggaaaagacactcggctgtcttaccccttggagaaatttcattccgatgtggctggaaggagctttcacaatgggcgtttcattcagaggatgcgggcaaaagctgcttctcttccgaggtatatattttgtcattgtatatattttgtgattgtaaattaatgctgcatctttggctttttgtttgtcaactgatatataatctcttgtctttcaagaaattgtaatactctttttatatgtttttcttctttagtgtacaactagagcaaggaacggttactacactgcttgaagaaaatggaatagttaaaggggtgcaatacaagacgaagactggccaagaaatggcggcatatgcgcctctgactagtttgtgatggctgtttctcaaacttacgccgttcgctttgcaatcctaaggttgtagcctctcactcttgtcagattacgaagtttgtatgaagcagttaaatctaagtagagataaactggtttctagtttgtacatgagtcagccagtttttcctaggaagaaagtcctcgagaatttaaagttttgtctgttttgtttctgcaggtagatgtgccatcttgttttgttggtttagttttggaaaactgcaaccttccatatgtaaatcacgggcatgttatactagcagatccttctcccattttgttctatcaaattagtagtacagaagttcgctgtctggttgatgttccaggacagaaggttccttctatttcaaatggtgaaatggcgaagtacttgaaggctgtggtggctcctcaggtttattatacttgctctactgcttcaaaatattttcttctgtttgcaacttttcatgtcactgaattttctagctattgaattaatttgtttcaaactgaccacattgtgtcattttgcagattcctcctcaaatttttgattcctttgtggctgcaattgacaagggtaacataaggacaatgccgaatcggagcatgcctgcttctccccaccctacccctggagccttgctaatgggagatgcatttaacatgcgccatcctcttaccggtggaggaatgactgtagcattgtctgatattgttgtccttcgtgatcttctgaagcctttacatgacttaaatgattcatataatctctgcaaataccttgaatctttttacactttgcgtaaggtaagctcaattaacatgttgatgtcataattgaactggctctgatctctgatgttgccattttgagttgcatgatgcaatatcataaaatgtcaagatttataatagcgttcaatatagtttgctcaacttattaacatcttaattcttccactttgcagccagtagcatccactataaacacattggctggagctctgtacaaggtcttttgtgcttcacctgatcaagcaaggaaggaaatgcgtaatgcttgcttcgattatttaagcctaggtggtattttctcaacaggaccagtgtctcttctttcaggattaaaccctcgtccactgagcttggttcttcatttttttgctgttgcaatattcggtgttggtcgattgttgcttccatttccatcgcctaagcgcatgtggattggagcaagattggtttcggtgagcataaattttcgtatcttcttctctctaaattcttcccatatgttttagggtagaaaacttaaagctaagatgtttctttgcagagtgcatcaggaatcatcttcccgattatcaaggccgaaggagtaaggcaaatgttcttccctgctactgttccagcttattacagaggccctcctgctaagtgaaatccagttggttgaacattacaaagacacaaccacactagagaaggcaaaaagttgagtctgttgtcatcatacacattcattatcctatttgtacctctcgtccccctccccatgctcaaaatgaatttggggaacagtgtaatgcttcaccactacttgtgcagtatgcgaaggttttagtttctaggactgttaatgttatttttaatgtataaatatcatttcaaaatatcaaaaaaaaaaaatgtcatttcaaaatccaaaatttgtcacctttttcttgttggtttctttacaatttatcatagcaaaaattgtctttgataagtcaatcaattcataaatcaaaacctgtaatcttttcgcatcaccgaaaaccagctctctgaattttactttttcaaaagaagtttataaaggcataacaattttttacgataaagttttttttaatatattttttttt

SEQ ID NO: 186652 - DNA, 2587 bp, Cannabis indica
gagaaggtgctaggcaccagtggctaatagaaatattctaataattactttaatccaactttaaaagttaataataatgtgaaaatcaatagtgtaaaggtatatttctttgaattacccagaaagaaaaaaatagtgtacaattatatttacgaataagttctttaattttgggcattcttgcatgaaaaatatagttgaaggttacacagttaaataacccaagtaaaaaagtactcattaatttgcaactctcaaagaaaggcaaattttgttattattttttttttccttttcttcatatgattataagagtacacgcgagtgtgtccaaaaaaaattagaaaaacgtagagacattgatcaatcaatatactaattaataaatttggcccctagttttcttggaccatgaaaaatgaaacatatttagtttaaagctagggtacaatttggaaaatttgatttgtagcttaaatattctaatattaattaggtccctaatttaaagtcacatcataaatttaagattctcatgcttttataacatcctataaaaatttataaacgatcaaaaatttccatgcaacaatcgaactaaaagtgattttttaaaaagtaaaattatgcacacatgtttttattagtattataagtggccatcatgtgaacatgaaatgggtgatagtttatttaaattactccctcacgcatttcaaattgagaatggtttcacaaaccatcaaattaagtaattcgcaatatttttacaaaatatatatgatttttttattagaaatatgtatatatatatatgcatttattaaaaaatttctgtttaaaggaggtggtcctttaacaaagctttctccgccgcttaccataattctcttcttttctcttaccccgtatgccctacacagtgctgaagtcatccccttctctctggctttattaatttctctgtttgtactttctttacataatattttatttatttatttatatttgtaagaaattaaacaaaactacaaaggtacactacgcacccctttggtaggttagtcttctttatttttcaataaaaaaataaaataaaattaatatagtaataaataaataaaaaaaataattcccccaccttttcccttacgtaactttcatttagattatatgtatacatatatatatgtacgtatatgtaaatgctaagggttcaaagccattgtttcgatatcatattatatgaaataagttgaataaataaatttatttttaaattttatttcgtaaaaatgataataagatttatttcctaggtcaaatgctaattaatattgaagctggctagggtttgatgagtacccataaaaaccgggggtaatgcatgaaaaactaccagttcgtatatatctcagctggtttttcttgacagtaagtaaaggtacaattctgaagtgggtttctgaaacttgtaatcctacacatataacttctatatatttagttttctttctcataaaacaaaggttgtattatttaaataatattttatatagatgtagtagagtggtccttcacatgatatttggtatggaccaatctaagatgctatatatgggttctgtaaggtgaaaattaggagtgtgtgtattgcttttagtatagctctaagctcaatagctacttaggttgataaaattttatgcagcttttgaagttttttatggggaattaaagtatacagctagctagggtttgacatatttgaggttttcatttttaatttttagttaattttttaagaagaaagagatccaaaatatataatttgattatacatacatataaataatggagattaattattggagactactacatagctgatgttgggaatttattagttatttataagaaagaattaaagaaagaattaaaaacaatgtaaaccactaatgattaatattaatagttaataaacgaacaaaaaaatgccactacaatgtatacagataataatgcagggctcttgatgatattatattcataataaaaactggagtactccaattatatactcaaaattaatttacttttaagagatcgatcgagctttattattagtttccttaactggaagtattataattaagaatgtttcaataaatgataatttatgtacatatatactaattattagtttagacatccatggaatatttttttacagtgactaaacttaattatacgcctagaattaatgcatgtgaacttttccatcagttttgcatgttcactaattatctgttatctaggttttattttatttttaaagtacaaaatacataataattatcataattaattgtcaaaaaaaatattatcataaaaattaattattacatcaccgggacaatatcatatttttacatacgaatcagacggacactgttgattagggaaattattcataaatatgtactatttaatatgagtaataacgaagattataatgtcatattaaaaaaacaaaacaaaacttaaaagatacacatgaaactgtaatttaattttagtttagtaa

SEQ ID NO: 186653 - DNA, 2890 bp, Cannabis indica
catgatcaacatgagttgttagtagcttacaagaccctcaagtttggcatttgtgatagaaattcaggcactggtccaactaagtcgttgttgaataagtccctgcacatacacacgtgcatgtgcagttgcgttagtgtatatgataaaatcgaatttaattggagttggtaatatttatttacaaaattcatatattgtgagttcatttattacttacaaagtttgcaacatagtgagctttgatatattcgaggttatctcaccactcaaccaactagatgacaaattcctgaaattacatatgatagttacaattattaatgaaactgctaataaaattaatggaatatattaatttaaggtatatattaatttagtaaagcttacaaagatatgattcttggaggatcagaaccataactacaatttacacctgtccacacgtatttttggggaccacagggatcaccaccccagtttttctttactccgtaggttgactttatcatagtaatggcttccactaatacacacacatattaataatgataaagtagtcaaaacaatcattcatatgaccaaacaaacaaacacaaacataaaaataagataattaaataaaataaaaggcatccatatatgtatcttaaaatattataagtacgtaccatcttcttcgttggtttctaactgtgaaaaatcaatcgaagtgtacaactcaatagcatttaggatcggtggcaaagttgaatttgcagttttgaccaaggtgaaattgtaactaccaaaaatatttgaaggtatagggagagctttatcaccgtataaagtatccacgacaaggtatttaggggcataaggcccaaagtagtgttctccattcatgtagatatcaaaagctctatattcgttagctttgagcttctcaacttcagcaaagtgcaaaaatgaataaacggcctttttattactgtaagttgaccactcataaattagtggttcatcgggttttgttggtgtgatggcagtactcatgaccacaggtggtaacttgtagtttaagctagggttgacagcgagacttgtgcttaatgtagtccagtttgctccaaaattattcacatcataatatctccagttgcgatccttaatatcatttggatacctgaaaacaataatcataattagagttatttggactaaaaataaataaatcatatcgctattagtgcaattaattattctatctcatataatttagaacattgctattagacatatgcggtgtctaacaccttctataggtggcgccctacgattaatttattccttacagagaatttgatacttaattacaccaacaacaacagtatgacacctagagtgctaagcacccgtaataccttttaagaattctctataatttgttggaatacaagaagctcaagacagttaccatcctagtcagttaaatcattagacaatagttagttactaatgccaatctgttatgattgatcaattctttcatttctctctctctctcaaagcttttttcatcaaaactctgtctgaacagagtcttcacataatttaatataattacttttatggaatatcgctaagtaattctaattaggcgcaattctcgaaaataaaataatggaggagagtaaagacaaacctatatgttacattggtaattgaaccaagatccatgcgcgttaagagttccaacgacccagattgggtaacatatgtgttattagccagaggccttaattccaatgctgaaataaatggtgtcccagtgccattactggcaagacaaacacgtaaatgttcatttgaagcaacatgtatgatctctttagtaagaggtatatctataaaaaaagtgatactgtcccaaacattagcaccaatgtgtataaaaaattcaggcagataatttttgccatcataatttccataataaaatgttgctcgaatcaagtatctagtgccactggtgacgtttatggtgtaacagttccggattccttcagggaaggctctcacatgttctaactctttttgatatcgagttacgaaatcaggcggaagactagcactgacaccggctgaaacgaaggcctcatcggatatgtattttatgcctgtatctggctcagaatagccgcttaaccttttgggtaatccacaatcaatgctaatgaatcctgagaaacaagtgtatatatatagttatcaagcacgccttagggaacaaaataacgacaagagattacatactaaattggataattggatgtatatgttgtcgtatatatacaaagcagttataacttaatatatacctgattgatcatcctgcgcgtgaacaagagcaaaaacgagaagcaaataagcaaagagagatggaaggtaatgatagaaaataatctccattaacctaatatgctactgaagtaccacgcttattttgcttgacatataaatgcaaacaccaaagtggtgatggaatagaatataggattttggacctttggagtggctaaacaaaactgtctgggtcaacgtgtgtacttgcttcctagaattagctgattaaccgattaaattctttctttttagttaaatatcaaagaaatagttggccctgggcgtttattaaataaactcaattagttgatgtatagttttacatcaaactactactggaaaacttcaacattattagagatttgtagaaattaatgtgtaataattttttcaacacaaagtatcaatatgtataatttttaatccaaaaatcagcattttattaattattaaattcagttaccagaatataatattgaacgtattaatatatttttttttt

SEQ ID NO: 186654 - DNA, 3289 bp, Cannabis indica
aattatatattagagcacaataagaaaaattaatgtgaaaatatcacaaaactacttttacatttcccaaaaaagaaaaccatatatataatttttttttttaataaaggagaaagtgaaactcatagaacatttttttctactccatcctccttcccacctcagttttttttttctactccatcctccttcccacctcagtcattttttatgttccctttcattttcaatgttctagaaatatactcatataccttttctaaccatttttgctttttaattttctttactcaaactataaaataggtagcaatgccatcttccaagttggtaaagtgaaataaaatacatatttttaaatgaaatggaagtagaaaagggtagagtgaaagtaagccaaataaacggcttaggcttagagttgagtgaagcaaaggaagccgccgtgtggtccccatatacaggctgtcttccaaagctaacactaaaactcacaacacagtagtccctctctagaaaaagtcttctacttcttcttctttctctctctaactttccttttctcttcttccaccttaataccatcacttcttctcagctcttttcttcgttttgttctctctcagaacagagaagaatctccaaactctaaaaacaaagaagaaaaaatcgaaactttatttcatttcatttcatttgcagagggatttcattatttgtgagcgccatggatactcatggctatggcgtctccttcttattattctttattctttgttcctttactaactctttcgctgcattgcccaacaacccatctcagaaaagtaattctacttcttccggttctggtcagattaattctaactcggttctggttgcgcttctcgactcgcattatactgagttggccgagttagtcgagaaagcccttttgctacagaccttagaagaggccgtcggtaaacacaacatcaccattttcgccccgagaaacgaagctctagaacgccaactcgaccctgaattcaagcgattcctgctcgaacccgggaacgtaaggtctctccagacactcttaatgttccacattatccccaaacgtatcggctccggcgagtggcccgcttccgattccgttccggttagacacaaaactctttggaacgaccgcgttcatttaacgagcaaaaactccggcgaaaaggttatcgactcggccgagatagtccgtcccgacgacgtagtaagacccgacggtgtaatccacggaatcgaaagtcttctaatcccacgttcagttcaagaagatttcaacagaagaagaagtctccgatcaatctccgcagtattgccggaaggtgcgccggtagttgatcccagaacccacaggttaaaaaagccagttgcccctgttccggctggcgcacccccagttcttccaatctacgacgctttggctccaggtccatctctagctccagctccggctccgggaccaggtgggccacgtggccacttcgacggaatggctcaagtcaaggactttatccaaaccctcgtgcattacggtgggtacaacgaaatggctgatattttagttaatctaacgtctctggccaccgagatgggtcggctcgtatcggaaggttatgtaattacggttttagccccgaacgacgaggccatggctaaactgactacggaccagcttagcgagcctggggcaccggaacagattgtgtactaccacatcataccagagtaccaaaccgaagagagtatgtacaatgcagttaggcgatttgggaaggttcgttacgataccttgaggctaccccataaggtcatggctcaagaagctgatggttcggtgaaattcggccatggcgatagccaggcttaccttttcgacccagatatctataccgatggccggatttcagttcagggcattgatggggttcttttcccacctaatgaggaccccaattcggagaagaaaacaactcctcttgttaaggttgtcaccaagcccaccagaagaggtactgttctaatctcatagtattttattttcatttgttttggttaatcttaattaattatgttcaatgaaacagtgaacaggattgattagtatcatatcatcatcatgggtagtttagatttagtttctgtattactatgattgtgtctttgatcaaagatgaaaacttttttaaatggacttgggaatggtgatggtcggtgagaactgaagaagtgaaaataaaataaagattataaatgatatcacgggctgcactgtcttctaaaaacgctgtcgtttaaggcaagaaaagcaaaataaaaaagctatgcctgtctatgtcccactaatgtatattttgccaccgagtccatgtgactaaaaaatatacctaaaccaaggtgttttccccaaaagagtccagctttgccccagctgtgtgctgagattaggtttggtttttttctcccaccaccaaaaaccttagatgcccatcaaagcaatttgtataatattaattattatattcgccaccatcccttttcacattctcctctcaatcatattaaaatttaaacaaattagctggcatgatttggtctgtcttcttcttctagcatattttattagctgaccttgattttttgtatgtgggttatttaaggcaatctttttgagtaaagccaaaataaaaacactgcaaaaatcattggccttaatatatttaatatatatatatatatttgttttatgttttaatctttctcgtttgggttgacttgttctaactctctgctattttttaccttattgcaggaaagttgatggaagtggcctgcaatgtgctgggtgtttttggtgtatcatcttcatgtcaataaagaaaaaagtttctcttcatttttaaatactcaaaacagggaaaaacaaaaatgtctttgtataaacaattcataaatggaaaagattaaaaaaaaaaaatttgcccttttctttgtttgtgtaattttgattcaaatacttgatcttcccctttttagctgtgaacaagagctttgctgtgtgtatatatatatatgtatatatatgcagtgtagagtggccctgcctactactaccactaccaccatggaagaagattatataaagagaaaagaagagagcttttgctttgaagaattttttttcttcactttatagtccttacagaaaaagagtaaaaaacaagtgttactgttgtttttgtcataagaaaat

SEQ ID NO: 186655 - DNA, 3123 bp, Cannabis indica
cctaaacctaaacctaaacctaacctaggctagggtgtgcatataatatatcaataatattcttttaataaatgtaagttaattacttggtagtaataacaattaataaggaaggcaaggcaaggatatatatgttggccccgccggctatgagaaaaagtaggttttgaggacaactttagtctttataccacgaaaggcacgtccgacccaaataaacaaatatatatgaatttacaactgtaatgagttttgactcaattgattactaaaaagttgtagtcatactacattgatggctttagggcctacggattatttaggagaccaaacaaagccatattactcaagtaacactccatttctggtattgcgttattagtataagttttctttacatatatgtaaaatagttaaaaaaaataagaagaaaaagaaaaactagactatataaatagaattcatattatacatatatttacatacatacataggcatatactttcgtttcttatataaaaaggtcggtagtagtagggtttataattttttttttctttcataaaaagcaagaaaaatctgagtaagaaatcttgaaaaagttgatttaaaatgataactggggtgatgatgatgatgattatcatgccaccatgatgaacattctcatgatgaccagcatcacggccttgtcataatataattggtttatgcggcaattaaactttaagctgtttttttttcttgtttaattaaaattacataatatatcaatcaaattcattttattatctccactaattaaaaaaagaatagtaataaagcaacagttggcacatcccattcaaacggaagagattaatgaagagataggtgggccccacacacaccccttcaaattacattgtgaaaataaagtagggctctcaacattaattaaatatatacgtaagaattaattgagatttagatttatatttaggggaataatttgtgtccaaactttgaaaatatattagataacataaggaagaattgatggaatggaaagtgtgaatagatagatgtatatgtgtgcgttgtagtaaaggtgaaaggagttggaatgcacacgaacacaaaaggaaggaatggggaatctgaattcacacgcgtgtggggcgtaagagctatatatataaattgttattagtatattcaatattatatttagtcatctttatattatattatttattaaattaaaatatttaagaataaaaatctgaatagtatttaataatttaaagtatctcaaatattaaattgcatcaataataatattcgacaatttaaggtacctcaacaagatttgtgagaagtaatttgtttgagagtggtgagggaatacattgtctttggttggcctccgaaacaaccaacaatggcaagggagagcaatcccatcaggggtttggggttgggattgatgtaaccaacggcacagcgtgagacacgtggccgacatgcagatccagcgggagccaactcgtggactaatctagctaattgctaacaacacaataccaaagaatatacttcgactttgggttagtggggggaacaatgatgatgatgagccatttcgccacaccacacccaaaatctccttccatgtacccacacacatgcatacacccaaagaaaagaaaagaaagaaagaaaaagaataatcgaccccacacaccatactactactactacactcctctatctttttgatttataccatattaaattaattatcaaaaaatttccccctaacatttacataatatatatcaattaactctaattttattaaatattagtaattattaagttcatggattggatgacattattaaagtgccattatgtagatatcctattcatcatttgttcataacactatatgatatgcacaaattttttattttttcattgtttgccttttataatgagaaaagatttagttatttgaaagttattgtataatggcattgactaagttagttacacacaaaattaatatttttaataattaatattagaattaaaaataattattttaacaaagataaacatatcaaattagtaattaattgtatttcaacaaaaattattatatgcaaatctaatcacatagtagttttttaaattatacaaaagaaaaaagaatgagaatgaaatgttaattaataattgtaaaatatattgtttttgtgtttatttatttactattattattttaataatatgattttttttctattgttatttttttttgaaaaataaattttaagggtgcaacacgaggactttccacgcttaattgcagagttctgataagattcagtgcattagtagtggtatgatcgcacattttctattgtcattttagtgtatattatcatgcaatttttttatttgaacaaaataaataattccattcaaaaaaggcaccaagctaaataaatccagcaatcaatacaagcaaaaaaattaaagtaaattaggcaaaagtttcagttaccaaactatcgaaaatcataaagagccaacttaactaaaaaaaaaaagtaagaacattattaatttgcttataataaaggatagaaatataaaagaataactttcaaacataaaaaatatcattaataataatactatactcattatactcattgcaaatctgcattttattaaatataccgaattcactcaacaaaaataatcagagaacacatatatgcgagaatgcttccgcaattccgcaacatgaggtaatattaaaaattagtaatatttgtttttacatatatgctgttatgtttaataaaactaaagactgaattaattgttatattattattttataactaaggaactaatttgttaaattaagtataatcaagagaggtttaaaaaaaagtataataaaaatattttctaattattgtaactacaattacttctaactaataataagcccacatttcccactagactaaagcctacagcatgccttttctttttcttcattttattatagcagcatcttaaattttgagctagctacctctggagagaattaaaggatct

SEQ ID NO: 186656 - DNA, 2754 bp, Cannabis indica
atacaacaatattgtacttgaaaatgtctctgttggcacaaaaataattgtgatatgggtattcataatttgcacctttttaagcaggttttattggcaaaacatgagtggggattttacaagtttacttcttccttggcagctcgagtgttcaaagattgtaatcacaataataaatctttcgacaaagtttctattgaaaaaaaaaaaaaaaaaaaaaggttcttatacctagaaaaataacttaagggagagagagagagagatttttgatagtggtgctttatggagggtttgtggtggctatggtatctcgatttataaggcaaaatggcttcaaagtgttgacatgtatttacttgtttccccttaagtgcttgatgagcaggcggtggtggctttcttcatcttgataatggtgtttggagtgacatatttttttctagtgaggctattgcttttttttacatacattggcttctattgatgctaaagaacaattaatctgaagtcacgagacttctagtttctatacagtgaagagtggctaatggttcgccacacgcaacttgagtttgagtcgtgcctcctcttctcacagatctaattggtggtaccatttggggaatttgaatcttctgccaaaggttaagaatttttcttcttctagttagatccctactatagatcacttgaataataatgattttttcaattactatatttttgtttatgaaaatgaggcagatatttttggttgtcacaaaatatttaaattaattaaaatttttattatttaagaaactatcgcctaagttgaataaagctattgaccttgaaaagtgtcaatgagaatgacatctaataagtggtagttgttatatagagagaggaaacataaataataacatattgtatagtaattcatccccattatcattggtaaaaggactatatctacttgagcttttattcattattcagcacttagaacactcaacctaagtgatgaaagcaaatatgcttaaagaaatctgacttagagcactttgtatgaagtttggaaaagctacttgattttcagagcttaagttctccaaaaaaaaaaactcaaaatatatagaaagaattaaattatctttgagtttataggaaagggtggatggatatttaaatttaacataataataaataattcaaataaaaggtatatattttagggatattcctttcaagttgatccaggtcgttaattgaggacacatcatctgaactgtgactatacatcttctaggattgatcttgaccgttgatcttatttcttgatgaatagttgagattcacccatctttgttgacattatgaccattgattccaagatctaacaacgtctgttgatcaaaatctagatgataccctaaattcttacttacccttgcaattcgattttcgactagaagaagtccaaattttgctctcattgtgaaacatcaatctaacaagcatcaaaatatatttccataaaatttggaatgtaatattagggcatcattaagataaacccttgaatttttcatcatattctagaaaaaagcgagattgcagactagggtggtgcctgatgcaccacctggacacccatttcggggattaggtgttcgatcctgcattttgatgttggtttgatgcaaacatcccaatatgattgtattgaccaagtctggaaaaagttcttaggatcaagtgaggacattcatctgtttcagatggatatatgttttgtatgtaccagctgattgtggtgcacaaggatcacttgggtacatggtgtcacatgggcacccaatgcttggagcccagtgttagttcacgtggcacaaattatctaagttattcgtgatgctaaagaaatatttttcaatcatggtgagatatctggtgaacagaaccacattcttaaggataaagctcacccgtgcatagcgcaacttaggcactgattacttgggaaccatgtgggtacaacagcttcggtgacttcttaagtatatccacaacactcgtcgtgagttgaaattagattttgtaatcgtcttgaacttttgcatctaggaataacacatttgagcccaagtgtggaccaagtttccactaggacattggtgcctaaagttagggaaacctaggtgcctcctaggggcacaataaattgatgactatgtttgatgcttgtacacttgtattcactaccatttaaaaaaaaattgttgatttttaaggtgtaagtcaaagttaacaagggaatcaattttgtttaaaatcttttattgaaaccataagggcatggttctcaacatatttacaaacattaaatctattttgtgagtaatagaacctttttatgattgttaagcccaaaaattagcaaggctagttcccaagattagtctaattaagtgtgtaatcaatggagtctcatcaacaataaaatgttcaaatccttcaaaccataagcatcaattctcaagcttaaggctcgatgttcaagcctcggggaccatcttggctccaaaagatagtgatcatcttgacatgccctacaaaagcaccatgtcgacatgaggaagtggtgaccatctcagcaccactcccttggtgataatattaacacacccaagtggagaccatcttggcatgtgtgccatgaagaccatctcgccatgcatgcctcaagaacatcttagcatgcatgcc

SEQ ID NO: 186657 - DNA, 2915 bp, Cannabis indica
gtatgaatttgacgtgttcttttctttctttgctatggtaaattttacttttagagactgcagtttaaatggagagagggagggagagattgccactgcaattgatgatattttatgtagcaaacttttccatatatgtaataaataacaatcctgttagctagaatgttgaacctgctcgttattttatttgtgtcggctgcagttatctgttgatgtaaaggtacccttgaattgggtgaagatcaatagtaccaaaaaaaacaatccggtatcacccacctgaagtgactaaatgccttagataagctgtcactggcaaatgaggagcttaatattgcttgtcaatctgcttggaatagctttctagaggaatttggtcaatattattctgaattcagagctgctgttcaagcactggctgctttagattgtctgcattcacttgccattctttcgagaaataaggtatactatgagtatggcgtaatttttatttccaattctattcaatttcttcagaggttataaggttgaataattctgtgagttcttctgttgcagaattatgtccgtcctctacttgtaaatgataatgaacctgttcagatacatatctctgatggtcgccatccggtataggtctaatgctattatttatgccactacatctatttctactaaagcccgaacctttaattcatttcacatgtgttatttatttattttttacttttttgataagtttcatgtgttatgtttgctacttgattatgttcaacaattattgttcattgtaaattgtttgtaaaaaatgatatgaacagttatatgatagtagcaatttgatatgaacagtagcaaatataggaaaataaagccaaagagtagcaaatatagaaaatagtagctgatatattgttaatagaaaaaagggtgaacaaggttgttgggtattcaagagaccgagcactctccttagagctaatgcttacttaaccaaacaattctctccctttcccttcgctactcactcatatttgtagcaccaatccctcctattacaattacccaattaccctctttatttatcttcaggcctatcaatatacttggtttgaaaaatataaattgttgctaaaattgttagaggtacttttccaaatgttttgtgcttctgtttaaatgtttagatctttccaggtgttggagactatattacaagacagttttgtcccaaacaacacagacttgcatgcagagagagagtattgtcaaattgttactggacctaacatgggtggaaagagttgctacattcgccaagttgctcttatttctattatggcccaggtaaaaccagaaatacacagatgggcaatggataaatctacaagtatgtttaagcttttggtagtgtatcatagattcatgggctttggacaaagcagtttcatatatatatatataaatatatatatatatatatatattttaaacatgtcatccttgtattggattacaaacatgaacatatatatagtgagatatttggttatagttttagtaattattgacttttactgctctaaatcaaatatctacgtctatatttcttcgctgtgtttctcaaagtcctgtttgaactgttcaaagctggagtatagatgaatctcttatattttattgcttcataagaatgtgttctgatttctctaggttggttcctttgtaccagcatcatcagcaaaactgcatgttcttgatggcatctacacccgaatgggtgcctccgatagtatccaacaagggagaagcaccttcctagaagaactgtctgaggcgtcacatatactccgaacttgcactgcacgttctctggttatcatcgatgagcttggaagaggcacaagcacacacgatggtgtggccattgcttatgctacattgcatcatcttctggagcacaaaagatgcatggtcctcttcgtcactcattaccctaaaatcgccgagatcataactaaattccccgtttctgttggggcgtaccatgtctcataccttgcttcacatagaactgagggttcagtggattctgaatctgatcatgatgtcacctacctatataagcttgtgcctggtgtttcagataagagttttgggtttaaggttgctgagctagcacaggtatctcttctctcttaatttcaccaaaaaactcagtcgtgttttatttatttaattttacattttcattttcacttatactttagtttgtcatttgaataagctagctaagcacactgttttgcagctgccgtcttcatgtatcagtcgagcttctaccatggctacgaaattagaaatggtggtaaacaacagaacaggaagtaaacatagaaagttgcagttgttagagtcaacatcactatatcagaaagaagaaaaagaaaagaagctggaaatggaatctagagaatggttaggtagatacaagcaattcatgatggagttggaagctgtactatctgtagaagatcaagtaaagagcttccaacatttaaaggaggctagagatattgcacagaaattgttaagcagtaatgaaaacgattatcccaagtaagaaatagcacacaaaggcaccatagatgctttttctttgtaaattattaaaaagaaatacaattgagctctggctttctacaatgttgttaaacttgattatatgcttcgggtaatattttggaccaaattactcttccaataagcatctcatatacagccactgacattgcaaaacaattgttggacgagagagagttgaattgactgaaggtaattatcaaaccatcagtggcctttattaatttgcatgttaaaatgttcacttttttttttcttttaaaaaa

SEQ ID NO: 186658 - DNA, 7398 bp, Cannabis indica
aataggaacaaagctgactagaaataactagcatcagtagttaacttaggcccttgtaactaaatttgtcggattggagatgagttttcaaagttgttagtgtcatctgacaaattgtgatttatgttaaaaaagtttcacagttataatcatcgtgagagatagctttttcaattgtattatcttctctgttactatgatttttatcctattacgttttacctaataaaaattttaaacctcttagagtactcatatcaaatgttttaaaatagaatatctctaaaatatttagtgaattaaattaaaatcacgctacattatatgctctaaactcttctattttaaaacttctttaaaattgaatattcatgttctatatttatagaatattattcattactctaaagatattttattaattatttagagttttaattttacttaaataagtaaatattaatattatttgaataaaatgtattgaaatttaaaaaaaaaatagaattttagtttaaagaagcggatgtatagtataatataaaaaattaaagtaaaatagaaataatataattttagtgacgtattttaatgaataaagtaaagaaactaataagagtcgttatgaaatatgaatcatatatgtagattcaaaattttaacacgtaatggattgcttgtttcaaaaagtttacccattgtacaagaaatatacctcttaaccagcccaaatttgaaattggaattctgtcttacacataatatctgaggaacatcaatatcctcatagcctcataggtccttagaggaactccaaccaacaaccataatagtattcttacatttggtgatcataaaccttttcacttacagtaacaaaacaaaaacaagtcattgacaagaagctacaaaaatatgcatcgttatttctttaagcttatactctagactagatacacatccaactaatcaatccaagttgatcttgtatgttgtgtatgcccccagcatgtttgatcacctctgcttcctaatcttactgcttttcctacctctacctctagctcataccattcaataactcaaaaaataaatagaaggttggagggatttcgagttttacagttacagttagtgtagcctcatacttgtatggtcatctttacttgatcaaaaacctgtacagtattttttcttggcaaaatgttttaatgggttagaatccaatactttgatttctttttctcatacttcccttttcatgaatcaactactgccccttgctcctatcactatcggctaggaatttggagatgccacataaactggacggatcctattgggtgaaggccttgctatcagcccatctgtggcccagcccactgattctccatcgcttttaacatggttgaactccctttccacatattctagagacatttgcagcctccctcctggtttgcagtccacagaagcacttcctgcttcgatccctgcattcgtttcaagccaataaagataattgacatgaaacaaagccttgagcatgtcatgttgggagcagctttctttaagcaccacctgtttcattccaatccaaccgttcaaattggcaagagatgaaaaagatattattcatcagtctccacttttaggctcttagcataaaggaaaagagaacccaccttttgtcctattacaattaatagttatatgtgcactttaaaaacatctaaaaagtatacatatataaaagtgttattctttaagaaaggaatgaataaaataagaagcacatagtaattcatcaaacatatctagtatcaggaaaccatttgtgtggatcagtattcctccttgtataaatataccatggagaagtgatatatatatataaatatatatatttgtaactttttcatgcagaaacaaccctcatacatttaatatgaaattagatggtttccaaatatttattattttcttgtgaaatactttcatttttcaatcatatttattgggtaagtccataaatcaagtctagtgttgactgtaatataaggatgtaaagtaaaatgcctggtatgtgaatggacaaactcaatggcctcttaaacttaaacttacacagtattttccattgtgttctgttaaaacgtaaccctcattttcatacagactgaacagtgcaagtgcatcctccttgtttttgacaacatcactgagcttagatccaagctgcaatcgattctcaatttcagcagctgcaaccatcgcttcagaagatagtatggttggtggttcctaaagtcagcatccaaacaatataaatacaatcagagtacgtgatcacaagcaaaaatataatattcaaaaaatgaatttaggctctatcatgagaaatatgattctaatcacttttccataaaccgcacaatgcaatctccaaatgataatgccgaatggagaaactagcttctcactgagtttaataacatgattgtctttgtctatctgtccagctaaaatatatcctcagcaataaatattatactaaagtcgtaaacaccgttgtcaatcacaccacctatcctcacaatcagcactagcctatgatgttacaacattcaaccaacccctttttttaactttccacttttgtgtatattcacaagctatgtatatgcatataaattcatttatattctcatgcagctctatttaaatttcaatcatcaacaaccactagttgaatatcttttgaatagttgtggcatatacggtaagaactcgtcaactaactttgtggccggaaaatctatgtaaaactcagaaacaagatgataatgaagatgaaaggaaatacaagtttttatgggtaagagatttctttctattgtattcaatatatgagttccaccataggatttacaaccccctctcacatttgagaatggggtatttataggctctaaaagcatgagttacatagtggtcccaaatagacaagctgtcactttctggctgcaaaccacaggtgcaggaggtggtattgtgccttgtacctttgtctagtcaggtggtcccacgttgcagaagttatgactgtagcgtacccttggtcgggtcctcagaccttgcaaatgcagtgcctccactactcatacctcattgctttcaaagcttccaagagttgtgactgcaacgtacccttggttgggtcctcaaaccttgcaggtgcaatacccccaccccacttctcatacctccttgcttttagagcttgcaggagacgtggttgtacgcttttcccttgcacgccttgtccttggattcctcctccaacgacactctcgtcaatgtgcattcaaatctcaccttacactcacaacccacgaaacacacaggcacacacactctacagttcgcatgcgagccccccgcatgagctggcatgcgacccccaaactcacgcatgcacacttgttacacaacacacacacacattacgcatggcttgcatgagagccctcgacccacacccacacacacaaacacatggctcgcatgtgagccctcgaacagcacacacacacgaacacggacagagacacacgcacacacacacacacgcatggctcacatacgagccctcgactcgcacacatgcacgcggacacacacacgagcacaactcacggggttggcctgggatcctcttgaatgtatcccaaggcctgctagtaccgttggtgactttgagaaatgcacatcgagtgagtaggtgaatcgaatgcgccctcattaatccttgggttacgaggcaactaataccaagggttagcagtgctaattttcgaggttaacagcataatttaaattacaattagagaaaaaaaaatctagactcaatttgattctacatttgatatttcatgccaagcactcaataaggaatattcatgaatggttcaatttacttgagttactgtcattacttattttcttgaaaaaaatcacccattcaacattatctaaagttaaaaagtagtcatgtcaatcccatcacccgatcactgacctatgagaggctagagttcataagacataaatttaaaagtcattcctcaccccaaaggacaaaacaaagaaaattataaagaggaatggaaatttaccttgttcgcaggtttcacatttagaaatggtagagccgggaaaagtggttcctcatcgttgacttctttgagtggaggagcttgtccactaaggagatattcactgaaaactaaacctgttacagcagcaagtatgaaataagtctagaacgctcacaagattttaatatcatatctctacaaaatatgtagacatcaaagacaaccacaaaggtgggtatcggtatgatgatggaaacacaattttactaaatctgcaacatttgaataattatccagtgcaaacttcaaaaatctgcaacattcattatggttactaaagattgattcaaatagtgcacttagtaaatacaaccagattattacactaagtatagtacaaataacgtataatagacagagtgtacaacgtcacaacacaaccaaaaacattttgtaggaataattagttagacacaagagaggaaaatacttgcacggtaaggatttaaagtccgtatttgaatgcattgatatgacttcagattgcagtacatgtggacaaacgtcaccacacaaaatgaaacaagggaaagtgatgtagaggaccctacgcagttagccaatcctataccaagcccaattccaatggacttgctcaccattccctgggcttcaccctttgcaatcacctacagtaagaagagataaactatacttaatcagcaagatgatgacttgtcaaaaatgaccttgtagaatgtaacaattgcgtagaaatggacataaaaggattttcgccctttgtaaaatcagtcacacttagaaaccaagctttaattagcaaaaaaaactgcatttaacctctgcaaagttcctttgagcagcaaagccagcatagaagcaactccttgtggcagcctgcaaataataacttcagaatttagacaacaatacaacactgtagtgggcactaaaaaaagtccaatgtctaaacagacaccttcttttatagcaggacagcacagtggtttcattacaggaaataacaaattgtagcactaattaagatcactactttaagaaatattcactcgaatataaagttctaaaaagtgaaaaaaggaagaagaaaaaaaaaacttacaataaagttattccattactaaagcttcgacagattaaagaagcattcaaaacatgaattgggtatctaatttatgaaagttacaataaagagcaactccatcgattgggctaaataacaaatactgcagttgactcttcttggtcttttgtctgcacttgtactatttagctagaaatctagaagataaaataccatatactaaaacaagtgaagagtttgcaaacctacttgaatcaatgcagcagccgagcgccctgccccagcagcagccccaattgcaacaaaaagatgaggaaatgcaggagtgaacatctccaatccaaaggcagcattttccataaaatctgcaaacaatctccacccttttggattcacatcaaaatgccgtccatattttgatagcatgatcttgctgagatacccaattccatccttaagcacccaattgatcgccgcagcagtaggaatagctcctttacccaatccaacagcataaagcaaagcctatattaatatataacaaagcataaacaaaccaataagagaaaaagctcaaaaattgtgcataaagaacgcagcttttcgattacctgagtggcaagtacaccactgatttggctagcgatgccttgtactcctctccagagtgaatagtctaaataatcactactcacgctttcaggaaaaccttctgggagcatcaaacgcataacgatctctctgcactgattccacaagcgggcaaccgagaaagaagacagcaatgaagaagatgaaccaagtcccgagtctaaaacgaaacaatcctcataaacattgggaacaagcatagtccacttgccccccttcacttcccagactaacccagattctgagtccgaagaacgagccgtggtagttcttgccagcgccgaagccaacccaaaatgacagaaggagcacgctgccgagcataagaagatagagaaaaagaggtaatggcggtgattgtgattaggcccagaagagccactaccctcctcgtcgtgccaacctccgccaccactgttgtcattgtttccatttcttccacctccacccccacccccatcaccaccgccacattcaatctctacattaatgagaggaagagatagagagcgccatctattatggttccctctgactactcgaatcggtgaagatgttaaacgctttaaatgaagtctacgaccttgaaaagccatggcggaacatgacgacgcttgagacgactttacactcgccggcagcggcggcgatgagacggggcttgggcatgggaaattcaatgtaaggggcctgcaagcgcaccccattcttaacctcacctttttcacttcctatatggctccgtacattagtattcagctttgctccgaagaaactcgagttgtcctatcgaacgtgccaatcacgtgagactgtaggacagcttttaaaaatctgtttttttagagttattttttttttttttttttttgaaagaaacatgtgttacaacacacctacaaggaaggtagaggaccattccaaattaactcattatctaatccaagacccatcctagctatcctatgagctaaaagattaaaatccctaccaacatgtgagatggataggtccggactgaacgataacaagttcttaatgctacaaactacatcatcaaagacactattattccagttacaagcattaagtttatcaactatagatttacaatctgtcatcaaaacatccactggaaaccgaagcaattgggcccattgaatagcatgatgaacggctttggcttcagcaacagcaggaggaacaagaccagaaaaagggatagaaaaacctgcttttactctgttacaaccatccaaaagaaccacaccaatactatgtctttttctatgaggatccgtggctgcatctgtgaagagtttaaaaccattggaacaagatggttgaatccctgcaggggctgagttacaatctgaacctggtcttggacacctgtttcgactgcgcatctaaatgctggaaaaaaataatgcaaagactccaaatcaaaaataaatcttt

SEQ ID NO: 186659 - DNA, 2614 bp, Cannabis indica
cacagtactctcaaattactaagtacccttttgaaatctaatttatttcgaattcacagatgactttgtggtctatggccaagtctccactcatgtatggaggagatgttagaaacctggatgaggccactctcagtctgattaccaaccctactctgctggagataaatcaatttagctcaaataatatggaggcatgataacttttctaaatcttggcttaccttgataaagatgaattatttcttgtagctatataagttattttgttgttgaatttacagtttccctatattactagtacaacaagctcaaaggagggagatacgaataccaaaagaaaatgtttgtctgataaaactttagaagtacaagttttgggtcttactagctgtgcagacacaaaagcagttggttggtctgctgaagctgtagagcaagattctgaacagatatgttggaaactaaatttgggaaacaaacatcagacaccacccttttgcctatacaagagagaatcacgactaacatcgtaattgtgcttttcgattctcgcttatgatgtctcgaatttcttgctggaatagaatatttctttaatactatcacggtaattttatgttcattgttattttagagatgaagacataaccgacgaacaacaatatcaaggaaaacttcatttattagcaaaccctcgaacgggattttgtttgcatgcttctccaaaacgaaagatcacctcaaaagagtacaagaggggctcattctcgccttgcagaagggatgcaaatcaggtaaccatgttttcctatttttcattttctagcatgaaaattggctgcatccaatatttgagtgtcacaccaatattctttgaacattttctgattcaaaatatacttttaacctgcaatgaaatcttgatagatgtgggaattgcatcaaaatggcaccctcacaaatagttattctggcctatgcgcgacagtgaagtctgacgaaggtgataaattttaaaactgaatgcctataataagtgtaattcaagtgaaaaagaatgcttgcctactttgatttaacactatctttggagagtataatctttaaatttattaacttacactattgctgatcattgaagcagctaaaagcaactcagccggagttcgctcttggattgcaactggaagaaaaggttagatcccttacctcccacccaactgaaaaccttgaatttgtttagaaaagttagtgttattaatgtctagtaaatacttgaacaagcttcataaatttagaaaaaaacaagaagacttttactaagtttgagaaacaaaagaattaaaacttcttgcccagtaatagattgattctattaaactgaaatgcttgattttcgaaatcggaatggaaacatgttttcatataacaagtcctttagtagtgttatttatgtgattgtttctaacaaagagtgatacctccataggagaagtgtatgttgcttttttcaacctgaacccagtgaagacagtaatatcagcaaagatgtcagacctggccaaggccctacctggtgccaatttgaatgatggttcatgcaagtacaaagaagtatggagtgggaaggactatggaacagcaaaccactcaatatcaatggctgtggaaactcatggtcctgcactctttgtcttgaactgtgttagttcactataaaatttttatataaattcatatgcacatgttctagatgaaatattttattgagatttattttcttactatatatatattttatgtggcaaagcaaaccgtaagtgaaaaatcaagagtggaaggaatatggtatattattgttttcatgaatagaataacgaaacagcccacatgtagggttattgtatatccatatatagaaattcctagtcttctcaaaagtagattataaactaaagacatttacaaactgttttataaaaacaacaatggaatatgctatggaaacttgatcactgaagttgatcaagggtttatttatatagccacaagatacagagtttgttacaaagtgagctagcttacatactcactcacaaactgtttaacaaaattccttactacttttgtaattagctaaccaaaacaatttgtaactaaactaattgattatataagatcagttattaacccccccttaaacaaaaacaaaagggagttgagattgactttaagtttgattttgagatagttgaaatgatcaatgaatagaagtttggtgagtgcgtctgctaattggtcgatagatggaacattgtgcacttgtagttattgagctaggagtttttttttttttttagataagtgctgagctaggagttgatcacgaataaagtgtgcatgaaatactggattggcagcaaagagcagcagctccttggttgtcaacccacagaataggagactcaagaaatgtgacctgtaactcagaaagaagagacaccagccacttcactctagcagcagcattggctaaggcacaaaaattctgtgtaactataaggtggcgtttgattgggaggaatgagaataaaaataggaatagaaatgg

SEQ ID NO: 186660 - DNA, 3437 bp, Cannabis indica
acagattaagtacactgtacacatattatatcacatatacaatactatcatttcacaaaaaaaaatataaatactattacattaaaaatttaaaaagaaaaattaaaatacacgttaatgtgcatttaattttaactatatttttgataaaaagaaaaacttttggatcaattttttttttaattttttatttttacacttcaaaatattttttttatttttacgaaattccacataaaaatctctacagtaattaaccgaacaacctaaatcacaaaaattaaaaaaataatatatagagtaattctattttttttacaataataaatttaaatcaattaatttatttaatagaatttgttacattgtaaacatacaatcttttttttcttttttctgtttttatattggaaagaccttattaaatctcctttttctttccttccaagagaggatcaacataaaatcatatactgtttttataatagaatttattttgataagattttttgggtgtagaaaaaaaggaaaaaagaaaaagattaggtaaaaattagaagcccaaactaaataagcccagataggcagatctaaatgtgtgtggagaggcagtaaacgccttctcttccctattaaaaccaattcaaaaagtcttctctttaccttaccaaattcctaatctgtctccactctccttctccgccatcctaaatcccgatcccccatttctatacataaacaaagaaaaaccccaattcattcagatctaaatctagggttagggttaggggcaagcaatcgagccagcgaaaatggggagaggcggagctttgtccgagagcgttgtgaagaaggtgcttctctcctacgcctatgtagggatctggatcttcctcagtttcaccgttatcgtctacaataagtacatcttggaccgtagatgtacaattggccatttcccatctctctaaccatgatccacatggctttctgctcctccatagcttacctccttgtccgcgtcttcaagctcgtcgagccagtttcaatgtccagggagctgtatattcagtcagtcgtcccaattggtcttctctattccctttctctttggttttctaattctgcttatattttcctatctgtttcgtttattcaaatgcttaaggctcttatgcctgttgctgtttactccattggggttttgtttaagaaagacgctttcaaatcagaaactatgttgaacatggtttcgatctcaatcggagtcgccattgccgcttacggcgaggcaaaattcgatacatggggggttatgttgcagcttttggctgttgcttttgaggccacccgattggttttgattcagattttgttgaatgctaaaggaattagtttgaaccccattacatcgctttactatgtggccccttgttgctttgtgttcctttgtattccttgggtggtcgtcgaatacccattgttgagagacacatccagttttcatttggattttgccattttcgggacgaattcgctatgtgcgtttgccctgaatctcgctgtgtttttgcttgttggaaagacttctgctttgaccatgaatgttgctggagttgtgaaagattggctcttgattgcattctcttggtctgtgattaaggatactgtgacacccatcaatttgattgggtatggattagctttcttgggcgttgcatattacaaccattccaagttgcagggtcttaaagcagcagaggctcagaagaaacttcagcaggctgatgaggaagctgggagattgcttgaggagagagaagctgatgtcagtggaagaaagaacgaagcccagaattgatctaattgaaataaaaggtttagatagaagataatctacggatgagataaggggaatcttcctttggatcttggcatttaccgtcttgatttccaggttctccttcgaatatgtggtcttaggtatttatcatatgtattttttttttcatttttgttctatcgtttcattgttaaatttagatgtggtgactcctcctatgttccgaagttgatttgtgtcgctcgtagtgtccatttatctttgggaacaaaccttgaatacttgactagcaacgtcatcatcataatagagtacgattgcatatgtacttctgccgattatattttatatcgatttcgcttcattatatgagtggtttgttgtcttgtacattcaattttaggctgagactatgcttttgttggtgtttttttttcacttgattttgtgttccaaagcctcgaaattgccagtcgattttattgaagatatagttgggtttattttttgtgagcatgagatttggagttcgaacttttatccaggtcaactcctgtttattaaataaaaggcaatgtgaagctcccattaatgttcttggactagacttttgtttaactatttcaaatttccattgcatttcaccatgtttctatgtaacattttccatttttcccctcatccaaaataaatgctgctctgttaaattcgtggggttaaaatattcacttgttttcttgcatttctccaaacaaaacgtaaacgttacttcgagagcctcgtgagtcgtgagttttcttcttttgacacgcccgttcatgttcggcctttgggcgaccgcgcacacaccgacactcgagaaacctaatgttatattggttttcatttatccttctcgaacaaaaattaatttacatattggagtttagataaacaaaataaaccatgactatataacctgctatattgtcgtttaatctaatcttcgtaatcatgggccaagtccaccatttcggccttacttgtatcacctattagtaatttgtttgttgctacgctatatgccataaatcggtgtcaagaggtgacacgtttctttcatgcccccactctgtttttgttatatagttattttttcttttgctcaatattatatagtaatattatataggtcctgttctgtgagatatccaacactctttttttttttgggaaggagagatatcaattctttgaaatggtatttctatacgcttttttttttttttgactttattatgacaaaagagaaaatattacgtttaaataatgcaataataatatgatacctatttttttccggcaaaaaactcaaaatgttaaaatattacatctacactagtcaagtaatttttataaagttaattaaaatagattttaatgggatgggttcaatagacaagattttctatactatttgaatggcagattaaaaaaaatgatcttaatcttctcttcccctctcccacagccgcccattgcccacctacatttgccgttgtacatttacattggaaacatcatcttaaagtcattagtgtggaaaagtttttac

SEQ ID NO: 186661 - DNA, 2924 bp, Cannabis indica
cccccaccccccctttcccctctattagcagcattgctttcttatttagagaaatgtttgattacattatttctttgatgcagatgcaaatctttccgtactctgtgttctatatttttttcgagcaatatcttgatatatggagaatagccttaacagacattgctctagcgctcggttggtattctatatactatatatatgtactcttgtatataagctcattttcatagctgagcgtgtaatttgtttgttcatttgtgtgtttttatatatattattattactctttttttgaagattttgcttcccttagttttttggtcatgcttcaggccctgttcattttcttcatgttttgtaacatggacatgtttttttctaaatccaattttgaatactttaggctggtagagcttgttgtatttagctaattttcctttgagactactgttattttttatttaagaatgctgttaatctcgaataattctgacatgttcctctttattaatgaactttgggtttttattctcacttgaactcggtagaggtttgtgcaatttcagctttattttgaatagtcagtggtcactaaattatttcttgtgctctttatggcaggtgctatttttgttgtctgtctgcttataacttcgaggtttgaattcacattgaatctcaaatatggaaacatctttactatttatattggaatttaatacattaacatggtttcttttggcagtctatggagttcactaatcattttactcattttggctatgattgttgtggacctgatggtatagttttccttgaaaattaagcatcatataaatttatatacatattttctgattgtgtgtatttgttaatgtctaatagttattgttttgctttgctaccagccatcgaatgtttcattgtcattttcttttctcttagttcattacaagggcactgacttgcctttatctcagggtgtaatggcaattttgggcatccaactaaatgcagtctcagttgtcaacctcataatgtcgatcgggattgctgttgagttctgtgtacatatcacacatgcatacttggttcgtactgaaacatctccagatatatttgatctgggaggactcttataattttgttggttgaagtgattttgaagcattattttgttagaaaagaaaatagctttacattatgtatgataggttattaaatcagtgatttcattttgctctctcgccctgagagtataaaactgtcttcactggtatattgcagccctttggggatgttatcaggcttgcatctgtctgcagaattatgttctgtccgtcaaatggtttttaaagttattactagactactaacttgttatgcaattttacaggtaagccatggagataggaaccaacgcatgaaaaaggctctcagtactatgggtgcttctgttttcaggttgattacacattctcttttctcctattgagtcttgttgacattcctggtactcaagttagctgactcttttctatgtcaacattttcaggctgattgataatttaatgatttattcttgtatatagtccttgataagcaaagtctactgaaaattcgccttaaacatataatgaacagcttttattttatattaaaacccaggttgtttgagaatggagaagagtagagaagtctctatgtagatagtttgttttattcgatcaattgttctgtaaaagaggccattggcttttcagctaaattttttaatcagtatacttgaaaaagttctcggttttgtttctttgagggcgagcagtgatttcattaattattttctgtcttgtttctcattttgcagtggaattacgcttacaaagctcgttggagtcattgtactttacttctcaaaatcagaaatttttgtggtatttgaatttgttttcgtttcccattttaaacgattttgatgcctccccagatgaagagtgaaaacaagtggcttgtttttgcaggtttattattttcagatgtacctggcgttggtcctcattggtttcttgcatggccttgtatttttacctgtaagttcatttagcttcctttccaacttcttgttaggtagaacacaacacagcacaacacaacacctgttcatcagtgggtatattattttctccagttaaataaggcaaaacgatatcaaatatgagctcatatcataaggtcatattgatactgaaaagggcattttaagtagatgtgttttgctttgttatttgcaggtggtgttgagtctgtttggtcccaccacaagaaaaacaaccattggctttgacgaacgagaggaagattcttcatcaaatttgagctgattttgggcaagtgcgatgataaacattggtttattattgattagtgctcttcggaccaagacaagttctaacgttgcacactctggtaatagatatgtagacaatgattatgacttgacatattcaaagtaacaattattgcagacatgagatcttttaaagtaatacaaaaatgttaacaaggatcatgatttaggggacacttagtacagaaaacagtctgttaatatctttttaaatatgtggatatctttaaatattatattacactatagttaagtcacttggttttgtaaaatcccattcatgaaatcatatgactgtaattgtttagatcattgatgctgactagaaattataaataattttgatatctataaataggttatacaattgtatacctcgatttgttagtttatattttttgaaaactcatatcagaccctacgagtgataaatataatttatatatggctccttaactttcaacaatactaattctccccttaaaatatattaaaaaatttcctttaaactttt

SEQ ID NO: 186662 - DNA, 3728 bp, Cannabis indica
ttgtccttccttcatgatctggttttctctgctgcattaaatttttgctaccatggatccttcttgcattcacttaacactactctctctcttaccgaagagagagttaggttcttattttaccggatgatgttgctccacccttagcaccgctctctagccacacacttcttgcacgagttctcactgaaaattacgtccataaaccttccttctataaccaaatgtctggccattggaagggtagattccctgtctcaatctctgactacagggatgatatgtttaaggtttcttttggttgtgcaagggataaattcagagtattaattaaggagccttggcattgtcagaaccaccttgtggtgttttgttccccaggtgctctgcagaaagtcacaatgaagaatttgatgactacccttttttgggttcaaatatatcgcttgtcgttccttaataaatcaaaatttcatgttacatcattgggaaacatcataggagaatttatggatgtgcataaaggttctcttgatgaaggatgggggccctttttgaggattcaaatgaagctctcagttgacaagcctctccttaggggtcgaatgataagtttgccaaagataatatatgaattttggattgagtcttagtatgagcatctcccagaattttatttttaatgtggatgtcttggccatccttttgagaagtgttttgcctttatggaaagaatggataatgataatgacgatgatatgttgtacgggccatggatgaaaggtgctaagttaccatttactggacatgataaatatcgcactcatttctcaaagggtaatgcttggcctatcttgagacgaattgcttgaaactcccttgtttcatcgattccacaattgagcatcagatctcagcctcaaccaaacgtcctcttcgaaggggagtcctttactgatgcaccaaactagggttctttgatgaacaacatgaatgatatatcatctcctcaatagaaccaatcattatctttgattaactaactaatatgaacatacctattaatccccaccaacacgcttccaccacttctactgctccatctaatttattctataaacaacctccattgttagatacaccctttactacacacaccattaccaatcttgaatctcatggaattatttctatgccccaaaacacttcacccgtcatcaaccttactaacatttatactcctgatattgctactgctactcacccaattattccagtcgccacctatcccccaattgttatgcctatttttaaaccaattagcctatctttgacactctctttttccacagattcctcacttctggccactttacaaccaattactttcactaccttcacaaaataagatgctgacaaagaaaattcttcccccaacagggtgtttaaaagacacaatgatgctccatcaatgagataaattctcaaatgatgtcgcaactgcactaccaatatcttgcctcctttctcgtcataaggagattgctcaaacaaaaaagtttcctctaataataagcgttattcaaatggttcttcagacggctctacagagattgctttgcgatcccgcaaaggattatgaaaattttcagttagaacacactgggattggagaactcgagagcatttagacatctttaattgcttgttcagcagcaatcaccccatgttctctattttatggacacttaactctttaataattcaattactcacttttgacagcatttagacttttccaatagtctcgaagcacgaagaataagacttagtggaagtcttatgttgttgtggaaggacaatgtagatgtcacccttaatactttaggtacaactttttttggttgcttcatggctgtaaatggtggtctaagtttccattttacaactttctatggagaacctgatgcacaaaatagagctaacttatggactcgtctacttaggctagtagatgtggctcctctacaaccatgccttttcattggagactttaatgagattctttcaaaccagaataagttaggtgggccactgtgaagtgaagcacagatgaattcttttcgcactattcttgatcaatgttaccgtatagaccctccttttgagggtgactgtttcacttgggctaaaaataggattgttgttaccactttaaagaagcatctttattggtgttttgtgaatgattaatgggactctttttttgttttacctcaagtgaatcacctgaattattatcatcgggatcatcaagctatttttggaattttctcccctattttggctgctcctcaacaacataaaagacatagcagatatcagtttgagaaattatagttaactgatctagagagtaaatacatcatctctacttgttggtccattaacaacacaactgatctaattatgaatgttcttcataatttaaattcttgtgctaaatccctctaacattggcatattaaagaatgcaggcttatgaaaaagaatatatttgaggcacaatccaaagtggcctccctcaacaatgctcaattgctccccagtgatacagctgctactctaaaattcaatgaattaattattgctgacttgttggaacaggaagagatatattggcaacaatgttctaaagttaattggatgcaactaggggaccgaaacacaaaatactttcactcaaaagcttttgccagaaaattgaacaacaaaattacttttctcaagacagatgcagagcctaaggtgacgtctaaacaagacatggctgaagtgatacaagaatattttgccaacatttttcaagctgctctttattgatcacatagctcttactgccagtttggcagccatcccagctactatcacgatagatttgaatgatgaactactcaaacctttcacaaagacagaagtggaacttgccttacaatctatggtaccagaaaaaagtccaagttttgatggtatgtccgctatattttaccaaagcaattgggaagttgttggaaacatggtcacttcaacagtcttgagcgtcctaaatgaaagtgttgaccccactcttcttaacgcaactataatcaccctcattccaaaaataaagaagtcacaataaatgatggattttagaccaatcagcctatgcaatgtcatctccaaacttataaccaaagtgctagtggctcggtttaaacatgttctcccccatgtgatatcaaaaactcaaagtgcttttctaccaaataggcttattacagaaaatatctcggttgctttcgagttaatatatggcattaaacacaaaacttcaagtcataaaggtgtgactgctatgaaactagacatgagtaaggcatttaactgtgttgaatggacctttattcaggttgttatggagcagatgggctttgcaaatggttggacatctctcattaagaattgtttgactacgaatcacttcacttaccgtttgaattgtttgaccttacttattcttattttgttctgaaggtctttcaagactcctacaacatgaagaaattatgggacaactttatggttattctctcacaaagtgagctcttcccatttctcaatttctttttggagacgacaacttactcttttgcaatgccaataagagttcatgccttgctatcaag

SEQ ID NO: 186663 - DNA, 683 bp, Cannabis indica
atattttatgaacactcttaaaatcacagtatagaatatcctttctcaaaaccaattaattttttacttcttttgtcacataccattaccagtactatatctatagcttgtagaaaaattgaaacactaataattggcggttggaattagattaatattaatggaattatatagttaaagtcccaaattaacaagacccttaagttgaggccttgactcttagcaccatgtttgagaaaagttttcccttaatcagggttagtaaacacatttatattaaataattagtataatatgattgtttattattttgcttaattaatgtcaatcagcttttatatatatttcaatatgtgatcaaattcaatcttgtaaaagagggtgaaacagggtcccattattactaatgaagacaataattttactactcttacaattattcttatataaaagaaataaaataaacctagtttggaagtggtagcaggcagagaaaatggggagatttgtagtgtgatttgccagcatattgaggtttaccgtcaaacaaagtaactgagataatgatatttgtatatattaatataatggggtcgttttcagggacctatcattccatacttattatatcataaatctcatctgttttactcaactatacatagcaatattattattattat

SEQ ID NO: 186664 - DNA, 4620 bp, Cannabis indica
tttttttatatatttatgaaaatcataaatgtttacttataactaacggagtaagttaaatcgtaatctaaatctacataataaattaccgaaacaacctaaaaaaataaaaaaaaaaatagtatataaaatgattcccattatttaaaaataaagaacaaaataattcaaattgttggaacaaatatttttttcttaattaaataaataaagaacttcattgaaagatgaaaataaagggcaaacttcacaaacaattcggattaattttgttcctattctatccgatcttcctttgctacaactacaaaatatttttatattaaataatctggaggggcttgcttgtggaaaatgacacgtgtcacaagggctctgagcccaacggctagttatataaaacggctataattcaaattctcattctcttctcctcttcacctttctacattttcccttttcttttctctcattacacttccgatcatcataatcatcatcactttctcaccaattcctagaaaaaagttcatctccgagaaaacgattcccttgaagagagaaagtggttgtctttaccactatatactctttcccatcaatgattttcatcaagaaacgggtcttttaaacgaacattttctagagaaagtgtactcgtttctgcctcactacccattttaatttcgattacaaggttcttttttccgatttctggaagagttttcttggaatttcaagaacagggttcggagatttttctcgagaaagtgacaagagagaggagaaaatgtggaacgacaacagtgagtgtaccattatcccaccttataaagggtttttgacgccacctccggcgtcgaacttcaaccctttgtatccttccgttacatcgatgactgagtgtagaagaaatcatcctcagaacagagttgattcgtttcatgtaatacataaagtgcctgctggtgattctccttacgtcagagccaaacatgttcaggttagacacaagttcttgttttttcaagatcatatggtgtttgtttaaagttttatgttagtttcttttctaaaagttctttttgagttttcttttactggaaaacatttttatagagattctgatttgttgtgtaatgcaaatgactttgattttgattacttgtttatacattatagcttattgagaaggatccaagtagggcaatctccctcttctggtcagcaataaattctggggatcgagttgatagtgccttgaaagacatggcagttgtgatgaaacagttgaatcgttctgatgaggcaattgaagccattaaatcgtttcgtcatctctgtccccccgagtctcaggaatccattgacaatgtcctagttgaattgtataaggtaaatttgtctctttctatttctataatcatctcttttaaattctggttcccacctcctcttattattttcaacataaagtttgaattcattttagtaaaaaagccaaagaaccttttaacatctgacatttacttggttttacaaattccttattagttcatattcatttgtacaatttgtttctactaattttcttgcttttaaatttcactcagagggctggaagaattgaagaggagattgagatgcttcaaattaaactgaaacgacttgaagaaggctcagcttttggtggaagaaggactaagacagcaagatctcaggggaagaaagttcatataactgttgaacaagagagatctaggttaatacacacaaacacataactattctatatccatatatgtgtttatatacacacattttgaacgaaattcattatttataaatgccctttatcctctgtcaatgcaggatattaggaaacttagcatgggcttacttgcaacaaaataattatacaactgcagaagagttttacaggtatatttccaagcatgtttgtatatttaattctgttatatttgttgttttagacaatattgttttaaaaacttatcatgcctcaggaaagcgctgtcgctggagcaagacatgaataagcagtgtaatttggcaatctgtttgatgcatacgaatagactacaagaggcaaagtctttgctttatgctgtcaaagctttatctggtaagaatcccatggatgaatcatatgccaagtcttatgacagggctttggaaacactgactgaactagagaaagaatcagaactgaaatcaaatcaaaaggatggaaatagctcaaaggaaatgtcaagatctttatcttcttccatgacaagtagcatggaagatgtaaatagctccataaacacaagcaggctgcatcatcatgtatttgaaaatgtggtaccaagagaagtttgcgttggtggtaaccatttggagaataaggccaatttcaatgtgtatgaaattaacaattcacattgcacatcaatgacagcaagaagtggcataaagatttctaggccaattgtgcctgttgataagtggaagaaagattattctgaaagctcaagtgaaagcaagcctgtggttattaccattatgaaaaaccgagttggtactgttggaacagatccaagttccttgaacaagaagacatacttttctccagctccggctaggtgtaatcagaggactccatatactcaacctcgaaggtgtctatggggatttagtgatgaagagcagaggagggtagaagaagtatggggaaaagatgtgactgggaattcaaggaagaattgcagctataatgatgggaattcaaggaagaattgcaacaatgataatgggaattcaaggaagaattgcagctatgataatgggaattcaaggaagaattgcagctatgatgggaattcaaagaaaagctgcagctacgatgatgggaactcaaagaagaattgcagctgtgatgaagaccggaggagaaagagttcttggcaaaatggtgatatgaaaagatgtaatcaggaagaagagtatttaaatgtaagcatgattgctgcagagtcaccaaatgatttttgtaacacaaaggcattgggaagttccatcagtacttttggagagggaagctctggaagggtagagaattcttgccaacaacctacagaaacttcaaagccatcagtggattcttcagtttgtaataacaagaaaagttgggcagatatggctgaagaagaagatgatgaacattgttatataacagatgagttttgctgtgattggagtggtgaagaagcatataataatgagaacatgaattcaaacttaatccatgggagtccttgtctacagactcagatgaaaaacccgagccaaaagcttgaaatctttcatggtaattggtatagtgaagatgagttgaaaggcaagagcgatacttcaaacatgattcctgggacttcttatctgcagtctcagatgaaacgtctgacccggaagcttgaattctgtgaagtaagagatgaaggtaacaacagtaaacaggggaatgtggctgtttcatctgggaatccaactgctcggcgtactttgtgtttcgatcagaagaaccagaagggagtttcaacaacagattgcttcagttctgcagcagcatctaagaatgttcagaagttcgaccggaactcaaactcggggcagcataagggaaggtcttctgttaagaaaacaaagagaaacaggttgaaggttttccaagacatcacccatcatccagatagtccatgagtttggattagagagttttctgctcaagttttacaacactcttcatctgtgtgtcatgtttgttagatattattgtaccataacattctttaatctttaccagtgtctaagaaagttcagaactttgatgatgggtcactcaaattctgggcaggcaaacaaaaggtgttctctttccagaaagaacataaggagaaccaggttgaatgtttctcaatacatcaccattcatccagatagttcacgagtttgagttaagagaatattatgtatagcaaagtctttctttctttttcagtgagatctgtacatcatagccattctttgattctttacagaccaattatttttttgggattgtgctgaactacatcaacttctaaattcacaggagttcagtgaatataatctttactgtaaattgatttgattccttacaactgcaaggttttcagttttataagcatagtagattttaaacgtagcaaatgattgatgcatgtaacttatttaatcatttgccaaattcatcagtttccatcaatgttgagctcaaaattagaagtgtcctaaccaatttcttgacttgcaccatctacgtagaatggtactagtctttaattgcaatcttgaatacgaatttaactttgattccactgttagtcatgaatgaatccgaaagagaaaataaattaaagaaaagagaggctttttcgcttaataatttaaaaattgttctctgttttttaaaactgaaaatagtttttaaaaacaaatagaggttgtttagcaaaattttttaaaaattgagttttaaaaaacaagaaagcacaaaacatcaaaatattgttttca

SEQ ID NO: 186665 - DNA, 3059 bp, Cannabis indica
aattaattatctaagtttttttaaaaaaaaaggaaagaaaaaaagtaaaaattttatttttaaaaaagcaaaacacaatttttatagaaactaatataatattttaaccaaaaaattaaatatataatttttttttttataacgaaaaaagaatcacccgatgcggaccacatattaactataggcgccttatacctcaactttttttaattgggtcattggtagtcactttaacagttccgtacacagataacaccactttcagaatgccagtaaaagcaatccctatcactacattacacaacacgtggtaaaattaaatatataattataatttgaaataatacttctaaatttgaaactaaccgaaggtagtaaatgaagtgtgaaatttttggtgaccctagtttatagggttgagagtgatttgagataaataaggaaaggtaaaatgattggaattaataagtaagatgccttaaagtggaatatactcccacacatctttaaccgtattacatattctttcattcattcgcatctccttcccttatattctttttccataaacacttcctattggctctagcaccattcttttttctttatattaatctctatatatatacacacatcaactgccgaaatcaactgccttttcattattacttttttttttaataagatcttattaatataatcttttccttctctaatcgctacaccataccttatcaggttttctctcatttctttctttattttctgtttatctgtcactgttcataattatctgtgtctttttttcttaatttaaatgtgaatgttggttgttgcttgcgacttgtatacgtttccagattaattttgtttgatttgggttatcgtgattatgatatgaatatgatataaaagttgaattcgttttattaaagtggatttttgtttgaactgtttggtgcttagtttgcattgggatttgttatgaatgttgatagcctgtttgattgtgtggtttggggactccaaagatttggtatgactttcgctctgttcaaattttgagactcagcttttgggtatttttgtattttgtagttaattatatcaccaatttgtaagcctttcaatgttatagataataattgtgactgaagcaattgttagcttatagaacttgttgagcaatcttttttagatgagagttcatttcccttacaaattcatggccatggctgtatttctgctctagttttagcttcacattgagagttttgtgtgtcaaatttaaatgatttatctgtttaagaataacaaaggagttaattacaaacgaaccaggctatttaaaccagcatataaatcataatgaccctctctgaagatgtttactaactttgagttgggcttgactaattctgtacatacttgaatttgcctctgctctcaatttttcagtatctagtaggatagtagatcattgctttcaatttaatgtactgtcaaaccacatatattaagagttatatcgattttttgatacatagggaagactaacataattacccttgaattaaaaatggtcaatgcggataatatacagtagttcttttaacatgaaaagggtgtaatcatatgtaattttgtgtttatgtatgatgtagtatatgtgataccttgtgcaagatttaattgatttctttagcttttctgcgctcattatttgtttatgttatttttgttgtgtaatgggtacaggttaagcaatacgttggctttctgtggattctttagctgctgccagcaaaacgttgctggcagtttataatttcaagtttaaactggagaattttatgagtcgccagagtacacataaccctagtagggccctagaaggtgtacatggagtgcatgtggtgcctcattcgccatttacatcagaagagattaatcaagatcagaactttgctaaatcatcatgtggaggttcagcttttggagtgaattacatgttaatgcagtgagtaatacttcaactatttacatatatttgcacttgttcatgttcacatcattgtatttgatttctctgtataacactattccctccattaataactaattatttgtatgttttatcagacgggcatggcagcaaagaccgccatgtttaaggcctattcagggttgtattcatggtatgattataagataaacatatatttattgtagaaaaaatactagtaaacatcttttcatgtgttatttcttctgctaggggatcagcatgtactggaaacagtggctaatgtgctcacttcacttccttttgtagtgcttggaattaatgctccgaggtgatactcactgtgatataatttagacatgctttgatggttgttataacacccatcatttttctaattgttggcttttattggagtccaggaaaaacttgaattgtaaactatatgcaaattcattaattggagttggaattgcctcaagtttgtatcattcttcaagaggaaggtttaggaaatatttgagatgggctgactatacaatgatagccactgctacagtggtaagaaaaactcagccaactacttattcaaggctacaataatacataattatatttgctttctgttcttcaagatcctaacttcaattgctaattggtgaattcatgctcttttgtctttattctattgagacttgaattacagaactttatttgtcttaatttacaaggaagattgttttcttcatgaataattataattttttaacaactccccaaataaatttcatggttggttccttgagttgaggagtcattttcttttagtaagcttaaatctttctccaagggactttgatggatttctgaatgtataatatgagtgtcacaactttatgcacacggctgcttagtctcttatctgtgccacaattaaataacctctctttttatattatatatcttttgtcttcagtcaatgtgttctactcttatttgtgttctttttaatcattttctaattatatatata

SEQ ID NO: 186666 - DNA, 7292 bp, Cannabis indica
atatatttctgttttagatttaaggggaaaataaaacaaaacgctgaaactattagcttagaaataatgacaatgacaatgtttgacgcttctctgaactttgtagttgggtttcaattctcatattgtgaaggttgagtaggggagattgtgtaggcagtagttttactattttgtttttcagtagcttaccttttttcttttcttttttctttttttttttttttaaggagatcatgtaattaattggatcagtagattggcttggctatatattataattttttttgaaggtctatgatatggagaaaggattcttttagatgttttcttttcaaattctttaactttcaatataagggaggaacttactaggtcttgtgaagtgatattgttagaaagatcaagggttttgatcgctacaagtgtttttaacattttacacttgggtgagaagtaataatatggcgattgtgaacatggataatgcaatgaagggtccgtttttcattccatctctgtttttttgataagatttctgggtttctttcctttcaatttcattgtcagtttacaagttagggttacatttgttatgatcattctactttgtaatagtcaccaatcaaaactctgtatttaattgatgaataatgtgatgtatatatgtcctgtttgatttatgcatctacgtacttctgacaagagaacattttcatgagcaattacacagaatgcaattcggcgcttgatttaataatgaaggcatatactgcagactaaattttatatgaaaaaagaaatactgcattctaatcattatcctgattcttattcagatgaatagttatatgatgatgctttagtgtaatatgtttcaggaattcattaccatgccaatttcagtggcttggaagttcaactttacaaatgcataattttgttgtacagaataaaggtagcttatcatcttgttacatgccaatgctatgggaactgccaactgcactggcctagtgttttatgtcataattcagcagctttatgtgatttcatagaggcttcctgtgcttaattttgagaacaagttaaatttctttacaggaggcatattggttcattacttggtatgatgcagtttgataacatatatcgtgtactatggtaatttctttacaggaaaatggaagttcagttctcagtataaaagggacagatcgtgtataaatgttgctcatagtttcactgacaaattctctaaggcggaatacaatagtagttctaaggtgagaattggtgcaatatcgggaatacatctgctccactattgatttactaaagaattgttattattgttcaagaatttatccatgtaggtttttttttctttttcatttccatgtcttggattctgtctttctttgcttgagttggctccatatgaaggattttgcatacctacccttccacctgttggttcaaactgttcagaccagaatgttatatctacctttgcattatgagatgaaatgaaaaaccactcccttgttatggtcctcagctatgttatcttctgatcttcagttaatttattctatgattatgctatgatcttggtcctgacacatctagtgttcatcattttttttacatgtattatatatatatatatatatttatattaggtcatttattttatgtgtaatagtcaaaataacatgtgttaaaattgtgcaattcatggtatactgctactagtaacaattcgaatttgatctaaagtgtaatcactgaatgtgcaggtttacacaattaaactagtggcggaagtggtgtcctcttatttccttcttagggttgtgaagttaaattttttcattgctttcttaaagatggtccaggggaaacttttctcttttggggctgcaagctcaccttttgcttgtatgtcaaattcaatgaataaaccgacgcctcttaatttggatgtgtttttgccttcatttcaagacatcaagtggagctttgcacggctgctatatctatttaatgtacaacttgataaaaatgtggccacgtaagtgaagtatcatgcttgtttaatttggtcagcattaatgactgattctaaacttttttggactgtcttattttttttcatccccagtattgtattgataatttaaagcttcgaaattcatatgtcatcttcttgttgggaataaatatttagcagcagcatgattttaatggattttggctaatagcagctttttaacatgacaatttctatggttgttgttatcatcatacatgggtcaatctgtctattttgggggtattgatatttttctttctttcatggttttattaatatattcactagatggatcctgtaaagtaatttgactctaggtttccttaagaaaatttgctatagtttttttcagaagttacaaaaaatggtacattgatgagagatttgtgactttggcatctctaatattgtttaaatttctcttaccatgactttggcagatcaaattttgctttttactttttgaaattcctatgcattcaattgccatgctttgttgatgtttgttgacaataactgttatttattatgtatttttataagaaacaatactaattgtgaaatgtaaaaaatattacatcaaaatttttatgttctcagctggctgaaccattatatatgatattttttgcaggttctttatagtgctccttgtagcatgcttctcatttgtcctaattggtggccttttgttctttaagttcaggtagctaacaaacacttttttgtgatcatatatgggggggagggggtacttccttttgtatcaccaaggtgaaaaagcaggaagataaccatggaccttaatgatcttcaatgccttcagcacctttttttttagaatagatcatctagctgtaattcatgtagtttccattctgagtctgataatcttttgtggccttagaaccttgtaattggttgattcttaccctatattgttttctacatgcaatctcttgatatgtgtatgaaaccaacagaggtagttcacagtctttggaggactgcttatgggaggcttgggcatgtctaatttcatcctctactcatttaaaggtgaaatctatctggcgaactaataacctgattgatatgtgataataatttcttggttcttatttatgctggatgacttaatgtcatatggattgttctaagataatgtttctctgcggtgaagtgcagcaaaaaacacgtattgaacgtgttattggctttattcttgctatatggggcatattgttttactctcgtctactgagcacaatgactgaagagttcagggtaagcctcttttaaacagaaaattttagcattaatgctttacatagatggcatcctgttgaccatcagctggacagaacaatatgtacaagctcagagaaggggcacaagtgcaagttatggagtctgatcatatcatagtttgtggaatcaacagtcatttgactttcatactgaagcaattaaacaaataccatgaatttgctgttcgtttaggcactgctacagcgaggtaatttgctcttctgctgcccaactccatattaagtcattaatttttatattagtattctgaggctaacttactggttcttgtgttttttcttatttatgtatacataggaagcagagaattcttcttatgtcagatcttccaagaaagcagattgacaagctagctgacaatattgctaaagatctgaaccatattgatatcctttcaaagaggtatgaccactaggtaattttctttcaaactatgcatagatttaatgagttctttctttcttattactattattatatatataatgtgttccgttcattttactggtagaagttgtttatgataataaaacaaatatacaaacaacaaaaagggaaaaagaattttgtcacaagtaattgttgtttgtggggtgatgtaagaagtagggcctatagcttgagaacttatatctattaactttattatttatctggattaagacttgttttctctacggattgtaattggattttaaggcttcttgcgtatagaatatttgcattctgatatattgaggttcttttgttacagttgcagcctcaccatgacaaaatcatttgagagagctgctgccaataaggcacgcgccataattatactgccaacaaagggagatcggtaagaacttgataagaaaattgtaacattctttctatcttttagcattcgttattgtaatttgtaatgtgctgtctgtttgagaaatcatctagtgcatacccaagagaggtagctcaaatggtcaagtatgtggttcactcccacaaggtctgaggttgaatccctcctagtacctacatagaaattgctatagtttcgtggcccccaaatattgccgggttaggcagggatcctagtttcaaaaaaagagaaatcatctagtgcataatagaggtgtattgaagttgcttcacaatgtagtggttggttagttcttatcatttgtgtgctgggtttacctacatcttctttttagatttctgcaatgcacgtttgctaggaatactagactcagaaatctgatacataaacatgatttcatggttcattttacttcgtcaatacaggcataggttctgccgattacaaatgctcaagaaagctctatctttatcacactagcttttactgtcttgtctaatctacagttttctgtgcaaactttcccttgcatagccagcagccttcgatttcatcagtcttgaattgtacaaatcactctacaaaatcgttggctgtataattttaaaagaaattatcattggaaatgtaactaaggatatgaaacgaagaatacaacaaggatttatttttgttatattttatgaagagatgatataaaaattacataacaaggagaacaagaagtccacctaacaaaaaatagttatgaatggtttgtcagaactaatagcactttgcaagaaataggcaacctcgaatctagggtagacatacatgaaaagaaagactgagggctgttggttccaacagcaagagaaaacctgacactattctgctaagagaatataagaatattgtttttctgtcttcctttttataataaagatcactatgtgtaatttttttttgttttttcaatttcactcagtcgatgtgtaaattgagatccttaatttcttaggtacgaagttgatacagatgcatttttatccgtgctagctctccaacctattccaaacatggaggcagttcctactattgttgaggtatggtcttcctaaatttttataggtctgtaaaatgtttgttgtgtcaaacaatccagtaaacatatcttctcaaaatgcaggtttctagtgagaatacatgtgacctcttgaagtcaatttctggattgaaagttgagccagtagaaaatgtcgcatcaaaattatttgttcaatgctctcgtcaaaagggtctcgtaaagatttacaggcacttacttaattaccagagtaatgtaccaactacacccagaaagaaaattattttcaacccagttcaccatagcagcagtgctttcgatgaatcaactgggagaagatttattatggtttgataaatatttcagtattgtagtttcctcttcagcactaattgagaataatatttatccattgcagaaaacgtctttaatctttgtagttttcctaatttagccggaataagatataaacaactacgacggggattccaagaggtaacacaatctgtgaaattgtagttcttatagtaaagtagtttaatacagttctgatttgggtgttcttccaggctgttgtatgtggcctccatcgtggtgggaagatatacttccatccaaatgacgatgaaatcttgcaggaaactgacaaagtaagtttttacttgacttagtttaacattcgttctttgaattaaagtaagcaacataaattttgagatctctagcgccttattaatttgagttcccagttatttatcttttaaatgttgtgcttggggttacctgatgctaatgtttaaccagacatggttctgaatgagataatgcaaaacattagtactattctgctgtcctttcaacagtgttccctttctcatgcagatattattcattgcacctgttcataggagtaagaaactgaatattgcttttacaaattttatccaaaaagccagtagttctgttcagagtttggacactgtagaaagacataccgacgatacaaatggaggggttgcagttacaaaagtacgacttgaaaatattgttcagcgtcctaccaaatcaggttccaaggtacagacttctgaagctatacctccgaaaatgacattacagagaggaatatttgattttctgaataatgtcgtttatttatttttcttatttgaatgtagacgtctgattggactgttggaccaactgagtatatacttttgctcggttggcgcccggatgttgtacaaatgattgaagaatatgataattatcttggacctggcagtgtagtggtatgggcttcttttcattcaggagtccttgttcaagggtcttctctatacttttgagtttttagattattgtttaactgggattgtactaaagcattgtgcctccctagatgcaaggtcatactacaactctaaaagatcaaatagatttgttcttcctctagcgagttattccaccaatttttaataaaaaaaaattgtgatgctgagtttaaattttgaattagataagttaaataatcatttaatattaagaataaaattattgaaactctattttttgtaaacattaccagcaattagtacaatgaatgcataataaatttaaattttggaagaaaaaaggggtcattttctttatcaaatgtttttaaaatacaaaggttggcattaattttcttttgcatgcattgtctatagacacgttaacttatctaggtctgaagtacaagggcatgaatgcatttgagagcaccagtaactgggagttagtggaacatggtcttcgtttattgcatgaaggagtattgttcaatgcatattgattataacgaaaagatattataaatgcattttctctcactctataatatatgtatcaaataaacatatatacatttatgtgcaggaaatttt

SEQ ID NO: 186667 - DNA, 1472 bp, Cannabis indica
gactacaaactaaaatatttttttagatatcatcattaagaacctcaagctgatcaatctttattttgcgaaggatttgatattgttctataaaggtaacactgccttggtatcatgcctagctaaatctttttagctgtttagttagtcttctggtctgaaagtaaatatagataaatccaatatctattttgctggtattagtgagtctgagcagaagaatttacaggaaatgttgccttaccgagagggaactttctctttggaacacctgggagttaatcttagtaacatacctgggctagtagacacttaacttttactaggagggcactcctcattaattcagttttgataagaataaaaacttattggatgagtatattcttattgcctcagaaagtttctaaggacataaattatgtaagaattttctttggggtgaaaaaagaaataccagtaaaatccatatgacatcatgggagctggtttacaaactgaaaaataaggtttagtggattgagattttgagaaagttcgaaatggaataaggcatcattggctaagttcctttaggctataactatgaaacaagatgatctttgggtaaaatggattaactgtctctatttaaaagaccataaaatttggtatcatgaagctaaatttgatgtgagctgatattagaggaattgcttttgaagctaaggaccactttttctatagcagaaattgagatggttggcaacaatggaaagtttattgtgagcaaggcatatgactccttgattattgaagggggtattggggtatcctaagcatgattcatcttgtgattggtaatttatacaaatcttcttactcgatacaatctaattcagaagaatgtgtatgttgaatttgatatttgccaccaatttgtgagatggacttaaaaagttatgaacacttgatttctcattgcattttctcttaaagagtgattctcgaaatcagtaaattaaatgattaggaagccatttttggcattatcaatttgaagatttggtccgcttgatggaaaccaagagaccaaaacgactaatatcgaatgttcatgtatgcagtttttgctggaataatgtatggtatatggataaattgtaatttgtatatttttgaaaagaggtgcttagctcctcattgaatagatggtttagtaaaagaaaatttaaaagttagattgagtcttgtaaataagagaaagttgagtcaaagtcataacattgttagtttaattaatgaaatttattatttatttattttatttttttataaatgtcaaaagaaagagatttcaatggtaaccattgttattatatatataataataatttttatagtaaaaaaattatcaatacattcgctcaatcgcatacatgttatgtaagaacacaaagagtttcaccttgggtcgaagtaccaagttaaaa

SEQ ID NO: 186668 - DNA, 1556 bp, Cannabis indica
atgggttttatttagggcacaacccaacactacatacgtaaaataggttcggtaagaataagagagtagaaagagggaagacacgaaccctcgaagtcatgcacacgagtggtctcttgctgggatgggaccttgcatatgagggaggtcctcgccgtgacatggtctacgagcgaagaggactcttgctaggtcatggtgcatgtaaggcaaggaaggccctcggtaggtcgtggtgcacacgagcgaggaggaccctcggggtttgatgcatgtgagtaaggagggccctcgcagggtcacggtgcacacaaggcaagggggaccctcggggtccaatgcatgcgaagcaagggaggaccttcattcatcttagggtctcctctacgacgagaggtcccttgcccatctcaaggcctctgatttcttctagagtacatacacatgtaagctttcttatgcgtttaacatgtgtaaaattcgagaactttagtcatgttaatgtgtcatgttcatcgtacaatgttaatatctcgtataaaaaaaaatagaaaataaaaaattcgtatagatggtaattgcccacatgtagatatatatatatatataaatgaataaatttcggccaaatttcttaaagtttcattatagttgcaactaaccccaaaattgatttgttgacggtaaaaccttctaaatctctattatgttagtagtttactatttctatgtatttcttgttgttatctgccatgttgaactgtacacgtgtacacagtgtgttgttaacatagacgtacacatgatacaattttactgatctacataaataattagttaaaatataaaaaaaaatgattttaagttttaaaataatagtaaaaataaataaaaaataaaacatattagaaattaaaattaaaacaaacaaaaaataataataataataataataaaaagaaatcctaacctaaacctaaatcccatctctttcacccattctattctgactcccctctgttctttttcttctttctcacgacttccatactagatgggtccaattgctgacaaaacctgttctcctccttctcaatccctttcaagcctgtttggtacacaagactggactggattagataagccaatttgtccagtccagtgtttggacatgctgaatgtctggataactaattcagctaatcccatctgtctaagattatttatcccatctggcagggtgggataaaaatcccatataggtgagattttttttatcattcttttaaaatttttattttgttaatacattttaaaattaataagaatttaaatgaaagaattattacaaatttatttataaatttttttatcaaaaatttattcattaaaattagtacaaatatataattttgaattatcatatataagctttcaaaattaaaataatattaattaaacaatacttatttaaattgattataagaaaaaatataataataaagttatatattcttctgaaattattagaaattatattaatattttagaaaatt

SEQ ID NO: 186669 - DNA, 1839 bp, Cannabis indica
aaaaggtgaagttcactataaaatgtctaaaagatttgctcgttgttttgctgcaatgtgtagagggtcatatccagttctctcaattggatccaaatatcataagttgagtatttggaaaagaaatacttaggaattatctgaaggtggaaaagtaatagtgaatgctgccttccaacccttacctgtttctgcattggtcttgtacataactttttttgtttcttgttgtgtgtcacaatttgattctttctctggctttagtaatattgattggtgtatcaaaagcacactccgatctcaatagattgttctacttgttccaaggccgcctcggccttccagtctttatctttgaacactatactagtctttctttatcttaagaaagttcacacactctttgttgtttgagacaaatctatgcctttgtagtttctgcatcaaaacttttactctgaattagaaaaataatgtttcagagagaagggtatagtatctgaattatctattgtcacctatggcagtattgataatttgtaatgatttagagtctggaatatgtcaaagtagggggcctaaatatagaacccaatggttaggataggaagggagatgagaacaacttttgcaacctttgaagttgtaaaaaaaaaactataatggttgctttggtatgccatagaagtcaaattttgctgtaaagtaatatcatatttttttgacaacctataatgagtgggaaaggctgcttttgccttttcctctacacttttttctcccactcaataggaatcagttttgtggtgttaactttcctgcccttcattgtcagagttgatttaacagtaccgttacttgagagattttaaacagtactaatcaacctcatcccaaatttttgttttaattttcctcttgtatctttttgagtcattctaacattataggggaagaatgtaatacaaccatctaaatctaaatgaggtaagtgtttgttgaattatatacgcaattaacttcctagcaaattgacttccattttttttttcttcctccttattgtcaatagtagggtaacaatgaaaataaagaaatgctaaatgtaccttatattatatttttttttccactctctcaaataaatgaactacacatgaatttcacttttagagcactaaatatatagtttagtagagaattattaaaaagtattattggtgtctaatatttttctcagtgttatattattattggtataattaaatattgaatctcatataatttaaaaatacaaattttaaaaaatatcactaactagttataaggctatatgtataaaaaattattagggaacatgggtgccaataacaatacttttttagttaaacaaatgttcttatcattctttcttagaaaaaaggtgtacattaaaagtcccaaaaaaaaatgttcccataagaatttgggccttttgctattaccaaagcttgtttggggactcaatgttataaattttggagccctcaactccacttttagatactattaattaacaactttccctagaaatttattattattattattattattattattattattattattattagagcattattattaagtgcaattagtgtccaatacttttatagttacactaaaaattattttcttaagttatatgagatttgatatttaattgtaccaataacaatatgacatcgagagcactagttaaatactcgtagtacctttagagcattgttattagggcactagtgatgcttagcacctctagatatgttcgttttgcgattggctagtgatact

SEQ ID NO: 186670 - DNA, 5464 bp, Cannabis indica
ttttttttttttttaaacatatagtgaaaataaaaacccaactttttgtttgaataatgttactttaaatatgtaaacataattaataaaaacgtttcttgaattaggagaatacccagatgatcgccggcgccggcccggggagcagaaatttcttcgtcggcctactcaaaaccgctacttctctctctcacctcacccaaatccacgctcaagtcgttatccatgggcctccaatacgaccttgccattgtcaccaaactcactcacagactctctgacttcaaagccattcgcaaggcaagaagcctctttctcaccattcctaaccccgacttgttcctcttcaacgtcctcgtaaagggtttctccaacaatgaatctcctttgtcttccatatctctttatacccatttgaggaacaagacgattctcactcctgatgagtttacttacgcctttgctatttcagcggcttctggttttaaggatgctaagtatgggattctgttacatgctcattctatcattgatgggtttgcttcgaatttgtttgttgggtcagctttggtcgatatgtattcgaagtttttacagtttgagttagcacagaaggtatttgatgaaatgtctgtgagggatactgttttgtggaacacaatgatttctgggttagctaagaattgttgttatttcgattctgtaaggctttttgttgatatggtttctagtggtacaccatttgattctagaaccttggcagtggttcttccagctgtggctgaacttcatgagttgcaagttgggatgggaattcagtgtttggctatgaaggttgggttggatagtgatgtttatgtgcttacaggattagtttctttgtattcaaaatgtggagagattgatagagcaaggttgttgtttgggaagattagtcatcctgatttgatatgttataatgctatgattgcagcttatactagcaataatgatacagagtcctcattgaagcttttcaaggaattgcttgctttgggggagaaagtaaatccaagtacagttgtgggtctaattcctgtatcttctgcctttggtcatttgcaacttactaactctatacaagatttttgtttgaagtttggtattctttcagacccttctgtttcaactgcattaaccactgtttattgtagactcaatgaaatagaatctgcaagaaaactttttgatgaatcaccagaaaagagtttggcatcttggaatgctatgatctcaggttatactcaaaaatgggctcactgagatggcaataactcttttcaaggaaatgatatctgtgctaagtccaaatcctattaccattacaagtattctttcagcctgtgctcaacttggtatcctaagtcttggaaaatgggttcatggcttaattaagagcaaaaatcttgagtctaacatatttgtgaaaactgctcttgttgacatgtatgccaagtgtggaagcattgtggaagctcgggaattattcgacttgattaaacagaaaaatgttgttacttggaacgcgatgatatccggatatggcctccatggacatggtcatgaagcacttgagctttttaatgagatgttgcattgtggggttgccccaactggggttacctttctatcaatcttgtatgcttgcagccatgctggtttggtgaaagaaggagataatatatttaagtccatggttcgtgatcatggtttcgagcccttagctgagcactatgcgtgcatggttgacattcttggaagagctggacaagttgatcaagccttggaatttataaggaaaatgccagttgatccaggggttgttgtttggggttctttgcttggtgcttgtatgactcataaaaaccatagtatagcacgtttagcttctgaaaagctatttgaattggaccctggaaatacaggatattatgtcttactctctaacatatactcagctgacaggaattttccaaaggctgccatggtaagacaagttgtcaaaaataggaaactagaaaaggttccagggtgcactctgattgagattggtgaggacactcatgtatttacagctagtgaccgaagtcatcctagaacgatggaaatctacgcaatgttagataagttagcgggaaagatgagggaggctggatttcatacagagactactactgctttgcatgatgtggaggaagaagagaaggagctaatggtgaaggttcacagtgagaaactggccattgctttcggtcttattgctactgaacctggaaccgaaataaggatcattaagaatctcagggtttgtttagattgccataatgcaactaaactaatatcgaagatcaccggtagagttattgtggttagagatgctaatagatttcatcattttaaggacggcttgtgttcttgtggagactattggtgaagaaaattctttgcaagttaaggtatgcattgtcctactatttatatggtaacattaattgttcacaataattttgatagacaaaaattgatgaaatcagatgttacctttctctttatacataacaaatttacataacttctattctatcaattgaaaactaaagaacttgtatatatgtatttctcagtgttacaataccatgattaaagtcattacttttgtttggtaaaatcaccttttgttggtcactcacttcaaattaaaaacagcaaatgaaaaggatgatattgaagaaaaatagtaaagaaatcatgtgaaacaaccattctcaagaacaggttgtgttcttgttactgcagcagaaggcattttgctctgaccaacccatctacttgtaagaaccaaatcttcatcagcttgtttttccattatctgaatcttctttgttcttaaaaacctcatagagaaaatcccaccaaaaccaaccaaaaccagaataataaatccaagaatggagccaatcaaccaccaatgccatacaatcttctttttttgtaccctgctgttgttttctggaataacaactgaaaaatgaccctgctctctggatagacactcaccgaaataactcatctcactaagataaaagcttccattagctgcaaatgtaacacattttgtttcgggttttgtgctctctgcgagtgtcaagtttcgaaaatgaatcgaaataggcttccccatagtagttagactgactttagtgaagctattggcactcggatttgatgcatcgaaagccatgaaaccaacaaccgaagtgattaaagagtaacctggtactttatagtaatgagaagaccaatttttcatgtcatgataaaccaaagcaagtcttcttacatgaggcaaagagattgttcttgaaggtatactaaagtagctaaaattagctccattataccacaatccccggcttcttatcttcaaaatcgacacttctatacccgataaattggctggcgggatagttttgtacaagacaccagtgtgaggcctgtgtctgacaagcgccttcgaagtaaaatcttgaagtaaagcatctaaagaagctgttgcagacttgttaaaacaatttaccaagggaaaacaaacagataagaagagcaaaacaaagatgtttaatttcatcttggcttggaatttggatccttcttaagacacaaagtgaaaaacttgatctttttaagcattggaaaaaaggaaaaagaagaaagaaaaaaacagtacaattatgataataaaagaaaagtgtaaataataaatatgtttgaaattgtttgaatgatgtgttttgaataaagatagtgagctgtgagcatggtatgaaaagggtcccatataaagagaccaaactagtaactaataagacactatctttctttatcaaaatttcactttgaatttaatgtagagaagaagcaatcttttcttttttcttcttcttttaatattggcccatattaagggtacttaccattattggcgctaattgctctttaatcaaaatgtagacatttttgaggtgtgaaatcatgattcatggttgactagactgatctctttctattcatgatagtaatgttgatggtgttttctcaagcattttgttagacaatgcaaatactataggctttttagtaatttgaaagtagtgtgagagcctataaatatatgtaattgggtagtcattaatggatattgattgagaaaatagaatttcgattaaattaggagattgacaatgtctctaaatctccaaatacattcttcgagactgtcaaattgtcaatttctaaaatttataattgaactgaagttctattttcttaatccatatccattaattacatatttataagcttttatactactttcaaattactaaaaggtccttatagtattttcattgtctaacacattttcattgttttctttaaactatagtttttttatgttaacctaaccatagttgagtttcaacttttgattcttacttttaagagaccagttctatctttcttattgtaattataatcaattatggttcccaaaaagaaaggaaatgaagatgttattgtaaccaacggctatatgagaagcctcatgttttaaagtgaaatgaataagaagcatctttcccataaagaacaaaagtgtactaagcaatttgactataatttatatgagaatcttttaactccaacttttacctccttatgttttgcaaatctcataacttttttcctttttcttttgcagaaataaatctcatagcttgtttgaattttgaaaggttttatctaataattattacacaattaatttctctaacaaattaggttcttcgttatctcttttgataactaggattttgacaattaacattacaaatttccttagaagattacttttgatactaattttggggcattggaattttggaaatgtggaatgctatcacttgtctacatttatctatatatttatgttttaagttaccgtttcgtttatgtaactctcttatttatttaaaataaaatactataaataaactggtgttgtctttatttaaaaaaaagaatagtttaaataataaattgaaggtgaaatttattagagtggatatttattaaaaaattattaatattattattattataataataataataataataataataataataataataataataataataataataataataataataatttgaatagataattagtcagattttaatttaatttaaattctatatacagttggtatatatgcgtatattatacgatatatttttttttctaaaattcctaactaaccatatatctatcgtatctatctttatctaaacgtatcacttctttatgtcacaactagatagttctaatcctgaaagtcttggtagtcac

SEQ ID NO: 186671 - DNA, 3999 bp, Cannabis indica
aaaagaaaaagaaaaatggggatagcagtgcttgatgccctagacaacgctcgtacacaatggtaccacgtcaccgccatagtgatcgccggaatgggcttcttcaccgacgcatacgatcttttttgcatctcagccgtctctaaactcctcggccgcctttactatttcgacccccaatcacctaagcccggaaagcttcctactaatgttaacaatgccgtgacaggagtagctcttgtcggaaccctagccggccaactcgtattcgggtggctcggggacaaactaggccgcaagaaagtttacggaatcaccctcatcatgatggtcatttgcgccatttgctctggcctctcgtttggctcgagctcacactccgtcatgggaaccttatgtttctttaggttttggctagggtttggcataggcggagattacccgctctccgccacaatcatgtctgaatacgccaataaaaagacccgcggcgctttcatagccgcggtgtttgcaatgcaaggagttggaataatcttcgcggggttagtttccatgattttttcgcgcatttttctagcggtgtatgccgctcctccctacaacgaagataaggtcttctccccactcttttcaactcaacccgaagccgattacttatggcgaatcgtgctaatgatcggagctttaccggcaatattgacatactattggcgtatgaagatgccggaaacaggaagatacacagcaatgatcgaagggaacgcaaagcaagccgcagccgatatgggacgagttttggagattgaaattcatgatgaacaagataagttggctcaatacaaggctgcaaatagctaccctttaatgtcaatggagtttttacgtcgtcatgggcttcatttattaggaacatcaacaacttggttcttactagacatagctttctacagccaaaacctaaccaaaaagacattttcccagctatccatttggtcaaatctgatactcatgtcaatgctcttagagaagtgtttgaaacagcacgtgccatgttcgttatagccttgtgtggaacctttcctggttattggttcacagttttcttaatcgaaaaactcggtcgtttcaaaatccaactcggagggttcttcatgatgtcagttttcatgttaattataggtctcaaatacgattatcttaaaagtcataatggaactttgtttgcagtgttgtacggtttgactttcttctttgccaattttggccccaacagcacgacctttgtcttgccagctgagctgtttcccacacgtgtgaggtccacgtgtcatgctatcagtgcagcttcgggtaaggctggtgctattattggtgcttttggtattcaaacctacactttggatggtgacactaagaaaattcgaaagacaatgtacattttggctgcaaccaacatgttgggatttctcttcacgtttttagtgtgtgagaccaaaggaaggtctttggaggagatttcgggtgaagatggcggtgccgccgccgagaatactgccggagggactgtttccatgtcaaggcaggaaagtactcagagggaaaaggaccaagtgtctgcgtgagattatgataataatgaattaataatacaagtaatattttaatatattttgtgtcaattaataatgttataactctttattataatttcaatacgtactttgttatattttaatttgattattagctggatttgatatcctctatatatatatattgtagttgacgaagagtgtgtgtgcttgaagtgtatgaactaataaataaataagtaatcaataatttgttactttaattaaatatattaatatgtatattttgtttttttagggaaaatactaagctatcataaattaatagtgtatgtcattcacaatagttgagtaattcgatggaggaaaattctccattcaagagcaagtttcattcaactctagaacatatcgagtcaaacaatgacgagtcatattgattgaatatttgacatgagtaacatgactctagagaaaaatgataaaaggttaaaaatatatacaattaaaattgcaaaatgatgtgcatttaaagcgttaaaaaccaatcaatccatcgatctcgacatgggcaattggttgctgcaattgcaaaacctaaattggactgtggaaaatagttttagtctcccagagcaagtggatgccatggaacagatgcttgaactggcagaggagatcttgaaacagagctatcattctggtgatatttagcttgagcatcctgaaaattttgcaagtaatttgcagcaaattaaagagacatggtgcttgttggttttgcagtacccctatgtacaacattatttctctcagaccatatagatcacatagtacaaattatagattctatatcagttttggtgtaacgggttgaaaagtgcatcaagtagtcacctctatgcataaagttggcaagtcttaagtcaaacaccaaatctgaatgtcgtcaaatggaacgtgcatatttacatccaaacaggacatgtcctatgaattcccaatttaagaacaaagagagcaggtcgagtcagtaattactttttgtcttaccaaatagatggcgacaaggagtgcatcgtggactgactttttgtggaaactgcaaagaccgaaaaaacatacaccaagatgcatgcaaagttggagggagaaaatttagttgcaacttcaatagatgcaactaaattgtagcccgaacacctgtttgatcatgatgccgaatcagtgagatcactacagctagtaaaaaatacttaaagtaatgtcaaaatcctctcaacatccaaaagtgagaagaattgttccagtagctatctatcccattgacattcttcatttattaacactacaagaattatggcttttaatgagaacacatttcgtcagtaaaaggtgggtatttcgtcagtattgaatatcaatggcgacatttcgtcagtaaaatgtcgttggtaatacttcgtcgatgaaaggtattattattgacgaaattcaaagtcgttggtgataaaaataattatcaacgactttgtcgttgacaaaaagaattatttttttctaaaaaaaattcgtaagcctatcaatgacgacttttttcgtcattgataatattatcaatgacgaaaaagttaccattggtttaattattttattaaaaaaataatattataaataaaaataattttattaaatattaattttttcactaatcaattttattaaatatttttttaattaaataatatatcaaataattaaattaaaagtgaagcataacactaaactaaatatttttatatcacatatcaaatgttaaatatagcaatatccttcaataaaaaataatactcgctaaagtgaatattcataaaccataaataaacattaaagtaatagttcatataactaagataaaaatactaaaataaatttgttgttgcgtcgtcatcatcatcatcatcatcatcatcattagcattcctcagaatctgcggttgagaaacatccggcatctgtgggtagtacggaggcatctgcgaacttgtcatcatctgagcagtccgttgcccatgtggtgtcggcatatgtgatgcatgttgtccatatggcaaatttaaaagagagaaatggttgagataaggtgacccaatctctcctcttatctgtgtgcttattatggagtgtctcacaagaagacttcaaagggcagctgtcaattcttacaagtatcatcaatgtgtaagggccttaaaataatcaaccttttcttcgcagatgatttaattttgtttagtaagggatcaagactctcgattatgactctcaaataggtgactgatgaatttagctttgttacaatcttgcacataaatgctaataaatcccaaatttattttggggg

SEQ ID NO: 186672 - DNA, 10421 bp, Cannabis indica
ttcaatttccaagtttcattaaaattttcatgatggagaaaatgggcatatcatctcttttatctctttatattttataattatattaggagaaacgtcattctcaaaacgaaaaaagaagagaagaaaatcattcacaattattggttcaaattttcatcaaaataataaaaagaaactttcacaatactttgaattgaactgaaacagaagaagcaataattaattttcaaataaaagaatgtgattccatgaatctaaatctatcactaaatctaccaattaaaaaaaaaaaagaaagaaaaggaaaacataataaggaaatggaaatggtaaattttataacactaaaaagctgctgtgctatacttctatttcacaaagcttctaagctatgcctctctcaaacaattaaaaaaaattagacaaacgaaaaaattcgataagaaattggcaaaattagaatgtgtattacattacttacaacaatacaatacaaaagggtggattgattagtctcagatcccggaattggggttgtttccggcaagaatgagagagatctccaaacctcggctgaaagcctggttgaacatgagtctggtttggaatgttgacacgaatgggaaccaagaaaagaatgcaatcgggatgaatatgatcattcccatacccgcgtcgtataatcgagcaatggagcgaactgacttccacagtcctaattttttcatcaaaggtttccatgcagctgcgatctgggggtgcgtcggaaggtaaagaatgttaataatcaaagctataaaatcgagaagagaacggtttagcgaattataaaactcaccgaaagaagtccccatccggttggtacaaatgcaaggatgctagcgaaaatgtctggaactgacaaatctgttaaaatgattgcgacggttataccagcgagtgctaccagaaaggaaatgccttggatgaaccgcaaaacgagctggaaattaacagagattttctggctgaaggtgaacacctgttgaaaccaaaccgaaatgagtctcaaagcgtaacgacatacattatatacgtacaggaacccttgaagttaaactcgtaccttgaaaagaattactagaactgctaacactatccatgaaaagccgtagatctagaaaacacaagacggtggggataataagaacagtatgaatcaaagaaaggaatcgtcaaaagttggatagaagagttcacgtaactaaagaattagttaaattaatgaatagaggtaataccgaaagcgatgtattgtttccttgcaaatctagtttgtagacaacaccaaactggaaaataaagaaccttagactaagaatagtctcagcaactcttccactgaaagtccgaatatgtgcctgtggaagcaatgaaattttcataattaccgacaatcggattgagaaaatagcaaagtaataaagatcgaattgagatcagaaatggtaccagttcctcatcccaccaggcttcccagctttcttctcctttaacaccgattccgcctctgtaaagaagccaattcgcccaatcacggaaatcttccacaaccctacaaaaacattataaagagttatatatatatacaagcgatgtggcaccaaagtttgatgtaaagaaaaaagagagaagttacttacttttgccattcgaatccagaaggattgaacaaatacggagcgaaaagccaagaaagagccataaaccaactactaacggatagaagaatgtaagatattatacccccttcgttgtaaccatatgcaaggtatatcaccaataagagcactacttccaatctgatgacaagaaaaagcacatcaatgaaaaaatgcgatacgattttcgctcggtaaatattaaaagcaacaacaataatacaaaataactaaatttgacactcagccttctacttcgatcgtcaaaatattatattaactgcaccatattcgatagtgaaacaaccatatcaatccataacactataaaaataactttccctatatgggggggagagagagaggagtagtacccttttacaaaatgactccgggaataaagcctgtagttttctgcaaatttaatatgcttgaccacgaatcccctacccgttgcatggtactgttaaaattaacacaaattgaagtcaatcatgataaacaaatacaccgaaaaataattacaaaggaaaatgagctttaaaagaaacgaataaagcaaaccttagcaccaccgtgaagtatagtccggccaaagtaatgtgtccttgttccaagagagaatgtgaagaaaacagagcaaagctgaaattgcattgtgacaaaactaacaacagcctgcagaagtgataaggaaactcaattataatactaataattataatatcacagataggaaaataaatccacaatatcatgcttcaaaaacccttaaaaacaaaagcatgtcacagaaaatgattgtttaagaaaacataaattacctttaggaagccttgttccaatatgaagcctaagatcattggcaccgcggtaaagataccaatttgaaagagaaattgtgtattcatagcagtagtaagagcagtattatccataatccgagctctcacttgaattgtttcaccaactccagataacgcctgaaagaaaaaccatctctcacaattagatatgcagaatacatagcttaaaccttaaaaatgtattttccagatgtgaagttatcgagcattttttcgaatcatatctataactactagtggtacacgattacttgaatgattttctatatgatctttatttttttttctataagaacatcttaaatatgaaaattgcaaaatcaacttaccaaatacgctttcccatagagaaatacgtacacagtcagcactgtcaactgcagaaacacaagtaacagaggtgagtatagtcggacgtacgactaactgcctagattcagaaatggagaacattaacacatgaactttaaaaaaggcacaggaatggaatatctctaaaattcaatcttcccctcaagaaagaaacctacagattcttaacctataacattctagtgttaattctcacccaaagaaagaaaaaaaaacactgtttctcgaccaaaaaggaggggcctcatggggaaaaatacaccaacaatcagcttctttagaggccaatattttaatgcatataaactacacaaaaccatatgacaaagtacacagccagttcatttcagcaaaagacaccgtaccattgtacaaaagtagaatccaactgtggtaaagtagaatgacatcatccggaagaaatcaaactgctgaccaagcctgtagacatcacgactaagaacttgttcaccatttcccccagcaactttcccttcaaaaagagcaatttgattgagcccaacatctcgtcccttgccaacctgtttttttatttattattatagtttatagaagaaacataaattgtattatcaatcaagaaaaagaaacttataaatatgggacaaaacaatgaaccacaaacaataaataagaactctcccagtcccttagaaaaccgggaaaaaacgcgtatctataaagacacattgtaatcttgtgaaagtgaataagtttacctgaatatactcgtgatgtgtaatatttccctggcgtagagttgaattaaatcctacattcgaagaccatataaacattagaaatttaaattcacttcattctcctcactcgaaggacaaactgcagaaaattgctcaagatggaaaactgtgtaaacggggcactcttgcaaacctgcgaatatatcttcactaatattgatgacacgagaggccttgctgataccaccccgtgttatatgaaagactctatcgaaaacatcaggatgtccataatgcatacggaccctgaaaaaagaaataagaaatgatcttagactcttcaaaacatccaggaagcagatgaaatcaatggcataattaaaatgtacttacttcaaaggtgttgataaaacacgttgacctaatgttacaaagcttgtctcttggtttgacatgaatgaggctaaagacgacacactgccacatgaccatttgaacaatattgatgatgcaactagtaaacaaataaatatatgtatatatatatatatttatatatggttcgcaaggaagaaacaaaacttaccttccagtaaagacatgctccctaacaccaagaattgtggcaggacgaatgccatgatcacggtggaattcttcaagcaggtttctcattttcaaagcttcctcaaaatagttatcctaatagatagaaacagctgaactacattagaagcagaagaaaacatggtacataaattcaaacattgagaaaactagagccacatttcctattgagaagaagaaccattgacaaacaagggttaagaactgtactaaattattgtcgtttaaccattttaagtttttcgtacagcagaaggaacctaaaggataagggtgtcacctgattcatgtcaattgtttggactgcatttccacgagtgaatacaattgcatgattttgattctcgggttttccttcaccaagttttggatttccaggcaattttatagagtaaatttcctgaaaaacagaccaagtcaacactaagtaaataaacatctaaattcaaaagttacctatatagtaaagagacatgctaacaacaaaaataacaacaacaactgcaatagcactaagcagtaaccataagtataataaaaatcattatcgaatttgtaagtgtggaaatttcctcatgcacctttcacattaataaattattgcaagtgttcacattggaattttctcaagacattacacaaccataatggcagtttgattagttatgaattcacatttttaaatcaaatttgttaatttagactttttcagcctataaatccctatatgttatataccatataccactaagtaatctaccagaaagggagaacttgggaacggaaagaaaagcatatgaattctttgttgatataaaattgaatgagacagtacactaccacagatactacttgacaaaaataaagacaaccaaccttgtccttcccattgatatcacccttaacgagctttgagaaatattccctctgtactttaccatcatcctttagtgtttcaacctcatcaataaaagcaacacgaagggcttcatttctaacaattgaatcaacagtaaaataattagtcagacagggtcagaaacagaaaaatgataggacgggccagaatttacctttgcataagcaatgcaatgtcagcagcctcaggtttttgatcttctttctgttttccatatatttgacatgttactacatatgtaaactttaagtctgcctgagcccgtgcttcaggagataacgtaaatccttgagtctcaatttcatcggtattggatattgcagtttccaaatctgaaattaacaatacgataagtaaatgataatatgcaagaaaatttgtaaatatatatatacatgtaattaaagaagatcctaaccgccagagctttttctctctaagtaggtctgaagcatcagagctttcctatagtacatcatcccacgaactgcaaaaaataaatattcaaaaatttagaatgcatactcaacattgagaaaacaaaaagaagttttcaagtacaaacaacaatattgacataaagaagttttcaagaacaaaacttagaatgtataccagttctggccaaggtttgaccacggtatgaggcccaaagccgaagttccaatatatcattcggggtatctagttctgattcatgcgcattttcatcacgaccaattcgatgaagaaaattcctccactcatctgcatgcataatatatttaagattaataaagtgaagaggacaaacattcaatatgagaacttcattctttccgtgaacgataacataaagaaatacgacacacacaaacaagaagggactgatcaataaaatgaacaaaaaaaggctaagttgcatatgattaaaagaaatacataaacatgaaattgttaacacaagatgagcaaaggctaaaccactaaaagatcaccaaaagtgtgaaatgctaggggcttcttaggtacatctaatttttattattcagaggaaacaagaaacatcattaagggagagattggtgttacaaaagataaatatattgaaaccctcgaattaaaaatccacaacagttgaggtataatcgaaaagaaaaacagacatcttctggaagtataaaggtctcttatgaatatgatatctctacaaatgtcctaaagcctcttagtttcttgcagcagcatatctatttaacaaaatgcaatcatgtactttacaatactgaacgccatttcaaacacttctccatttattcccgaacacttgactcagctccacaattcctatcaagctttttaataggatgttacagtatgattgttacctgacctctaggacttatatcttgggatatattctctcctaaactaagctaatcaaacataatatttgcagaattgattttctcttatgtgcttttcagttctattgtatttggatacgttaataacaaattaacaataatcagactatcaaagacttcacttaaaaacaatattgtcagctactttgctatgaaattgtacctgggaatattttttggagataaaacaatactgatatcccatcttcatttctctccaagagttctttcatgctataaatcacaacctcagaataatatggcgtgaacacactgcaggacacataggacgattagtgcaagaatcagtaagcagaagtatgattcctaacagcataaatctgaaaaagcatattacctgaaggacaacatctcattaacgggcttagcaacaggcatctccatgaaaagagaatttgtgaagaactgcagcctccgccttgcctccagatttcttggaacatttgcggcagaatctttgatagttagtaatgaatagagccttttgacctgggatctctgcatatggtccacaattacattatatctcacaccaacaaattatacaagtacaaaaggaatagcgaaatgatgcatgaacataccaactcagggtccttaggccactttattttctggaagaggcggccttccttccatgcttttgataccaaataatatgtttcacggttttccctaaaagacaacaaaaaagatcggataagccaaaagcatcttcgctgcagtaaattagaacttgcaggtttaacaaacataccccatattaacagataggagatcaagacggacaacatcgtacaaatcctgaacagctttaactgctcctttctcttggtcagatgtttctacttctttctgtgcatatacaaattcaaagtgaaatgcttgattagtcaaccatttattgtaaatgattgcaccaacagactaccaaaaacgtgagaagaatacaaaccagcattcccattaatgcagtgactcttgttattaggagtggcagcttagttaagttcaaatcagaatgcagatttctctgtccgatgcttgattgaatatcctcatatatcctttcaaccctgaaaataaacaacaaaattggtaatatataacaccgtgaaggatgaatataaatggagagagagagagatgtttgtctctcttaaaaggaacttaccacaactttccttcatcttgcaatattgttgtcaagatatgcttaagagtataaaagcactcctgtactgcatacttcatatattcgtctctcgaaattctatcccataattcatcatcttgtgagtctctaccatcaacagcaatgtccttggcgagaattatctacataagtatacagtagcaattttaagctcagtcaatttgacatgatgttgaaatacataattgcaggacatgctttttccagttaacttatgaagacatagaattatgtacaataaatttgaccattattaaccttgctagcaagaaggaagagaggccattgaaccaaattgagagttccagtatttttaggcattaaaagcaattccatttctctgcagaaaaaaatctcaaattaataagtggaacccaaaataatggcaaggcaacatacatcctgcacctgcagagcttaaaaatcggtacaaaattctagtgctcactggtttgttaaataatcttcttccctaagatttgctatgatttcattccaaaacggagagaaccgcgcagcattaaccttcttctcaaaaaccttcaaacaaacaattcagtacacgtaagattataaaatgaaccgtgattaggtggggtgagaagaaaagataacataaagctaaacaatagtaaaataaactctatgcaatctatgctagcttgtccaacaatttcaagaaagaaaatgtcatgtaagaaaaataaaatctctacgtatagtcgttttaaaatacaaacaaaacacataggaaagttgcctttttttacaagaaatataagcctgaaaaggaaagtgaaatgtcgcaaaattagctataatatcatacttctgttaaaaaaatcccctcaattctttgataacaagatgtcttccatcagtcttagtttatttaactctcgcatatcacaaatcataataaatcagttaagcccatattggcaagatattgtctagtgtgagtattctcacactaaagactcaggacgcattttcctttataaaacattgatacagtgaaaagaacaactattaaaccaaagctataaaatagttagttttatccttttaaatgagcacttttggctttttttctttttcctttttttaaaataaaaaaataatagttaaaagtactagctgtaaagaaacttcaattatgaaatgctagtagttatttttgtaaaaattacctgactggacgcattctgagaagtgctgcaaaataaaaataaaaaaatcatttagatggtaattgaacaaaagacaacattcacacaattaagtgagcaataaaatacgttcaatttgccatcaatataaaatagtaataattagaaagatggtctgatgagaaaatccaacctgttggaaagaggtacatgaagagtggtcataaaagcttcaggaaactcttcaaaaagtttgtgaactaattccaaggatctaatctggagatgacaacagaaattttgaaggtgtaaggttatggtcaaacatataaaaaaacaaataatcacaaaagcagaaacaaatgaatcagatcaaattactcacttctcctagacgatctctggccccaagcaaaaagccccatacagaagatatgatggtgtagaacacatggatatctaagagataaatctgtgacacagcagatgaaaagccaaagaacatcctttaaaataattataatggttttgattaattagtttacttaattatcaccgaatactgattgttgatctaatctcttcttttcatattcatttatctttaaatttaatatgactaccaattatgttgaagtaaatgtgtcttaacatgtttaataaatagcttctttttttcattaagacctgaagaagatccaacttacagcaactacaggagcccataagctaaccacagtcagagcattatgattatctgcaagcaaaagcataagtacgagcacataaataaaaatgatcaaatagcacgaatttctaaattcgaacatgcaaaaaccagcagataataaacaaggaaaaccacaatcatcaacatagaaataccataaatataaacaaaaccagatgatataagcacttgacatttccataatgaaatagcttagcttcttacgttgagatacaaaatcatgccaagaatattgtatggtatccatctttactactgttcgagttggttttacaagtggcctgatctgaaacaaaaatagaattcacaatattaacgtaacgaatatacattacttccaaataacatattgatgatgagtaacctgtagaaaataagcaaatgaaaacttcgcgctcagaatcacaagccaaaacaccaaatacctgcaaaagttaaaatataaatattaaaatttcattcaaattaaaggtgatcagtcatccataagaatattttataagaatcagaaaaggaaaaaaaaaagattaataattacttgataaaatcagtggtcctttcatacattccacgcccaacataataccgttacctaaaaatagtattaatactaattaataaagcaagaatgaaaattaaatcaata

SEQ ID NO: 186673 - DNA, 5219 bp, Cannabis indica
cctaacattaccggccgcccgagaaccccaactcaaatatacaataaaacagtaacaaaagtaagagcaaaacagtagcaaataataggaattgtatattgaatgtattgagaaactcaattacaaaggataggagcccttaggcccctttggtgcaaatagagatttactcaaaacattgcatatccaccaatcttcctaagtattctatatatactattgtaatctcactcaaacactcttcttaatacaatgacccaattacccttttatttaatatatgttagaacaccaccctaatcctaggtcctaacataggtgtctatttgcccagtgccatttcttaatatagataaaaaaattatcaaacagaaaagaaagtgtacatatttaacacttaaggaccatattttacctgaattaaagattccacacgacgtcgcatccgtgtatgcatgaaaccctccgaacactgtcaaagcaacagaaatggaatatgctaaagttgcatatggaagatagaatgccaacaattacaactaacaggtgaaataagtatcgcaccttaacatggtaactaacatatgcatggaaagttgataaactccaaactgtgcggtccagttttttgccttctacatgtcgaggcaaaatgactgcaatgagaggaaacattaatctattagtatttgcagagcataactaaaacataataattttacataccaattgttataaagcctgcgtttgcagataatgattcagcaggagcccccttcaattctaaaggaggtgtgggtgaccacagacaaaggggagcgttattaagtcccgctgcccgtcttgcttcaacaaattcctaaaagataaaacaaaagttttaacatgaagtaccaggaatgaccttttcaatcaccagcagatttgcatagcaaattcaataaaatctcatccttatcagcataaataaagggatttcaccaaaccatttaatccaaaaacgaaatcacgtagaagattaagagtacctgcaggaaggaagttgcaaggacaatgtctacagagtccttaaatctcattggaaacacaacagtcactttttctgcctgccactgaaaaagaggaatgttttacgagagtcaaattcactcatcattcttctaaaatactaaaatgaacaagctccaagaaattttaaggattaaaatttaacctgaggaaggaggaagaaagactcctttgatcggtgcacaagtgcaacaaggcggtcgatattggaagcactcatccttgagccaagacctttaagaattagtcttaatggagcaccaagtaccacttctctcacagatgcaattttgatcaaaatagcatgcttgtattctgcataaacaaccataagtccattccataaacttaaatcaaacttgaccaaacatacatattggttaatacactctatggttggtttccatattgctttcatagataagtttttgacaagtgtagaatgtagaaatgtctattaaggaagtcctataaaaaaaagtggtaggtagttgttgtggggttgtaattggcaatgggcaagctgataatgattaataaccttagaaaagaaactggttgaaccttcatctggggggagtttagaaaggttgagtttgagagtgagattgaagccatctcttggaggatcaagaacttgaacaaagccactgtatgcaattttaatggcttctaaagctcccaatggaagtccaccgacgaaagcagtttctggaggtggggtgggtagtgataccgacaacaaaacatgatgtgggttcttcactgaaacctataattgttaaaaataaataaataaaaatgttttctttatttaataatgaaatagaaaaaacgatctttcttacacattacacatattttattcaattgagtcacctgaatatggaagcgaacatcatcaaactcaatccaatggtaatccaattcaacacccttatcgagactgtcaaagatcaaaatgagtattgtatttcagatttggatgaaaatcataataattaccaaattcaaaaaccctaattagacaaatatatataaaaaaaacgtacttttgaactcgattgagcaaggtctgaagcagaaatctggagtgagactgcaaaagaatcatttttgagaattgggaagagaaggagagtgagggattccaaacttttgaactcaaactttggatctccccttaatagtcgttattgtttgtttgtgctttttttggacaattaaataataatttataaaaaaatagtttcacttccattttgcatcttttttctaacaataataactcatcttcttagtaaaaataaaaataacaatatttcctcatggtgttatttatttggcaaatttcatcaactttttaagaaaatgaaaaaaaaataaaaaatcacaagaagatgttggtaggtaggaaggaaggtattttgtgaaaaaaagaaaagaaaagaagaagttttctttaggggtgcaaatgcaaatgcaattgcaatgagcatcttcttctcttcattggttgctttgcatgtgagcgtcgacttttcttttaattccaattcaaatgaattcaattgacttcaattatatattatattcatcataataaataacaacttttgtgaattgtgtggacaaaacatgttctctcattcatgtttacctaccaatataacaataccaaaaagatgagtttgataactactgcattacttcaaaactaactcatcaattggctaacaattttatgtaatcaatctacagaagtaagaaagagaaaaacagtggcaccaacttgtatttctactctataactcttgcatttcttctttgtaatctgaaccagtataaattttctggtttccttttctatctactgttctattgatgttttgatacttgttttggatgtgcatactttcttggtctgtgtgctgatcttggaatatgtttttactgaaattattgctaacaaggatgagagaaaactagcactactcttgcggattgactctattttataggaaagccatgcctgtgtgtgactggctaagacgaaaatatgactgctgccaacaggctgataggaactgaaatagaagaaaatatactgatattgattatctaggcaattcgagagccctcttctctcccactcggggttacaaccctttaccaatttcttttcttcacaccccacaaatgaaccctctcccctctatttattctattccttactggcttctaaaagttccaaacaagatgaccagaagaagtattaaacaagactattgtgtgagtgtgtattaatcgtcgaatctttttttgcatcttcttttccttgcttgtaccgagcaaggtgctcctgatactcttctagttctttttccaatttttctatgaactgacttgtatgctcaagggactgtaaaaacttgtacttttccaaggcctgcaattttacagaagaataccagctaatgtgaaaagaatgtctcaagaaataatacagaagacgaggaagagtaatacaacacaatttctacaggtataagcatatctcaagtactgatcaacaaagcataactaactacggttctctcgatgaatcgtctacctataagtaatctttcaaagagagcaaaccaaccaaaatgctaggaatgatgcaagaaacaatagaaaaaaaaaaagacagacaagagctgagttaccttctctttggagattgttggtggtgacatgacggtaggctggacatagttctttccccggtaaaaaagaatagtattgtcatgcttgatgtcgatgataatgcctttgctgagacgagcaaggtcctgagcatattcttgaagctgatcaggtttgcaaggacggcaaacaaccttgacagtctcatgcttcttccagtgaagatgcatattgagaacaacgcctccaaacactccacgcctgcccacaggaacataattcttctttttctcacctgtacgtttaatgtaatgcttctcttcctcggttagagcttcaggatcatgtggttctgtttcatgtggggttttgggaagctccaaattcctcagcttgtcaatcagccatgtctccttccgttttgcctgaagcaaaatggaaaatagataatgaagaattgaaataaatcgtatctgagcgcgagtcttttagtgattaagggaatgtagtaccttttcgagtttatatcgaatcctaacttctgggttgggagaattgatctttttccttgccatcaaacgatagaattttaattgattgactttggccttcttggacattttacggcgtttgaatttgggctgctgatgctgcggcttattgttcttactattgtcaacaagagaaaaccttacaacatcactctggcagttgagttcaagagaggtagctgaactcatcatcatgtatctaatactactactacttctgctagggtatgcatgagaatgggcaaaggtaaagcaagtgtttttgaataaaccaggtgttgttgttgttgtgcatgatgatgatgatgatgatgatgttgttgttgttgttgttaacctcctcctgcataaaacaataactttgtttgagttgaagaatagtgagtagtggtctctcaatgaagataaagaggaagatatacagtaccttgtgagcagggactgagccttagaaacagaacgacctaagcctttgattgaaatggaaagtgaaggcaacattgaatcgaatcaacaaagaataagagcactcactgtctgaatttttgtatcttttcacacactactttctcttctcatgcaaaaaatcataagagagccatccaaattcttgatgtaccatgtcaagttcatgaatttaattgtgtacactgcataatcaccactattagaaagaaaaaatattaatatagaaggaaaaaagggataagtttcacaataggttgtctttgcatttgacaactctaaaatactcttggagcctttgaaattatcaaagcacccaaagtttacattttaactaatgatggatttgtttttaattaaaatgtgtgtaagggaaattaagggaatgcaagctagatgaaatgtaaagctcttcaataataaaaaactacataaataaataaa

SEQ ID NO: 186674 - DNA, 5207 bp, Cannabis indica
ggccgtgggttgagcgatgacgtttgctgcgggttggagatttagtgggttggttgccgtgagtgtaggtaagttgagagaggaagagagaggctgagatgggatttgaaatgtgaggggtaattttgggaaattagtaaagtgatcatatatgaccaaatttaataactatgcatttaaaggaaaaattatagggtattttaagtatggaaattcaaatttccctttactttttcttctaaaagaaaaatgttactatagtgattaaattgtactaaaagcttttggtctttttatggagaaaaatattctatcaatttattgttttttaggaaggaaaatggagttgttaacaaatgaattttaatatattcataaaaaaaaatcatttattacaaatacataaattgacgaggagggaagaagactaataaattcaaagaattaatctcatttagaaatttaatttgatttttttgtatgaattaacaatgtttaaatcatctaaagataaccaattactgattttcttctcctttccatgacacaaatttagcattgttcatactccaagcattaagctttgagattttaacactctttgttccattgttgaatacatataaatgagctcctttgttaattgctaataatggataaaccctagttgtgataacacttcttccttctccaccaaaactttccacaattgaatgatcaatctgcacaaaaaaaaaaacacaaatttcggttatcaatacctctatcggtgaagtattattgtttcgttcagaatggtcaaaatcgtaccctaattagtttaaattacgaacatgttacataccaaagttcttaatgttattttctcgtgaagaggatccaagtctacgaatgctccatacgttgttttgtcaagatcatttcttaatgaagacttgctttgatcgctacacattagaacaacatacttcttcttctcactcttatcggttttgaatatgcgaaagaagattgcagtttgttctgtcaagttatctgaggctaaaaccaataaaccaaaagctccaactttgcctcttacacttaaatttttcccatcacaaagtagttgaggatcaacccaactcgagtccattaactcggcttcttctaactcagatacttcaaatgaaacttccacatccgcctaatattggatcaaaatatttgaaaagatcagatcatcaaaagaagtatgactcgataatatactctaaaatttaagtattcaattacctgtgaagctgtgataccaaaaatttcgatgattgagtcaccacgaagcattttgttttcaagactaactttctcgtcacttcttaattttttaatctcttctatcggccattgtaataattgcttcccagattcactaagaacaattgttctaggaaatgactgatacataattacacacaatcaatataagttttctatataataaagagagattaaggatattttgactcataattacatatcattacctgaagaccagaccagcctttaatgaaagcatcagcatcactatcagactcattcacccaaccccaaactactctcctcttcttttcagaatcataaaacgatttcgaagcataaaactttccataatccaatctcaaatcgaaaccttcatccataaaatcagtctcaaccttaaactcatctgtttcaatagaatactgtcctaatacatagtaatcatgactatgaaagctaactttaagagcatgtttcttctcatactgatcttcattcgagtaagaattatcaccatctgagcctttgattcccacagggaaaaaatcaggacattcccacataatagtcttattagaagagtgaagtggtgcttttgaccttgtccaatgcataaagtcaccacttttatacataatagctaagccatttccatcaatctcagctccaattatgactctccaaatgttgtcaagacctctccaagctgttgtggggtctctaaacaacaatggttcaatcccattgattggagtcatcaaagggttgagaggagattttgtccattcccttagaaaagggtccgagaggttttcgggcaaagccaagttttgaacttcatggttttgaaagtcttttccggtgtataaaattgtgggcttgttgccttgtaggaaggtgattgaaccggaccagcaaccattgatgtccgagtttgaatcagtgggagtcaaggctatgtcgaggtgaatccaatcgatgagatcgtatgaaattgaatgtccccaagttatgtttccccataatggactgtagggattgtactgatagaatagatggtatactccattaaagtacattggtcctgtattttatgaaagttctctactaatgaaaatctaagattgtattggcagagcaaatagcatacaatggtccacctatgttaatgaaattccttaaactttataacaaagaattgaactttcccagatgggttttcgattttacagtcattacaagtttctagttcaatttcacatgaaaattaatgacagaacaaatagcatacattggtcctatgttaatgaaatttctcaactttaggtcaaagaactcaactttcccagaaaaaattcttatgggatttcctttttgagtcattaaatgcatactgtctcgaagtacattggtcctattttcatgaataatagaaaaaagaactcaactttctcagaaaaaattattcatgggttttctttttctttcaaactcacatgaaaaatcaaaactttacattaaagaactcaactttcccagaaaaattcaaatgggtttttgtattttcagtaattaaatgcttcaatctcaaattcaaatgaaaatctaaagggcatacaaagaagtcaaatacagagatgagagttgagaaaacataccattaggatctgaatttattgattatgaatgagccagccacatttcaagttatgaaaaaaaaaaacacaaaaagatcaataaactaaaagagcatattatataatgtaaaaaaaaaaatatgagaacaaaaacaaaccgttcatccaattctttgggggttgaaaatgatagccagttctataaggttggttccttttaacgagccactcatgatttttatgtctaagatttgaagcttcaattccatggctgattgaagtaagaacaatcaagctaaaaacccaaatcatagacatttctgttctataagctttgagctatagaagaatgattagaaccagactctgttcattctattcaaacaacaaaccttgcattaatataagaaaaaagactatttaatatacttgtgatttgatctgaactttttggtctttaattatatttgtcttagtatttgtttagataagtactataaatgatgagtctttccttgtcaatgtcaataaaatatgattaagctaattgacttttaattagaaaatggcaaatctaaaaatcaataataagaatttttacaccgaagtttttttttttttttttaacaaattaaaagtataggtaggcttaatacatccttaaagagatatttcggcacaccttcttgcacacacgattgtttttttttatatacttgttttaatcttacatcatttatttgttttaataaagagtattactattaaacactaataatttctagcacttttcataaataacactttatgattacttaacaatagtacttaaattatttttttaagttatataagattcaatacttaattataatagcaatatgatgttaaggagaactaattctattcgatatagacagaggagttttagtctaattttctttctttacaactatgtacgtcatagtttcttaaaagtaaactatctataaatttctaaaaaaatttaaataaaatataatttcaaaattaaaatttaaatattttattagaggtagaatgaaaaatgcttaataagtaaatggtatatactaatgtatgggatctttataaataattagactacaaatttattatgacatccaccactaaagaaatttccaaaagtatatcttgtacttttagctcaatattatttggttggccaaattgaagggaaaatttgaatttttatgcattttataagggaaaattggttaggaaaattaataagaaaggtaattttaaatacatgacacttttacaaaaactcctaaaatactctcctcataatttctaaccatttatctctcattccctctcaaactcaaactctctctctctgccgaccacgaaatcaccacacccacatcccaccaccacccgaaaccccatcggagcaaccctagtccgaccccaacccctccgacccaacccgaaaccccacacccaccgtcatcaacgccgcacggaggagactgagcttcctactcaccgacgcacagaggaggagacccacagccgcaccatctcaaacccacgcccatctcgaccgaatccacctcgcccgtcgaactagttgcagtttggagaagatgggggtccaatgcttgcaagttgggaaaaaaaattgtagcaagtccgatgggaccgatgcttgaagctggggtccgattggtccgtgggagggttggaaaaaaataggattgagttatgtgaggattaattttaagtttttgataaaagtgtcatatattttttaatttgaaatgtattgatttaagaataaaatattaagatttttaaagtatagtattttaaatttcccatttaaaatcattattaaactatacaacttaattttcaacatatttgtgatcttaattattaaatgcctcattaaaaaaaatgtattgccaagtgaatgcctaagttacccaaaacttttaccaaaacaatccaatgggcaaaagaaatatggattcagaataaaactcaaataagttaaaataaaaaaaaaaaacaaaaaaggaagaagaagaagaagagctagagagacgaaccaagaaaagaaaagaaaaaaccctctcaaaagcaaaagcttacaaatggcaatatacaataaccattataatttaaacaataatccctcttaaaaacacaaacaaaatttccacacaaatttagcctagtcaagtttggtaaatttcctaacccaaagattctaag

SEQ ID NO: 186675 - DNA, 4234 bp, Cannabis indica
aaaaaataaaaaataataataagcaaaaaaatcatgataccaatgtccacactgtaccaagtaccaagcatgaatttatgaactcagttatactctccttgataataatattcttaacaactttcaactttgcatacttgggtaatgatcatcttccaccaccaccaccaccaccaccaccacatagccttattagacttttacaatcagctaagctaaaacttatacaagagaacaatcctcattcttttcaccttttattgtctctccatataaccagcagtatataacatagcaaaaacaataaaaaaaaaaaaaagaaaaaaacaatacttatattaagccactttgattgttacgtaagtttaaaaatgtgtgtagattgtaatgtgttttacattttcatgtatgaaatgaagtactctcttatttaaaaaagcctacactaatacttacttcgcaaccaaaaccacaaaataacataatttgagaagacaaaggagaaagcttgtcttcctcaataaattattgagccttgttttgcaaaatgtaaagcagacaaatctgaatttctataactgagacaccaggggcttttatttgtgtatctatggcgatgattacgcaaccggcttcaacacatacattttgcagccatgagaattcactgtagccgttatgcttccagtgaaatgattcttcagtgtcttatgctggaagaagaagatatttgttagaattaagataccttccaaagattttatgaggcctattatatttatcataataatctacatacctcccagacatctcttgcttctacaacactttgtagtgggattccaatgtcatcccattgagctgtgatcgaattaggctgaggaccgcggttgagtagaactacaactaccctgtagcctgacaggggccctgcccaaatctgttggagatacattgaaacataatctcatttgacctcctaaggaggagtagaataaattttaagagaaagcttttgatgacattacctcttgatccccttccattctgacctttttggcttgaacaccaagtgaatctattgtgggaattggcatagtgtcaaatagtcaaacagttaatgcagagtgagatcaatcagtgggaagagtacaactacaattaccttggtttacagcaatgacctctttattggcaatgatctccattgtgtcttttgtcatgttcctcacatcacaaccaataagaaggggagcctgaagaggatgatgtatatgtgactagctgaagagaaaaatctatagaaatgaaagttggtactaatataccttggaaatggcccataggctgaaatggactatgtattcatctttagtcattcctccatttcctacctcaagcatgtcaggatctgtgtagccaaaattaaaagttagcaagaagccatttcaagaatttggtaccaagaaaaatcaaactgaccattccaaccaccaggcctagcaagctctgcatatacttcattcatgtctgctcttgtgaccatactggtaaaggaagaaaggcaaaaggaatgaattggcaattttcaataggaagtaaggttgcatttggttgggaggaatgaaacataggaataagaatgagaatgaaaataagaagaagaatggaatggaatggaataaaatttaaaacacataaaatatgttaaaaagattattaatttttttctcgtctttcattgaaatggacttcctttccattttgaagaaaaatagtcagtccatcaaaatggcagtaaacatattccataggaataccattccaatactttaaaatgcaaccaaacaaaagaatgaaatgaaaattgatttatttctatttcattccatttcatcacttccaaccaagcgcaatctaagagttcaagtgaaagcttaaaaacctttcccaagtatctaaaatgtcatttgtagtcctccagctatttcccaccttagcaccccatagagctggatgcaaatctcccctaacaaaagacaaaataaaaataaatataactagacaatacaaacacaaacacaagccatatatcttaactactgagattaccattcacagagggaaaagaagattggtcggccagctttcattagagctcgggtcatcacagggtacctacatgaacaaaaagcataaggaaaaataaatgtgataaaaaagtacaaaagagaaaaatcttagacacttgaatgaggaagataactataaattgacagcagaagcagcatacctaacagtcggtttagatgcatcattgtaacagttatcgtacttcaaataatcgatgccctgcaaagacaatgcataaaatcaggaccaggaagaaaatactttatgttgaaatatacaactagaattcaaacccaagaagcaaaggttttggcatcatgctcctcatgaccaagtgaaccaggcatagttttgctacaagtaaagtacctgcgaagtatacgtggatgaagcattagcctacataggatatgattatactttccaattagtatatgtttgtgttgaggtatgtgaagtaattttaccctgcatctgaatagatacccaactttagacctttgctatgaacatagtctgcaagagctttaataccagaaggaaatgttgacttcttaggcacgagagaaccctgaaaatgaaaatattttatttagtccattcatattgaatagttctaaaaactgaacttttcttatggtttatatgaaattataccttgttgtcacgagctatttcggcccaacaatcatctgaaaatagtgagaaatgttggttgcatcagatacattgtccttaatattaggaggcgagagtcaaaaaattatagaaaaaggaaattcttgttctaatgaagatagaatgaaaggtgcaggagtacatgcctatattaacataggtatatcctagtttagaaagaccagtagaaaccatagcatcagctgtaaaaccaggtaaaaccaaaaatgttattaactacatgatatataaaataagcaactcagacacaaacacattagtttttgtatcaatattaagctttggcttctatgccttattactagtgcttcactaacctgtttctttgatcattttctcatcaatattgcagctaaagtgattccaactgttccatctgtttaaagaaaattaaatgaataaataagcaataccaatttcttaactgcacaagtgctccaaattttctacataaaacttcagcacaaagattaccaaggtgtaaaaataagaaaggaagaaaaaaaaggtaagcatgaggaacagtcagaaggaaatattctcaagaagtccaatcataacaactaggcagaaaatatcaagtagtaatggaacataataagaaaaataaaaatcatggtttgtatgcttttgccaattcattgtcatttcttataaggcaaccaataccaccctactccacctgttagctttgttggtcaaagaaatttacaaacaggtttaagacaaaacttcatactagtcagagatggaccaatataattgaaatgataacattttcttgttagtagtacaatgctaaaataaaggaatatatagcattataattaaagaaaatcaaatgaccatgttagggacttttcttctcatttcttgtgctattttcctagtagtttagaacaactaagatggtactcaaaaagggacggccttcttgctataagcacatggagtcttctaactgcacattctttcaataaacacactcctttcccaagtttattttaactattcagaaagggaagttagaaaccttaggtgatcaaattctatcacagacaaaaacaactaatttttcaaaaatcagacaaaccattctcagagtgtgaaacccaaaagttaagcaaataaataaataaatcataagtcaatttaatgctaagcaagaaaaagttgtaagaaggggttgataagggtcgtgttctttaccccatgggaggagtcctagcaagaccattagctagcaagtttcttctgtagtgttcttcaacatcaatacgatccattcttgcagtcgatgaagtcacaacaagtgagaatatcaacaaatgaagtatcatcattgcaaccattttgatctttggagctccttcaccagaacactcagtttgatagtctctct

SEQ ID NO: 186676 - DNA, 4071 bp, Cannabis indica
tctctctctcttcttccgaacctaaagcaaaccccaaatttcgttcctggcatctacgccttctaccaatcgcctcaaccatgctccggcaacgcttggtctccgccctccgaacccgaggcggcgccacaaccggtcctagccgctggaccagtcctggccacgaagagcgacccaagggataccttttcaatcggcctccaccaccaccgggtcagcctcgtaaatgggaggactgggaattgccctgctacgtcaccagcttcctcaccattgttattctcggagtaggtctcaatgccaagcctgatcttacaatcgagacttgggctcaccagaaagccctcgaacgccttgagatggagcaggtgggtcttggcgcttctgggtcttctgaatcagactgaaatttgatccgggtatggtgtttttggatcgcccttttctgggtttgatgttatttctctgggttcaatgggattttcgggtttgggttttttggggctgagaaaagtggctgttgatatttttagttcaataaggtttttttcgaatgtttttaattacgaatcttctgaaagcttaactgctgcaatgtttactttctttctgttgattattggacctttagacttgtttaagtctcaaatagctcataaatattccttttcgaatcaaatttgtttctatacttatttagatttctagcatagagatgttattggagtggcttttaagctttgattagtccatttattatcttgttttcttttagaattttgcaatggtgcagaagatttttcgtatctcaaggagtgttattaggtgctattctttttttctttcaggaaagtacttttactcaacataagtgtttgtgttactacggatactgtctcaagttttcttgtttgttcccatgaattatattgcaacataacattataagcctgatacaccttctaatatggggtatatgatactcagtgggagaattatataatgtgctatgagtttatccaatagatagtgttagtgtgattgttgataattattccatagatttcacaagagagtataagtgtaaatcatttcgccaagaggaatcaatgaagaacatatgacttttctattctctctcttctcttcccttctcttctttctctatactctctattctctatgtttcttccaattcttcttctgtcttcttatatggagtaagccaacgctaacgttccgaaaatcttgatacaaagtcttaccaattggtgctttcattgaccttcttcctatggctgattcttaacatggctggatctgaagtgcttcatgcactacaagttttgcaatctcaaatggatagctacttcacaacttgacattctgaaatggatagccatttcactactttccagtgtctgcttgatagccatatcaaggtgttgaacttgaagacaccagcaatggtagagaaaccaatcaatggggttctcactatagtggtgtccttagtttccaatgttgatatcgatttaagcatggggaaacaatttgtccattcttcacttcttgtgaaccgatgtagctgttgtgcttgtgcgtttttgacgcaggatttgatgggttggaggttcgattcaagtcttgaggggcatgtgaaacatgtgccacacacatgacactcatcccttgaagtcattaacaacgtgaacccacgacacggtacccaatcacgcttgaagagttctttagttagtcatctccacatatcgagggtggagatggacaacttcctcacgatcccgaagtttacgggagcaaatcaaccactactcggaggggaaccaccaccaatcttgtcaaggatcacatccattggtgtgatttagagttgatgtataggcattgcttttgcaatgatagtaggcttccatgttaatttctctcgaaatccgaacacactaaggggcccatttcaacacctggtcctatatttggggtccacctttcaagcgggtgttctcattgttcaacatagcaagagctccaagccttgagttttcagatcccctgttcgcttactggttggtcttcggaaccatctccaacggtggtgggcgaactagttgtggctgcagttctggtagtttccaagggtgtcaacactctgccagcgacatctgttgtggtacttgctgcctgtgtctctgtgaatgagggttggtcaatcatcattttttgaactggttttccgatatcggtcagccagcaatgggaattgttttctggagcttccataaagggctgataagactccaaatgctcatcatagtgagagattattttttttcctcaagggcattatgtcaatgactttgacactgtgacactacaagtattttattcatttcaatgacttttgttgcccttgttgatgcttcagtgattaaggtatttgctcttagggtacaagatgaagtgtggcccacttatgtcacagttgtaggttttatttctgcttattaaaagttgtctgatcttgaagtgggtgggagagtatgtgcatctgttacaaagacaggaacactactcaatgtttttttttggtaaatgtgcttgatgatatgccccttcaatttggcaccgttgctattaattttactactttggatagcaactagagatggcccaaaaattacctgccagtatgctgcacaaaacattggtgttgtggtcgttattggttggtgaatttactcacagtgatcatgtaaaatcttgggtactcttcattgggacacctgagagatttcatatcttagcatcctatgcctttttgttttgtccaccatatggtcacttcttgcaaaatgggttgatagatagcgaccaacatggccctggattgcgttgtgtggttggcttggaacagtcccatggataactacactatgtactgccataataggagtgttatatggacatgctaggaaagcatttcattgcttggagaatatacaactgaaggatgagatcatgtatgatggggttgtccttagcgtgcttgcaacttttactctttcaactctgcctgcacaaggatgatcatcctgcttttagtgaatcttattcaactttgtgcaacattaaagcaagtgaggcttaggcattaattatttgtatcatatcatcatgtgaagttatgaaaaatgaaatattagtgtcatggatttcattgtttgtgggtattattagcaatgattttatggaatcagtttggagaatattccatgcttcttgatcttgttgtgttgttgaccgtgtggtgcggtgcgggtacttcttggaagttggttcgatgacgaccattcttactccgttaatatgaacatggcagagtcaatttcaccattctcctggctagctgcagtttctgctggtgtgttttcttctaagagctgttgtgtttgccaccataatgtgatgagtttgtttatcccataggcaatagatatcatcattgttgtgattgttggtaattattccatacattctagtatttttttttttttttttaaaaaaaaatctcttctagatctttctcgtttgtgttacaatagtctaatatttcattagggttgttgtcatgaaaaaccagattttataagaaaaaactatatcgcaaaaaagaaagtcaaataggattatttgttatttacttttgtccaatttgcaaagtagtctgcacatttgtagatgggaaaatttaaaatttatgcttgtgcggattggatgttgatcgacacgtaaaagtaattgatttaatcaaagctacacatttatatagattttttaaaaaattatataaacaattaacatttttataaaaaaaatagtaatttaaattttttatacatataaaacaaatagttcaaatgtatattttattctaaaaaaaattagggattttctttcttaaatttatagatacaagaggttgtattttttctctggccagccttgccggcctcctctgggcatagatactatttggttggggttgtgttt

SEQ ID NO: 186677 - DNA, 3328 bp, Cannabis indica
taagccaaggcaaccgcaaatgaagaaagatcatggagatccatcgcggataacatcgacggagagtggggattcaaaagccaatggagaatctcacgagaagaggagaaagtaagtgaatcacttcgaatgccccacctactcttgaaccaacacccccgcgccaacgggcaatgaaagaataaatgctcaagtgtgtcctcggcaagcgaacaaagaacacattcaaaacttctcccataaatcaccttgagtctcttaccacaaggaaggatatccttacccaccttccataaaaacaatttcactctttctaagaaggaagagttccacacttgtttgaaaagtacatccacattgccacttctattcttgatcaatgaagcatgggcggccttcacagaaaagaggccattaggagagtctttccaaattagcagatcatccgagttgccagggagagtaacaaaggttctcaatgactctaagaattccggtcgaaaccactgcgataaaagattaatatccaaggacccattgctcaaaatgaaattgtccagcgaaagcgtaaccggccaacgaacatttggattgaaggcagccaagtatgaatcccaatccaaccatggcgtccacggggtagtccacaagtcaacacaatgtccgttacccaccaaccaacaactttcttggcggatgaactctctggaagcaaaaattccccgagctccccaagaggcattagaaggaagagttgcattccaaaagttactaccccacttgcaatatttagccttgagcacctggcaccaaggagcatcccctcctttcgcaagagcccaccccaacttggtgatcaaagctaagttcatctcagaaaacttctttatacccaaacccccacaagccttgggacgacaaagcccatcccaatggatcaaggccaagaacctatccttcttagaattacccacccaccagaatttccgagccaatttatccaaagtcccacaggtcgaattaggcaaaaggaaggacgacatggtatatatggagatattagtaatcacagagttcaggagagtggtacggcccgcctgagaaagaagcttgcatctccatccctcaagacgattcttaactttatccactacaaaattgaagtcccgagtcttacttttagtaaagaaaagaggattacccaagaaaacctcagaagcctccatccgcctcacccccaaagcatccacaatagaggacctaagggagtcattcgcattactagagaaaaccacagccgacttagagtaatttatcatctgacccgaccacatacaataacgttgcaagcacgttttaagcacatcaatttcttccaaagaggccttgcaaaaaagaaatgtgtcatccgcaaacataagatgggaaatagaagggctttgcggacacaccttaaagcctgtaagacttccattaaactcagcctgaaggagaagcctcgaaagaacttcactacccaatataaagagaaagggggaaagaggatccccttggcgcagacccctagaaggaagcaaacgtttcagagggcccccattgagcaaaatggaaaaactgactgaactgatgcatttagaaaccaaggaccaaaacttggagtcaaatccgaaggcctctaacactttatccaaaaacccccattccatccggtcatacgccttagacatatccagtttaagaccaacaaaggccgacctcccctttttcttcttaaaagaatccaacacttcatgagccaagattccattttctgcaatccatctactcgaaacaaaggccgcttgaaagggcgaaataagagtcgggagcagcttcttaagcctacttgccaaaagtttcgaaataaccttataagcaaagttgcaaagcgaaataggacggaaatcatcaaatttggctgcattcggtcttttcggaataagcaccaaaaaggtatgattaagagatctatcaagatccccggtcataaagaaatcctgaaccgtacccaccacttctgctttgaccgtattccaatgataccgatagaaacagcctggcataccatccggacccggagatttaagcggacccatagaccagaccacaaggcgaatctcctcctccgagggaagtttagtcaactcctcattcatatcatctgaaactccggggttaatgagatcacttatctcatgagtgagaggaactccggacgatcgaaagacctcactgaacttttgggtaaaatactctccaataggtcccctacccgaagtccaattaactccatcttcagaaatcgccccaatgtaattccgttttcttctaatcaccgtagaggcatggaaaaatctagtgttcctatctccactcttcaaccaagtttccctggatttctggcgccatatttcacattgacgtttagatatctcctcaatttccaacaaaatatcagcctccaactcagtattaggcagagaaggagggcgggattggacttcaaggagcagcttctcgagagcgtcaagtttcgatttgcacataccaaagaattccttgttccattttgctagagcccgtttcgttcgatggagtttagagatcaattgaaaactgaagcaaccccggaccaccgctgtccacgcctctttcaccacatcatagcaagacggatccctgatccacgcctccagataccggaagggtctatgagttgaatcattctccaaataaagatccaatagcatcggagcatgatccgagtctctaatagtaagaacttttacccctgctttaggataggataagatccacttcgggtctccaataactctgtcaagccgttctttaataagagtcgagaactttctattattagtccaagtgtaaaaattccccacacttccaagatccactcccccagtcatcagcaggaagttagagaggtcctcaaagtcaccgtgagacccagaagtcccaccaaacttctcaccctgattaagaatggattttaaatccccgatgagagtccatggattatccagacccgccatctcaagagctaagttctcccagaacattttccggtcactcctaaccggaggagcataaacgaaatagcaaatccaatccgcacacatcccaatgtattattgaaccgcaccacgattttagattgatccgaatgaagcatccctacatcgatcccagctttccaacataagcagagaccacccgccgaacccacgggatcaataataaaagcactaaagaaccccaatctcct

SEQ ID NO: 186678 - DNA, 1877 bp, Cannabis indica
attcgtaagtcgtatttatataaagagcggttgaaaggtcttagtcggccgctacaaaagtgagcccatttcctactgcacacgcgtgtcactatagatattacaggctctttactgttccatatcgttatatatcaatctcccatttattcccgtatacaaatatatgataagtcaaagagcaattatgacattctgttaaattacaatattatcctctattatatgacttgtaagatacaaaatttgaatataacagcttacaaatatcacatatataatgaataaaaaaataaataatacatgcaagtcacatataaagtggatggatattgtgtctatctgtgtatcatacattaatatatacggatgtgaataatttatatagatgtcaatatgtattatcaattaatataatagtggttaatatttccaagaaaaatatataattgttttgatatatatacgatacgcattaatgatgatagtgagataatgaatatatatagcaagtacaaacctgcaattttcaatagttttgggaagtgattcaataaggtttccagaaacgttcaaaacctttagcttggacaaacaaccaatcgagttcggaagtgatctaagttgattcgagtgcacatccaatattaccacatttaataatcttgcaattaacgactctggtatgatctgcaattatgataatacaagagataatgattattagttacttaaattatataaacgaaaaaaaaaacactatttttctggtgtacttaattgtgacatcctcaatttaatgatataagtaccattataatatttatggtgtttcgtcaatattatgagtaatttttttttttaattatatgtatagctaattatgttttagaaaagagaaatgctaaagggcactagtggtgcttagcaccctcttatgtgtgagtatcgctattggtccaattaagtatcgggtcccaaatagtttaatataataatttttaaagaatatcgctaactaatcgcaacgtgacatgttaagaaagtgctaagcaccattagtgccttatagcaatgctctttagaaaagtagcctacaacaactaataaatgtgaacaaacaaaaaatgttatgttttgaacaagtggattgtgataagggttaaaattaatgggctaacatgtcatatatgacaaacaaatcggacttgtgtacgttaagtagacataaaagtcaaggaatcttaattttgacaaaacaaagaaacaaaaaaactaaatttataaaaccaaatacgtatttatagtatgacacgcaggaagacaacgataggtaaataaaattttgagacatatatcgtacattcctttccttttaacggagaatatattacaactttcacaaaatgcagcaaaaaaaaataattaattaatttaaaccacataaaatattatattgggaaagctttttatcttttagaaaaaaaaaaaaagaaaaagattgatcatatgtatgtaaaaggaatctcttccagccaaaataaataaattattaccaaatctgcaaatcagaagtttaaacaacaaaataagtacttaataaatttgaaaaaacaaattttagggagagaaaattaaggaaagatattatttctccagaaataatactaaggagagactgtcggtaatagatttggtatttttttggacaacagttttgttatttgatttgatatatgatattgaacatcagaatcaaaatattatatatacattcatacacatcacttatatatacaaaagtatatattatatgtatctcgatgaaagaaaattgttataaatataaatagagtttttatagctagactgaaact

SEQ ID NO: 186679 - DNA, 1709 bp, Cannabis indica
ctctaatctctatctctctctctctttctctttatcttctttttctttctttctattacaagaattttacaatgaagaattctcacaaacacgtcttgctacctctcttggtagtagcagcaatgctcccatttctggcacgtggggagtgcacgtgcgaaattgaagaaggcgaagaagtaaacaaaacccttgcactcaaatacaagttagccgccatagcttcaatcctggtggccggagcaataggggtctgtcttccaattcttggaaagacgattccagctctgagtccagacaagaacgtgtttttcatgatcaaggcctttgcagccggagtcatactgtccaccggcttcatccacgtgttgccggacgctttcgagcatttgacctcgccatgtctcaaaggcacagcgtgggagtttccatttactggcttcgtggccatgatgtccgccatcgccactctcatggtcgacgctttcgccacctcttattacaagaattctcactttggcggcgttggagatgaggagaaggatcatgaccatcatgccgatcatgtccatgttcatactcatgccactcatggccattctcatggttcggttcaagattcttctacgccctcttcagaacttcttaggcacagggttatatctcaggtacaaattaatcaatcaatttaattttgaagaattacttcataactgttttttaatttattttttaaaatttactgtttggatttttaaggtgattgtagtcttatttgcaataaaatttatataagatttttttgttacaatttataacactagttgtgatatgaatttctagttaattttttcttttcaaataacacgttaaaaaataaaaacataataatgaccgattcatagtatcaattatttctgtgatttgtaattgctggcatggatctatcatagggggatatattctttttatgaatacgtggtgcagcctattttaacgcttaacttttatttttaaattattgtaaggaaagtaagaagataataaagaccaatattggcgtcttatatatagttttaacctacgaagtgaatctagtgatgtgtaataaattatatatatttttatatatattccatttttaggttaaaaagaaaaaaagctgaattattatagttacaaaaagttaaaagcttgatttttattggcaggttttggagttgggaattgtggtacattctgtcatcatagggatatctttgggtgcttcggagagtcccaaaaccataagacctctagtagctgctttgactttccaccaattttttgaaggcatgggacttggtggttgcatagctcaggtacgtctatactaatttcttcccatctcttaaaaataattaggatatatgctaagttgtaaattaaccgtaattctaatattctatcccaatttagtaataatataagaaacaattaaccaattataaagttgtatggtgatattaagttgaacatgtgccaattgcaatactttgcttgaggtgtaataattatttaatcagacccaaaacaactttcatcgatcaccatcactttaacataggacaaaacatacagacatatctatctttttttcaataaataaataaataaataaaattaatgacaccatatacaaaatttacccaactattgaaactgtatta

SEQ ID NO: 186680 - DNA, 1710 bp, Cannabis indica
tctctctctctctctctctctctctctctctctctctctctctctctctctctctctctctctctctctctctctctctcacacacacacacacacaccatttgtgtcactttatactttagtttaatcaaataatatttagaggcaccaacgaagggtagtttggtatggaggtatgaggtaatattgtcatgagtatgggattgtcatactattcaaatgttttttttctaggttttacttttatgctttaaatgtatacacatcactagtatacatttgtgattttaaacatatacacatcactagatttctcatatttttgagggaatgagaaagagagagtggagtaggaattgtttgagggccatttaggtccaaaatggatattcaagcatagtctgttttgcaattttggaaattagaggcataaaattttaattcatatgctctttaagcacaaacatcaactttccctctttgtattaaattctcttattacctggagtcgttagaggtttcctagttaagctatatttgaaattaaattaatctgtttttgaaacccaattgagttatgctatgcaaatttgagttttttgtggttgcttataacttttctggtgacgtttcttaattggcaattattatgattttattctttgattactagacagtccttccacccttgtagatgttcctagtcttacaattgttttttggtgcctgcctgcttaataatatcacttgtttgtttcttaactcaggtctcctatgacacaagtgggtttctggagaagaatagggacttgctacatatggattccattcaacttctatcttcatgctcatgccaccttcctcagaaatttgcttccaatatgcttgctcaatctgagaaacctgttgttggtcctttgtacaaatcaggtggtgcggattcccaaaaattaagtgttgcgacaaaattcaaggtatattacatatttgacactatgctaagtacttagtttcatattattttgatccacaatttgtgttttgaatgatgagcatttacaattttttatttcaaaatttcagttctacagattttgtttttgcttgctttctgcattttatttttgcaactctagtaattatgtgtcaaacaaataggacagtttctcttggtccaagtattaaaaggaagcattggatttggttagttaaccaagagaaaatggaatgggaaaatatgtagtgcatgacatgcataaaaaaaagaaactgacaaactgtcaaataatgttctgctacaaaaactgaaaatattgaagaagttaaaaaccttgcctaatatttacggtctatcattaactatgttctgttttggtatttagagtcaattattccagttgatgcaacgtctagaaagtaccacgccacatttcattcgctgtattaagccaaacaatcttcagtctcctggattatacgagcaagaacttgtgctgcagcagcttagatgttgtggagttttagaagtggttcgaatatcaagatctggttttcctacaagaatgtcacaccagaaattttcaagaaggtaacaatacagaatactttcacatgttaaggttattttgtgtctcatgtatgcagtttatctaacctattcctctttttctttgtattgtgatgtatgtattgaatcatgttagatatggt

SEQ ID NO: 186681 - DNA, 4197 bp, Cannabis indica
aagtgtcctttagatttacataattgattggtttcaaaattgtttttacattaaataacaaataataattaaataaatgttcaaggaataaatgaagagctttttaatacgttcttgtattaagtgcagcaacgtatgcgacttagtaagtcacgagttttccattcatattctaacacacgagctcgcaggctctgagatgtttatattcgcatggtggccatcgggccttttatttggatatctgcgttcacccttgatcacatacatagatatcctatgtgttgacaacatggaacatgggaatccccggcgagttgtcaaatacttagtcattcagacaaatcctatgtaaagaagcgatccttattggttgaaggagatgtctacttagtcatcgcatataattggtatatgcgagatcagtatcaagtcctcttggtcctgcttactgttaattatgcaatgcataggatgcaactagaccctgtcaaggttgcatcatctttcaagtttaggtcaagcaagcctgactctatgagaattatggattaacacgtcatcttttccttggaacttgggtccacatgtcaattctatacgagacttgtaatgtcctactcagaggaatgccacgtgttgtgattacagctagctaatcccgttaattgggggtccataagccaagtaatttaaaactaataataaacttaatttaaataaataacttgcaataatacaaacttatttcaaactaaaatatttaaagttatataactgagatctcgcaaaatttattttttaaaatattacaagtcatttcttacaagccggcctaagcggcaaaaattagaatttctacacaatttcctgttagacccaaccctcgtggtctagcttggcacatgtacaactcatcttcaaagccctcgaattcatggctgaagccgcatcgcctaactactgcttgcacattagagcacatgtgagccaaggcccacaaagacagaataataatacaatatgataattataataataataattacacttcatacagtacgccactgcgtatacactgtgccaccacactttatatcacagtattccatatataataataccactataatttatatttatataacatagacccatgtgttacactcacacgtctattaatgtatatatagcatacactcacgtgttacgctcacacatctattttacatttaaggccttactagggtttgtctcaggtatagttaccgagtctaacctggttatgccttacccgcataactctactcatatatacataattcatacattatgctctcacaatagtttattctgatgatgtttatcaggtctaactcagttatgctttatacacataactcttgaaatatatatgcatacaatatattcaacatatattctactatataaagttttaggataataaccccaacttgcataactaatcatttactcacataatacgttataacatgctcaagacaaaatatatttagggtaataatcctaattcacaaaaaatataattacttagggtaataaccttaatctacaatataaatacttagggtaatcaccctaattcacaacacatataacttagggtaatgaccataatccatgttttcatctaattaatcacataatatataattgcgtcacggcgctataatatatgtgcataattcaccgtcttacctgatttccaaagtatgaggagaaattccaatccataattgatcttgaccaagtttcggtatccctagtcataatccccgagttgtacacaataggttaatcccaaaataatttttttataatattcacatttgagactccaacactggaccaagtaatagagctcgaaacaagctttctaatgatataaagaacgtttaaaacaaagttcgaagtcaaaaattatgaccaaaacaaattcaggaaaattaggaatgttgcagcaaggtgtggccgcgacgatagggtccgaaaaaccctgaaaaaatgccgaaaaatcatatttcaaagatggaaaatacacaaactcaacccaaactttacctaagtcatataatcgatttttcatgccaaattaattagagtgtttacaagcacttttcacaataaatacagcatgcttgaagtacataaacaatcaagctcaattatctcatagttcacataatctaagcttcaagaacactatacaaagaaaaccaaatgaaatttttcatgctcaaatccaccaaatggacagcaacatctataaataaaaattgacccaaatcaaaattcatgcattgattcaaattaccacaacaaaaccttgactttcatcgatgtaattaataacataaaattatttcaagaacaccatgaagaacatcattcaaattcaaaccctaagatgagaatttcaaaaattacaacaatacaaaattgaaaataatacctcaattactcctccaagctaagctcaagaatctaacaccaaaatccacttcaagaacttgtctcaattcttctcaaaactcaaggaaaattttcaaagaagaagagaagaaattaattcctatacttagtctttttttttctttctatttttcatatatgctcattttttttactcacaggtaaactggttcgatctgagttagctcgagatcgcgtagaaattaatgaagttttaagcagtcttccagttagggattgtgattggcgtcttctttgtacgccaactaaattgcgagagcacaaattgattcgtcctgacactagactttagcgagaactagtgtacaaagatccttctgagaaacaaaaggtgaagattgacaggcgtctttccaaacaaactttgaggcaaatatcaggttacacatttcttacttatactgacatttttatgcgagtttacacatttttcttgttcttagaaaatattgctttttttttgcagacatgactttccttaaagagtgctcatgtcttcaattgcaagtcaacgatcaacaaagacattgtgactccatcttctctaaatcctccacagaagagataaagtgatgttgttgatcctctggtaatcgatctgtccaagaagcatcaaaaaattgtccaagagaagggaaaaaagccagtgatggatccagggatgaaggctcgcggtctcatggctttgcaggaaaagttcgtgagtgatgactttgttgccaaaattgagggggctcttgctgaagacctcttgactcgttcttctgagttcatgatccatgagatgattgtatattcgtgagctatcactgcgagtcttaaaaaacttgacctcctgaagaaacaaaacattgctctttaagagagtttgaaaaaggttaagctcgatacagttgctaaggacaaggagatcaaggattttggtagagccaaaaattaggcagaggagaaaatcaagaaattggaggaacaaagcgtcaatctcactcgtgcctttaacaatgaaaaagagaaaaaaagaaagcttacgactaggctatcaacgactacatctacactataccctgatcaagttgcctgactttgactttgccatctttggtccaaaggctgtcgagatggccaatgcatattgcactatgtctcctactgagactcaaggtttaggcattaatcgtttccccaaggacgccactactgaggttgaagtcgcagatgctcctggagttgatgtcgcaactgctactgaaaaggtcgcgaggaacatcaatgaccctacttcttatgaatatatatttttttgtttgaacttttcaatatcggtatatgggtactcgtgttttgtaatcgatctttgacaatttttgcgtcgcactttaaacacttctcacagtatttggaacaatatatcctctaggtaattttttttaaaaaaaaattctaagtaatttctaatgcgatctcggcatacttatacctttagtatttatcatgatcgtaactacagcttggtgcaaaaatattactgcaacttactattacagctcagtacaattatttattcatgcgatttacgtatttatgaatttcttggtgttcatgagaattatttaaaaaaaataagacattaactgtaaaggataaaaatttgaaaaattgtgc

SEQ ID NO: 186682 - DNA, 749 bp, Cannabis indica
gaaattataatatatagtttcacttgtttgagattgttacgctgctcatatttaatttcctctgtgtaattcgatagataagtttttgaataattttctgttccctcttctgaattaatgcttggagagtgatttttgagaaagtaagtttgatgggatttgctttctgttgtgatttctctgataatgaaacatatagctctacttcttgttttggagaatctcttgcattgcatgttgaattaattaaataggttctttgaaatcttgttcttgttggtggtgactaaaaactttatggcttttttttgagtctgtaaactgtaattgtagggttaaaagttttaacactaacactcaattttctcggtagtattaccatagtatatgaaagagaaaaggaacttgacttgtaagtagcctattctgtacaatgatttaagccctttatggtaagcatctatattgttctgggtgtgtacattttgattctgttgattacatttacataactagatcgtaaggaattagacatttcagcctttgacttatttaaacagatgttcttgttgcttatttcttatttttaaaagcatatatgagaaagtgattttggtttctttgttttgttggcaggtatgtatgtggatgtctgacaatagatactatccaattacatacactgatgttgcaattcggctggacctaatctcgaaagttcatgggataaaagaagctgagaattattt

SEQ ID NO: 186683 - DNA, 4363 bp, Cannabis indica
ttatcaaagtttaaaactaaaaccacccaggggctaagtaaacttgggcttcattcaacttttcctcttctcctccgaaaatacaaataccaagctcaaactgaagcccaggagagacaacagaaatttcagtaccctttgaaaaataagaatgtatatatgaccttataaacacaccagctgttgcatccaattaatgaattatttacacaagccacaataacaatacagatgtcagcttgtccatttgaaaaggttcatttatggaaaattgcatagatgatctttaagtacctgtatgttattcttccactcaaattagcacaaattataagcaataaaaagaagcctaccttcactatactgttattcttgttcgacaggttaacaggtaagaaatgaagattcggcattttgagttgcacggacgttacgtcaggaatcctgaaaacacaaatactgaaatttaatataaatctgtcatagatgaaagaagcaccacatgtaagtgccagaataggtgacctgttaagaacagtctttgccatttgaaaaagagtgctctgaacagatgggctatagactccctcttttggaggaccaaaaaagtgtcagtcaatacttttttcacgtccatgtatctctgagtaaagtacagtagattctgaggaatgctggagacagattcatatgagtacctgcattaagtgtatcacataaatcatatctttcaaatatatacatcgagaaattataacaaggcatcatagaaccaaatacattgattgttcaatcataagtcaatcaaattaacatatcaggatgaaattcatacctccacgttccagttacctctgttgctagtatcctttctcgtgtttcgggaagaattgtgtatttatccctgatgaatccctcaaaaccagactgctcatggaaataataatcatataaaggtaagaaaaaatataaagcaatcagcatttaaattagtgcatcaaataatgaaataatcgtcttcttttgtatatttccaaattataactccaaactccattgaaacgttttactaacaaattttctcgctactcattttggtgaatgagcagttgagactggataatcttttattttcaatcattaactgtacatggtagaaatcttactcaagaaaagaatgaaggaagcttaaattcttattttggatgcaagaactatttaggaaataaacatacctttgttgtcttaagtacagccaaaccttcaactccagatgtcaactttagcatgccagacttctgcactactacctctgttgtatgcctctcagacccaagcttaaaacctttataaaagaataataagaaaaataatgaggtttcaaattattcatttacaaggattaagatgtggtaatatatagaaatataataacaactgttttttgtttaaaactgattaatccaagttgaaataatttttcagttcaccaagaaaaaatatattctttggttaaatttgcttagtacaattttacttctttggaatgaatcatatgcactgccgatctgtgaactgaagaagctgtttccccctttatataataatcaagttagcttcatagctccaatatatacaaggaaaaactaaaaccgtctgaaggaagggcatcatagcctgatcttattattaaagaaaggcggtttactcattagattataaatataatatgataagctgggattgaaacaatagagaagtcttccgttctgttgaatgaataaagtgggaaagacaggtttaataatgatcggattagcaagaggaaggtagccttaaagtattttacttgaaagcacaaccaatttcaagcatcaccaaggctaccttaaattaaacgaactaaaaactattctgatccagcataaaattgaaaataattccaaatgaatcactactgccaacttggctctaatcttgtccaatcacatggaaagtaaacagttaagttaaatcccaaatataaacttccagtcctctcccactatttcaaccttcaaaaacttaaccacaaagctattgaagacttttggcattcacatagcctgaaaatgagtgaaactgtaacttctctctcagttcaaaagcaaagtcagctgaaaaatgaggaattcagtgataaataagcaacccagcaaagaattctttatcaactaagaagtgattgctaatgctcttattaattcatcaagcactattgtctctccctctctttgtctcttacacacgcgcacacacacttgatgttatcatttatgtttcagtcacaaagccatttagcttgaattgatttcaaatgagcatgaacatgaaaatgtaattacataaattaaattgtagagagactagagggcgtttatcatataatgaattcatcacatatcactgtttatacttttcttccccacctcctcttcaacaaaagactgcaaaactaaccatgttcatggggttgaccatctacagagatacgctcccaaggcttttcaactatcttaacgatggcagcatgtacctaaaatatagttacaaatataagatttagcaaatgaagaagaatcactcccatattaggtacttcagataaaaataattactgatatatacataaaaaacaaaagaaagaggcaagtaaaggagagaagagaagggaaaattgtggtagtttttgggtttcttcaatctcaatggcatagattgccattaacatttctttgaaacataactgaaaacaggtgtagaaatctgccaaaaataaaataaactaaaatcttttggaccatcctatacatactgatacaacaaacattcttgtcctgtcctacagcacagtactaaaatcaaaagaataacaataactttaaatactaaactacattcaaataacaactcagaatcattactactattcacctgccggtaatatgatgtgaagtgtttacccagttcaattgcaaagttctccactgagagttgctctgtacattccttagcttttgcatagacctgtatagcaactcagaatctcagataaccttgaaaatttaagcggagaagaaggaaatactctactgctataaaggataacattcatttcttattaagatgattacgctcatttgtttttttaccgcaaaatatcagtgctatccacataaacacgcgcatatatatatatatataaatacatatctgtgtgtgaatcaagaatattcatttggatcgaaacaagaatgcttcttttaaaacatattggtccacacacttgtaaatttcaaacactataatttgcttcaattcaaagacaaaatggtgaatcaggttgatataaatctaactttttctttcttttcttttcctttttttttttttaattattttcacaagtaacacagcaaattccttgatgcacttgaatctgggagtcaaattgaagtcagagattttaaatttctcgagaaccaaaaaggttaggattaggaaacgagagagagggagatacgtacggtgttcttcatggtatcagtggcgacgatatcggagttgtcgtcgttaacataggaggcggcgcaattggagaggaggctaatgctgacgttccattcgacgatggattggcgtccgtctatgttcctccatactctggcgactctgaccctggctttgccgtgcctctgctcgaagttgaagccgtcaatctggttggccatggctggtggtcctggcctatcaaagttaaaaggaggtaggagttatgtattatttattgtattattattattattatctttccatttatgttattcatttatgtatttcctctttctcatttcatcaacttttttagtttatacaatacaagttgtgctctatctagtctaaactgtgggctcctgagtcctgactcagatctagctggtaaaacgtcaaatacagctagttagctttggtgacatgtgtttctatttttatactaagagatgctcttgtttgtattaaattgtattgtattatattgtattatactgtataatataaactgatgtaatacgacgtaccaaattagtcttctcaaaagttcaccctagttttcaaaatccttcattaaaattttccttattttattttacttcaaacatttttattcattatacatcatttttttattttatattatacatttgttcttcaaacaatgtccgtacagctccacagcccaatttttagtattgatttcttgaatttttctgattcgcctaataacttttggtattgattctcttgagtttcgtatttgcattac

SEQ ID NO: 186684 - DNA, 1257 bp, Cannabis indica
aaaaaaaaaaaaaaaactgtaactgtctttttaatgaattttatagtgatatgcataaatgtgtattatgatggaaacaagtgatgggagtttgagactggaagatgggttcttctggggagctttattttggtgctctgtgttgaactccagccaaaactggaagcataggggatagtacatgtacagggtagtttttttaatagaaccttcaaaactcctttgttcctgctcattttcgaagacgtttattatttgtctgggaagatgttacaatcatgtctctctcactctttctctcttataactagtttccttgtacggtgaacaataatgcttccacagattcaccatacaacattacaatcaaggtaaggtattaggtatcttatttatcattcatcttgcaaatgcctaatcttttaatctaataagctgttgtactgctttggcgttgagattagtttgttgtatttagatttgtgttaacatatatatatgtcctgtagtcaaattaatcaaattgcctctaaatatcctcttatatcatcttaaagtagtagctcttcctccctctcatcatcgtgatttataatagcataaaatattaatatagtcttgatgtagaattaaaataactcaagtttcttctactggtgtattttccagccaaaaaaaggtttcttctactgagtaccgaccaaattaccatattttaggttgaatattatcatatttatattgtgaagttaaatttgtgttattactaatgcttgcattgcatagtggcgaaagttaagttgagtggcaaactagatttagacacaaacaatgcaatatgctattcatctttttttttttcttttctttttggtcagaaataagctttctttgcgataatatactttctaaaacgtggttttttatgcattaatctttttgtaaaataatctcgaaaaatgtcaaatttagagatcagaattcgattatttgtattttcaaccacaattctacagtatttcgtccatattttgactttgtgcgaactaataaccctatgctaaatttataataattaacttcgtttttttttttttaaaaaattacatgtataaggtaactatcctctatgaacatttttaaacaaggcaattcccattatttgatctctttcatctcatccacctgtctatctttctgtggatattttttattatattttaaatttagaaagtataaataataattatagcaata

SEQ ID NO: 186685 - DNA, 4436 bp, Cannabis indica
ataaaaatttatataacaacccatctagcaactaacatatcaaacttaaattcacataacaatctaaataaaaataacagaaacaactcaaatcataaaataaacaaatatttttactagttatgacacctaattttactgtgtttttttagccatttgtcaaatctatgagtaatttcctcaaatagaaaaatgccacgtaagagtataattgccagatcattattacacgaaaaacagcgcaaaattaatattttatttttcttttataaaaataaaataaaatttggtaaagacaaaaacaaaaaccaaactcaaaacgaaacgtaagaccgaagaagaattcgaaagaagaaaatcaaaatcaaaatcaaatctaatccaatcgaatcatgtgggaatcgatctgcctcaccttggcggccaccgccggtaacaacatcggaaaagtccttcagaagaagggcaccattattctccctcctctctctttcaagctcaaggttccccctttttctttctttaattttcgtttaattgccactctgctcttcaatttcattcatcgattgtaaagttagtgtctttatattggatgagaaaagggggaaatgttgatttttgttggtaaatttgaaaaattgtgatttcaatttggaatgttagaattgggaattgggattaagtaagttttaagtatgagacatttgaattgggttggttatgtaataatcttatttggctcattgcattggtaaatagaaaagttgtgattgaatttggaaatgggttttcattgctataatgaaattgtaaatgttgaaatgtttgattatgtgtgttttgtttgtaggtgataagagcatatgctcttaatagagcttggttgttgggtttcttgatggatatatttggagctttgttgatgttgagagcattatctctagctcctgtaagtcctttattccaagtttcattttccttgtgttatttgtatgatttgtataatttcatgaccaagttaaccaagtttagtaattggtaattgataggggctttaatttaacctttatatgatttcagatgaagacacatctctaataaccaatttactctcataaatgaatcaaactaactagttacaaatcaaaagagtaatgggactatttgttatgatgttatttgcattgaaaatatcaaattaggggattttaagttctaaaagaataaagataaaatggggttggtgttctttcaggtatcagttatccaaccggtttcgggctgtggacttgctattctatctatattttcccacttttatctaaaggaaaccatgaatgttattgattggatgggaattactttagcaggcattggcaccttaggtaatgtaagttcttcacatttctttgttttatatactatgcaagttttcgggttgttcaattaatgcggtggtattaagatcgccgattgcaaattgaagtttattgattatttcaatcattaattactggtttttgttattttactataaatagagttgttacttctttattcacaggagttggtgctggtggtgaggaacaaaaggcttctgccatatctgtacttcagttaccgtggcttgtcatcatcgtcgtcatcttgtttgtaggtaccttatcttgtggatcatctgattttgttttctacattctacagaatgtgagaccttaaatgaccccttttaataggtacttctcaatggttggcttcgtattttcaaacgtcaacgaagagaacaggaattggtaacttcatttatgttttcattcgtgaacattatatcaacagtcgtggttcttttcagcttctttattgacactcttttgtggcacagatggaatatgaagttgttgaggaaatcatatacggtctagaatctggcattttgttcgggtataataaatatcattttactgtttttagacacaattttcatcataatcatcgttttttattatgtttacacttgtaattacaggatggcatctgttatatcaaagatgggatttgtattcttggagcaaggcttccccagaatgttggttcctatatgcatctcgatcagcatatgttgtagtggcacaggattctattaccaggtaaatgcctaagggaatgctgctattacagaaacacagtaagtttttatgttttctttctttatttcttttcgtttagttattttgttactaatgcaaatgaagttattgtgttattaacagactcggggtttaaagcacgggaaggcgattgtggtttctacatgtgctgctgtagcatcgattgttaccggtgtgctagctggaatgctcgctttgggtgaaagattgccatcagctcccacagcccgtttatcgcttttgcttggatggtaactttagataatgattaatactaattcttgaaagagtgattggcagccaaatccccttatattttaatttgcatacacttagcccctgatctcattttttttttgtgtgtggcaatactctctttaacttcacgtttgtttgcaaatttgaggctccagctataattctaccgttaaatgccagcttgattgccactgtggctacctgtgtatatgctgcatgattagcttcgaggttttagtgccacatgtacataaatttaactagcgtatcaaatttgaaaacaaaagtataattaagagagtattgtcacaaaaataaatactagggagttaagtgtataaaaattaaaacagaatgggatatttttgccaattacctgtcataaaaatattattcctcacaactttgattggtaatatgtggtccatgcatatttcagtctctggttatttggccataaatgtttatatataatacctattgtatagattcttgtgcacttgatgccttctgttttgtttttggttaaaattccagaaattttttcattgcaggttactaataatcgtcggagtgatgttactcgtgagttcaactcgagttctacgacttcttccccgaagattacgacgtgctgtacagagtggctctgatcggagttttggtgcaagacaatccgggtccgttcgtggtagtagggatccaaacccaagtaccgttattcaggcggcaactctgcatcatttgatagcatcttcttctgctaaagagaaggcttgaagatgggcattgagaaaagaaagaaacgaaaaagaagcccgcatgcgtcgagtgtcgaatttctggttcggcgggtttgcacataacaagggagagttggggtccatggatttgggtggtaattgaaatttgtggaggttggattgtatagttatatacagtctctatttaggggtcctaagtgggcaattatgagggttttgaaggacctttggagacattgaatttgttttgtttgttaattttttttcttttgtgtttttgggttggaattctttatcaattgtaaaacattgtgtgtgaactttaaaaaagttgtaactttgtaggccaaaccttaataatatgtaatgttgtaccaattacaatcgagcaaaaaccaaaaaaaaaagtttttatttttttaatttataatttaagatattggaatgtgagatggagttagaatttagtttatttatgtctaattaggatatttttctctctaagtttgacattatgaaattgtgtttttttaactttttaggttgttacaatttgttttttgaatttttgagattattgaatttaaggttttttgtctaattttataatttggtagatgtcaaagattgcacgattttggttaatattaaagtttaagtgcatgattttgtactatggacaattgatagaattttttaaattcaacaatctcaatagtttgagagaaatttttaagggcttgaaaagtttaaaggcatgatttagtatattttaaaatacaggaataaatttataattaatctttatttaatttaaattagaggagttgaaatgttatttttattttttagaggttttttttcttaataaaaaataaagttattcttagttggaatgaataattttctactatttatagtggaatgattatgtttttaaaagaatgacaataaatattatattattaaaaaaataattatgtttttatattaaatcttattttattatagtgaaaattacatgaaatatgggattttgtaaaaaagttacaaaaatatggcatttataggtttgccactcttctatggcattttttcatatttaagactttttatggtatttgatatgccatatttttgtaaaccttttatccaaacacatatttcatgtttttgtttctaacttaaatagttttattttttttagtttattatacatttacattttagggtttctttctat

SEQ ID NO: 186686 - DNA, 4824 bp, Cannabis indica
aactactgcttctgctgcaattctcaactttcaggcttcatttctcatttcctaaccaacacaacaacaattccacaaattacattcttctaatcttaaatctcattctcttctatgtctcacctcaattccaattctaaacctaacttagcaacacaactgattcttcaaaaaaaaaaaaaaaaaatgcatgcttcgtctgccccatcttattcccctctgttcctcccaacctgtaatttatctcgtctacgacgtcgttctgtctcaatcttcatatcctcgaagccatttccaagcaatcccagattcgcaagctttggggtgcgtctctctgcctcaattattgagtccaatctccaactctcgtgggtctcgccggaccccaatcccaacaatgactatgggggttgggccatctcggagtctccggtctcctccaagaagcgaggttttcaattttcattctacttcaattaagttaaatttttttatttattaactcgtctaacatttttgaaacattgcaggattgcctatatttgttgttgggagtgttggggcttcattggctgttcttgttgctgcaattgcttacttctccataactagaaaaggttagtctgataatgatgctgttctttttttcctctcaaaactgagcccgtctggttctgttgtcagatcatgaaaattagtgataaatggaacttcttttagttttgtgatgatcatcatgaattgcaattttgtttattttgtaggttttaagttccaaattacgagtccattacatacttttcaagagatactaaatccaactgataccaaaggaactgaaagcagtactatggaattgagtgaatctgatggagaccacctcgtggagtccgaacctactgctataacggaaattgaaactccacgtacggcaatttttcccccctctttaatagctcttgtgtgttatctcatctcaaaaagaattgtagtcatttcattttttccattgacttgttattgaattaattttattgaaatgcacttttctttctttccaacatgatttagcatttacagagaagctggagcgtgttataattcctgtggccgttgattctactcagcaggaggctttatcagttttgaagaaactgaaggtgtgcttaacttttattgtcttctagttttccatccattaagagttcgtgtatacttatgcattttttttctgttgtgtaatgcctaaacaattaaaagaatttaagccaccagaactgtttgatataacttaaactatgaagtctggacactagagggataaatttatgagtttaatttggatattcctgttataggtagtcggttgattggaaaatatagtttcttagaacttcgaaatatttcataactatagggatttccatacatttgctttgttaaattttcaaattttctactttcgatataacttgagcttttatctttgaaattttaaatgtatgattcttttgtaaacttttagtttttatcttttataagatatgtctatgtggacttgaacccaccacccaaacacactcacccacccaaccacttgagtgatgattcttttgaataaacttggtgacgtggtactaatgaaactctgggttcagaactgagcatgaaatatgttgattgtaaataaggtatgcagataattgaagatgatgtcaaggctaatgaattgtgtacgagaagagaatatgcaagatggctggtgcgaataaactcgtcattggagaggtataactatgctcatgatagtaactgagaaaatttttctcgtagagtgctgtgtatgtttttcaatggactacttattggatttggcttataggaaccctaggcatcgaattgttccatcaatttcactttctgggtccgtaagtgctgcatttgatgatgttagcgttcaagacctagactttgtgtccattcagggtaaggattgatcttatcatttaattttatgtatctcaaacaaaaatgtatctgaacattttcttttgattctcaagccttggcagaggctggtgttgtttcgagcaaattatcacagaagtccagctacaatgatatgaatgacataggacatgtttatttttcccctgataggtagaatggtactctatataattttttttctctctctgctaatatgtttaaatttgttcttactcaacaacaatctacggttctacagttttattcctcgagaggacctgattgaatggaaagctcggctagagtatcagtttttgcaaggaataactgaacaggtattgaaaatattattttggattgttattcacttttccattaatggattacgagaaacatgctgcttattttgtctattatatctcttaaaacctgacttttatacagtccagatattaactaaaaaagtaggtttcatggatgtgaaagggctcacatttgatgtagcaccgggactttatatggacatcttggctggtgacaggagcataatcagacaagtttttggtatttctcttgttccttttatttgattttttcttcttcccaattattatgcactataaatctataatggataacgattactcaatatagtgcgtaaaatatagattgccgatttctataatatgtggagaaaacactagcatgaatgaatgtacccagggaaagaaaagcattctaatgataactgcacgtatgatacgaagctttaatcaatataagtttataattgttttatccctaaaagtcacctgctatatttaaattttctaagaaaaatgtgggactggggactaaggataagaaaatggcaactatggtgtgtcaaagatcacaattcgaggatcaattatgatgagtacttctcaatccatttgaagaaaactgagaagaataaaagggtcaactatttaagtttaatataaatgaatagttgaaatttatttctgcaggacagagcaggcggcttcaaccaaacaaacctacaacaaaagcacaggcagcagtggcactaacaagtggcaggatgggagaggaaatacaaaatgagttgttaagacttaaagctgaaatttctaatagaaaagttgagatggaagccatccgatcggagttgcttgacagaggagacatagagaggttttgggatgaaaaactgaaagaagaaagaaaccgtggtcttgaggtggagaaggcatatcatgctgtagtttatgatttggagcaggagaaggtagttcaagataaacatttagcgaataatttcaaagagaaggtggctatggactgtcagagacaattacttgggagtctgaaagacgaggtcaatgaaatgtcagaactacttgcatccgagagggctttgtatgtggccgagcagtcgaatttgcaaaatttgctcaatgatttagagtccaagcaggagggactgcttgatacaaaatctatactcgaggctgagatagaagctctcaggattttgaggtatgttccaataattctccatgcagtacatttacccccatgttttgtttatgaagagctaagaatgcctagtctaacttgcttagcaacattgtactattgctcatcattttgttcctttgaattgtggaggggttagttattaattcatttgagtggagccatgcattagtgttataaataacatgtagttgttgtagttcttataattggaaggattggtatgcagatcttgggtagaggatgaagcaagaaaaagccaggcacgtgcgaaggttcttgaggaggtaggccgaaggtggacttgggacaaccaatcttgatcttttgtacttgtggaattttgagattatacattgttttatattacctcatttcatgtagatgttggaaacaatatgtaagggatttttaaaaataaaagttcctctagtttcggtgaaatgctcaatttcgcaatttagtttaataaataacaattatattgcaatggatttgcaaaccaatataactttcaccgatgtttttttttaatgcaaaactatacaaatattacttactctaacttctaacttcacaaccaacatgcagaaaaaagtatataatgaaaaataaagtgatgaattatatatgtattttctaaatttatttttcttaggatatatttgccaattaattatttttattatttgttatctcgatcaaattagatggaggttgacatttgtatctatttgctaatacagataaggtaagatagattgagcacttcacaaaagaagttgagtatttttgctattcataaatattgacaagtcaagtcaagaatccaacaacataaattacaattgttatttgatactaatatatttattcaacaattcgtaaatttgaagtatgaattaagtatttttttttaaattatagtgaacttgaattgtaaatacatagccaaaaacttaataaacacttttttaaaagaaattgtttaaacaatgaaattaacaaggcatcttaatatgttttaaacttgtttcagaggattgacgagtattattcgtttagaatgaagaaagaaatacataatacttcttaaactatttgttttaatttaatttttcattgtaattaaatgttgctaccattttacgtttacatatgtttgtatgaatattgcttgtgtaaatgttgcgttcctgcaactgtttattatggattagtttagtttattattgataaatttacttggtagaaatattattatgtcttgtattctcaaaaaaaaaaaaa

SEQ ID NO: 186687 - DNA, 4022 bp, Cannabis indica
tactactatatatatatatatatatatatatatatatatacacacattgtcatacactgaattataaattacaataataggcaatttgatacaacaaagttagaaatttataacactttgagtaattgaatgtttggaaaacatacttgatttattcgttgagatagttaagaaatgatggacattggtagtgcaatactaacctaacatatgtatttatagagtagaatccagtaacagaactttgttggactgattccatacttctacttcaactagacttcacacatcttcgctaagtaaatcatgggttaaaacgacaaagagctattcatcaactaaaatcttattaataaaacaattctgatcaggcctgaataaatattggatctttttttttcttcttcataatagatatctctgagcttgtcctaagttctcaccttctgtatcccttgaaattactatcttaggtagaccattttgtatgcagttatgcccgttttcagaatcgatggttagccatcaaagcttgatgtgtttggaatattgaattataaatttctttgaggggttagcaagtgttgcctaatgttgggctcttttgatctcatttgccaactattggatattggtacgcaaagtaatgccttttttggtttccctgaccctgaattacattgttttgtaacttaatcagtcaggccctctcttcagaattgatgattaattagctaatgccattacctaatatatcgattatcacaagctgaggtgggacagttaatttagttatgcccattctagaattggcgattaactatagaaacttattggacaccgaataatgaagtttaaaattattaaggagctagcaagtgtttcctaatgctggaatctttcgaatctcatttaccaaagaactgctgcattacaaaatgaaagcttatgttttattttttgtgtgctttctatttggattgtcaagttgcgattttgaagtctaatatgctgatgacataactaagtttgtgattatctcataacactgatctgcagttctattcagcttcatttttaggagacatgcatgaagtagtagcacatgtggtgctcggtatccgaaagctaatttatacgctgttggttggtctcttggtgcaaacatactcgttcgctatttaggccaggtaagacaatcctttaataatcctcataatcatgtccataatggggttggggactagaagaattgaacattaatctgccaagcacaactagttgacagttatcaaatagagctcctatgtaatctagatttatgtgaccttaacccatggttttgaggcttagtccactctgtaagagaatttattgtttgattttgaatggattaaaactacaacatactagtgtcttttgcttacctttacactgctacttgcaggaatctgataagtgccccctttctggtgctgtgtcattgtgcaatcccttcaatttggtcattgcagacgaggattttcgcaagggattcaataatgtttatgacaaagctctttcgagtgctctttgcaaaattttcaaaaagtaactccttgatatactgacatagttttcctatataaaaagaaaagctcaaattaataagtccattggttgatgctacattgcaggcatgctctacttttcgaagacattggtggtgattttaatattccattggctgccaatgctaagactgtcagggagtttgatgaaggactaactcgtggtaaatatttattgataaaactgctttttctacctagatagatacaatgatcaaatattatcactgatgagagcattccctatgatattcaatataaactttcagtttcatttggcttcaagtcagtagatgattactactttaactccagtagttctgattccattaaagatgtctgcagacctttgctttgcatccaggtaataccgcagtcatatcccatacattcattattgtcgttctacatctcaccataccattaccataaatgtgtcataagattttgataatcatctggtttaggtattaagctggttttttcttgacattgatcagtgaatacttgacaattgattcttcatgtaactttttttctatttaaagtgctaaatagaagtgaccaagaagatggctcacttataggatatggttgataatattctcatgttatgttaggattccacatcaactaagtatggaattggtggtatataattacttgggcaccctcctctcttaggctagctttttgaagtgagttctactcaagtggttgtaaaaaatggtatcagagccatgtacccttaagtggaaccgacgttgttgaaggggcaacctttggaaaaagtacaaagtgggccacggcagagtaggccgccatggatgtgggctctaaaggagagtgtacttttaggattcgacattgaccaagtatggaattggttggtggtatataactactcgggcactcttttcttaggctagcttttgatagtcaaaattctaccaagtgattgtaaacatgttaaaaatgatgataatattgaagagaacatgcaagaaatgttaactataatctacaagcatcttgaatggacttagatagtagggaaattttaaaggtttatatagggaagtgtacaattgaaggacctctagttgatgctaccacattttttttttttaattctttgttgcatattcatatatggcaccatggatttgaaaaggtactggtgcaggagttgtgtgtgtgtgtgttcatcttttcatgaattaccttctctatgaagtcatcataattatttttcttaatgatttacaggcagcaaatgatccaatcgctccaaataggggaattcctcgaaaagatattaaggtctgagggaattcttgtgctctataaatactcatacaaccttccaaaagcttaatattataatttgaattttcccatacaatttcacaggaaaatccaaactgtttgttgatagtgacaccacaaggcggtcatctcggttgggttgctggcgatgaagctcccattggagctccttggacagatactgtagtcattgatttccttgagcatttagagagagaagcatcatcatcatcatcatctagtaacacaggcagcatagtgcaccatatggaagtgtaagtatcaccaattgcctcattcttgtatgaatattcttttgttgccattgcagcaaattacacattataaatttatgaaaatcaaatcaaccaatcaattgtgaaggtgtaacattttgtgttgatcttgattcagaacactgtaaaaagataaaaaatatgaattatgaatatgatattgtgattcagagattctttgcagtcttttttttggtaccttatttggattgtctctatatgtgaaggaatctcttgacttgattcctttttctttgtgattttctttacacatttatccaaataatctcttgactttatcaacatcacaactcatcaattcaattgcaattttgctattaatgtagacacaatttagatatataacactcaccaactaaaattggattatatatacataatattgtgtgtagaaatttccttttgaagatgacccctcaaagtaaagactattcaaaaaacaataacttcttttcttttcttttttcccctttgtgaggtgatatatattatccttttaaacataaatatttgttaataaaattagagggattaaatttttaagatttcaaatgagaagatctaagatttaatcactttttctattactctaacattctaacattctctaacatattatattataaatttataataattgttataaaatattggtgataagttaggtccttataagaatggtcgaaattgatgatgggattgggttattaggccaagaaaaaaggaaattaagaaagagagatgtgtgtgtgtgtgtgtggtggga

SEQ ID NO: 186688 - DNA, 4636 bp, Cannabis indica
tttctatacaagaaaactaataactgtaagttttcatatcattttctgctctcactgataatgtgaaactctccagtgtatggaagaagcaggtgttgatggcgctctcattgtgcagcccattaatcataagttcgaccattctctagtaacaaggtatttttttaaatcgtttttagatatattcccattaatcgttttttatatttataggggaataaaagtgtggcatttagaatggctgcaaagcctcatgccattgttgttgacacgtcctaaacagtcgagaaattatgaggattataatgttgtcatttaataaaagttatcgaagacagggaatatgaggattacaatgttgtcagttatagcatttgaggatttatacagcagatggtgtgataattaaaataatatataaatcctttattattttttcaacagtgtgctgcagaagtacccgtccaaatttgtggggtgttgccttgctaatccatctgaagatggaagtggggttgagcatcttgaacgccttgtttccaaggtccttttgaatctcagatgattaactaacccagcttttgtctctaaaacatgagcttgacatgacactatttgatgctaggatggttatcgagctgttcgctttaacccgtatttatggccatctggtcaaaaggtattagctttctcttctgatttgagatctttacctgtgttttatagcaaatggattagtaaaaagaaaaaagaataaaagaagctcttcacatgcttttagaaatagattgaatgatcttcttgccatgccagaggtccaaaactacacaggtggttcatgaaaagtagggtactactcagtctgaacatatatttcctggaattccatgaaacaatccttggtatctcaaatgtaaggcagatctagtaactacaagattatcaattcctttttagcttctatgaatggaaatttgcatagacagcaatagtgagagaggtccagacatatgatagttataagtaatatgttctagttttcttgcttttttctttccttgaaatgatgatttaagggtttatgcagatgacaaatgaggttgggaaggcattgttctcaaaggctggagaacttggaataccagtgggattcatgtgtatgaaggtatcataaaaatttatcattatgcaaacacattgtacattattttatcctgtagactatgtgaaatgtacctttccacgtttatgtattggatatttctcagggcttattatcttcttcctcttcctcttattcttatttttatttttattgttttttgggaaagggcctcaatactcatttatcagaaatagagaaactgtgcaccgagttcccgtcaacatttgtattgcttgatcatattgctttctgccaaccaccaacgtaagcactcactctctctgtgttggctaaaaagaagctcaattctagaccagcatgaactattgttacatcttttatattgtttttgcagaaatgatgaagagaataaagctttctctgatcttctaaagctttccagattcccacaggtataagtgactttaatgtctttcaaatttttctatttgcttgctactactgtactcttgttcttttcttatttatttccaaaatcttcttaagaaatccaatgttgtatttattcataagaaactttttgcattagagcctagtggatatagggcacacatggtgcccaacaccaccttaagttgattggtgtaatatttcattctttttaaagtgaaatatgtgagatacattactaaattgcaccaataacggtatgcaagtagcaatattcatcttgttattcatactctttcttagtatggcacactgcgatgattgtcgagtaatgagtacaaataattgatatcagtaatcactacatcagaattttgtaatgcattttgcatttatttcagtttgcagcttcaactcttacatttttatttgacaggtatatgtgaaattcagtgccctttttcgggtgtcaagaaagcaatttccatatgatgatttagccaatccactgtatcaactggtttccacctatggtgccaaccgtgtcatgtggggcaggcaagtgtttctcatggttgttgtattgcattcctttaggcgacaatagtttataaccattgattgaatttgatgcagtgacttcccatttgtggttcctgagtgtggttataaaagagccaaagaagccatttcacttattgccaatcaagcaacattatcagcttcagagttggaatggatcatgggaagaactgttattgaacttttttcaggtcattggcaaccatgagcaattaccaatcactttctcataagagaaagttgtgtaccataatccccttttgttcactttctaccaactatattaccatatctactgattttttttatatatacatatttgtgctaaaatattatcataaagttccctataatgttttaattttactgtgtatttgatagttttggtcttttcataggagaataaattagtaatgagtaatgatgatgaaattaaagacgagaaacatagatgaacaatgttgtttccaactaactctactgactaactacttttcattataaaccttttttttttattctgtttctatacaaaactatgtaccgattctgctgcacactcagatttgaaaaaacaggcagttttgccatacatttctttttctcaccatttcactaagatggcgaaaagcgggaaagatgagaataaaaaaaataattaaagaatttccagaagaaaataatttacactgaaaacctataaacctaaaaagaaattgatttacactgaaaacctataaacctaacaagaaaaagatattgatacaaaggaaaaacaaaaatggtttggttctaaacttctaatcatctgctcgttgtatttcacccatcatgatacggttgctgctgactttgaagccgagtagagaggggtcgatttgcctccctttcttccccttccttcttccacttcgcccttgtgttccatctgatgattcagatgtagaatgggcatctggaggagccgccttctttgcagtactctttagcatgtcgataaaggacgcttcagaaacatctgcatcactgccagacgaagatcggaggaagcgcatgtccttcttggaagaggctggtaagtctggaacttggcttcttgaattactcgatgtatcttgacagacccctgaaaatgaccccagctatacttattaagatgaaaatatgttttactccattcactctaatcattcctcatgttacaagtcaaactaaacacataattgacagatatcaacataccatcgggcatgcttgaagaattttttcccctagaaactggatcagatgctagctcagacaagccatcctgcgatgagggcgtacggggcacaggaggtcgtctcaacagaatactttcttgccctttgatcaataatgccctgtcataaagaggtccaaaacaaaaaacgaacaatgtaaatatgctctactgtgtattgtcaagattacacgttcacatattttaggcacttcttaaaataataaactggctattctggtcctcaaacaagccctatgtgaattaaagagctctcctcgagttcatatgaagtatatagaacacggcttacctatcttttgcagcatcgtccaaaaatgaattagaagcaccacacttgttatcgtaaatggctgcactcccatctggaatatataaatataattatttacgagtctcacaaaaatatatggcaagtgcaacaactttaaaagaggtaccaccaaaaataaattaagtacagctcataggaaaagaacaacaaattaccagtaaccccaagggaagaatgcctgctcaaggcattcatcgatctctcatgatctagagcttccaaccctgcttgctccaccatcctttgttgtctctcgaattcccgacctttcatcataccctcacctttcaatccttgcaactccagctgctgtttgtgcagagaggatactccagaatcagtgttcacttcttgtgttggttcactttgactcaaaccaaaaatgcccaccccaaatgaattatttaatttagcttctccatctgaaggcaaagtaaatggtacttctgatgagcttgacttggcataatggcttcctaataactctctctcaaaggatgatttagtaccaacatccatcaattcaggaatataattgcctgatttttgattaagcaactccaataatctctttgacttctcatcatctgacaaccataaattagaatcctcacaaacaattttagcttcagactcccttttctgtcgctctgcagcaatatgcgattgttgaaaccgagaatcaacgaagaaattctctagctgcccattcttctcagaccaactgttctcaaattccatccatcgtggaacctgaaaattgattataattaaagggtgctgaaggccaacactttgaactccagcaggaaaatggtcccacttgatttgtaagaatttctatcgtgcacttgactcatgc

SEQ ID NO: 186689 - DNA, 3694 bp, Cannabis indica
attttgttttctcatctctcatccaccatatgattggtatgacgcactgtgggacacaatgccccccaacttttgtttacactctatctcacattaccacacaagccacttaagatattggattaacataatgatgggacaaaaactcatcctacagacccagaaaaggaagcacgagcaaagcatagccagaatattgatccacccaaacgacccactacccagaaaatcaggaattatttactttttttaagcatctccaggtctacatgttcaaattggaaagtggggacataactttgctggccatcctaccagcaccagccaaatgtgaaatgcaaagtagctaaacagttccaggcgacaatgctctatagtcacttttgaaaattggccttcgaagagattttgggtggaagagtacacatcccactatcttatgtgcccttatgctaataaacataagaggtcaagctcatgcataatgatgatgctgttcaaaaggtgagacaaaattgaacttaccatgtatggaaaacatagagaaatctcgaaccccacattctccccaagcttccctcatttcctagtgtgttagaattatgggtccttttatatggcgccaggtggggatcccccattaacagtaagagaagcaattgaggccacattttcaccccacaattgcactatcaaccaataggcgtttcgaaacaagtggtccaagaaactggccaagttcaacatttgcattcagacaatacttggatatcttacattacaacatattcgtatttgagataatttacagaagaataaacaaattgaagatccaaattgttacaagttacacataagcttgtgacactggcttcaaagaggtaagatacagtctcaacattatcataaatatatgttgttttgtttattaaatgtgaacaagggttgacatgttagaaccatgcttaatctccagaccttaattccctttcaagctcatcaaactcccagccaccaatctcctcggtcgtgtagtcttgatccacctttccgaactctgattcgagctttgctaattctgcctcagggtctaacctctgctctgcctttgctgcaggtgatttgcattgctcatcttgctcagttttatgtgttcctgcatccgtttttggagactgaggctgactacctttgataatttcagaagtagatgaagtttctgctttctgagtaggattttccatttcaagatctggtctctcaatagattcaaactcccctcttaacttctcaatttcatcaaagagctccttaatctttgggtcgtctttcctagaatatatgcaaatcatgtatttgtctttaggaattgctaaaagaaaaaaagagatggaaacaattcaccaatatttgtctccatgtcattacctggagattttatcttgttgagcataaaattgctccctcatgttatccacaacactaaaagttgtaatgatctgaaaaaagcaaaaatggagattaatgtgtggtgattgagaatagaatcatttttcttcagttcagactacatgcataaataataaaatctaggaagttgccaaatttggcattccagcagcatcaggaccagcaaagatttaacagtcccaatttattataaaaaatttaagtcccaattttgactaattataattaagaataatgtttgaattgtaattagtaatattttttataaattcttgtattaagaaagtgtacctctatataaaaataattatatctcagtatatattcatacatgtatcacatttgtttatgtagagtcaagaattttattccacatgtaatgcacgtataatattatgtgtatattttatttactcaaaataattttattatacgttatttctttttctttttcaactataatctaatatgtataagtaataggcatattaagaatttccacaatataaatattcatatgatattttatcgtgttttaatttttttactagtaactctatttaattataacctcttaattataatataattagtttagtgttaagaaaaatttacataatagaccaaaaatattgaaaaaaattacaaaattacgtcaacacggaaaaatttcatttactctttgaacttttttattacaaaacgacctctttagtaaaaataataaattatttttttggttgttttataatttatgaataattgtattacaattatcatggagttattttttattgtttcataatttatttatagttgtcatgagtttgatgtctcatcgtcttttagttgtgtttttactttttgatgaataaaatatatttttataatttcaaaacttgacaagcatatttttataaataaaaaatttacgccgcataattataattaaaacataaaaaaaaagaatatctttgaaaattcacttagatagaggttttactatctatgcaagttacatcccatacaaaaactagaaacttaaaaacaagcattaactcataattaaaattgtttcttttccaaaagaaactgaactacattaaacaataaaccataggagggggtacatgaaaggacctctaaaagatgttttgaaggtctctataatccatcatagaattgtgtggagagtggggaaacttattttactagctgttttgttctagctttctagtaggctttgagcttctgcattatgttgtatttacagagtttcactgatttctgtttctgggattcccatgttcatgttaccaaggtttttccagggttttattaaacttgggcagaggtcagtcaaggacatgtggcctgtctcttgttcagaagaaaaaaaaagaccaggcactgcaactaattctgcactaaaaataagggatacaacctacagaaatatggttcaaagggaaaagaaaagtacttttggaaaaaaaactttggaatgcctacatcagtaaatatgtgtccagctggcataataaaacaataatcaaagtgacaagaactgtgatttgtgattaccatttgaagcaaagttgtaacacaaagggcttgtttggcattttagaacagttttggggtgtaaagttgacttttagatgtgtggatgaaatattaaaagaccaataaaagttttagaagagcttttcagagaagcaatgacaccagtttttctagggaactaaaaaggatcacggggaaggagctattttctcattttaatgaatcttttagaatacttactttacctttctttttgaaaacaaaaatttaaattacattcttctcctaattggtatattataatattagggtatattacatttttctacaagtagtggatataccatttgtcttattaggagtacaaactgacacctgatcacccctcctccactacccatttgacgtgttgatcttcatggtacaaacagaatttttcccccttaatttttgggaccacttgtatctcaaagccattaaagctcaagaataaaagcctcatttaaatatttgtaagggaggttggaaaatcaccatttgtatgaaagttctagtaatacaacagtattttctccattggtggctgagtattcttaatttttcttaagccttctttgtatttgattttctaactaaagttcagtttgtgagttctcac

SEQ ID NO: 186690 - DNA, 2922 bp, Cannabis indica
gaatcaatggttggttcaatttcagcagagcgatgccgcatgggaagtggccacctccattctcacttcttcttcttcacaaaattcattcctttctcatttcgagctcgaattcttcgctgcccagattctcaaacgcaagatccaaaatgaatcccaattcttacactctcctgctaaggaagctttgcttaatgctcttcttctcgccgccaaacgattcagctccggccctcctcaggttcactttctcaatctaaattcataaaaattgagtcttttttctttcttcattataaaaattgagtcttttttcttcttgacaaaacagcttttaacccaaatctgtcttgctctttctgcccttttacttggagccgttgaacatggaaagcctattgagcaactgttttacagtcttcagaatcttcagactcagcaagatgatggtaatattgctgttttggagatgcttactgttcttccagaagaagttattgaaaaccaacatggtgatactaaactctctttaaccaatagaactcaatatgcccgtgaggttctactctttcttacttttcaattctctattgattatctatatgtatatatgtgtgtgtgcgtgtgtttatatgtatacattgatatgcagcttctttcccatactccaatggttcttgagttcctactacagcaatcagagaaaacctttgatggtgctatgcaacaacatgaaaggaacagaaaaattctccgttgttttctcagttgggtacgattcaattcactcatttctctcagtgtatcaatatcatgatgatactgatcacactcccacccatttctcttagaatcaatatcatgatgatattcaatcatctctcttgatatcttgatgatcacattcactcattccctttgtttaggttcgagctggttgtttctcagagattcctcatggttcgttgccagcacatccacttcttaattttgtattcaattccttgcaggtatttttatttagaataaataaaataaaatatctactgtttgtttcatatggtagagatttgatatgtattttgtgctttgataggtgaattcttcatttgatttggctgttgaagttcttattgaacttgttagtcgacatgaggtatgcattgtcttttaagatgctctttataaattcgatttgtacttcatcagttaatcctttctttatttcatttcggtttttgacatttgcaaacatttatataatttagcatacaatgttgaacatatgggctagaattaatcataaaaatgtttgtcaatttctaggattttgacattgtcttttcagatgtaagtttaagtaatttattatctttaatcccatgaagcggcattctatatcgtgattcactagaattatgctacaatcctatggttatgtttagtaaattaatcatctcatctttacctaaatttttttgctgttgttgctgctaatcttactccctgcactgtaaattataacaatattctctattctaattaccgatttttttcttggcttcgataggggctacctcatgcattgttatgtaggatacattttcttaaggaatcacttcttcttccagctcttaacaatagggatgagaaagttattggtggtatcgcatgcttattgtctgagattgggcaagctgtacgtgtccaatatgaatttttatgttcaagtttgtgctttatcatgttataccataacatgatttaaggttgtaacacatttgatgtagaataaattggttcactcatttcggttatctttctccctaattaattaagtcttttgcttattaatttacttcaggcaccatcactgattgtagaagcaagtgctgaagcacttgcactgacagatgcacttttaaggttagaatttcgacataaaaatttctagatttcaaggattttgtatatcgattatgtttcaccacaaagacaattaacatacgaagagatattgaagaagatatcattggaacagtttacattctgggttctctatatttttctgagaacttctcaggattcgatcactgacttgtgattggggcctaagcatcgcagttaagttgtaaaacatgaaagtttccaaactaagatttaaatcttcttcaaatcggaagatataggcttgtctagaaaatttatttcaagcttgaattcttgttggctgtgtagctacttcctttgttacttactagcattttatatcaaaattgaatcttttttaacctgttttgcatatttacagttgtgttgcatttccaagtgaagactgggagatagcagattcaactttgcaattctggtacttaaatattctaccttcaataccttggatgctattaggttattcgaaggtggctatgcttgttactttttagtattcgagcactttaatttatcttgtagagcaatttgatatctgtgttcaaatgttcatatatatgtataatgtgatgctatatggcatactgtctcagtaagtgtgtagctagatgaagcacctttaattttcatgattagttactatttcctgcttattttatttgggaaattttcattttaagtagtcattattactatttattttagagttcaatgatgataattcttaataatttatcctccaggtctagtcttgcaagctatattcttggcatctgtgatgacagtccacagagaaggaagcatgccgaagacatgttttcttctgtatactcaacattacttgatgccctcttattgcgtgctcaggtttctccgttgttaattttcttattctaatatatgttttttttcttggttctatttctttattttttattcctctattacactttattaattagtgtttgaaca

SEQ ID NO: 186691 - DNA, 2682 bp, Cannabis indica
tttaacattcatggctttcttgattaagttctaagtaccatttgtgagttggtatcaatggccttcttcaattctcaatttatatttgtttaggattatggttattgttgatcaatgattgcagttttgtttgtccaggattacgagctcatcataacttgcacgaagagatggagagctccaaccctgatgagaaaattcttagctacaacgatgttgtgctcaggagatcagatttggatatcctaagtggaccagattttctgaatgatcgtataatcgagttctatctgagctatctctcttcatcccttgattcttcagacgtcttgctagttccaccatcaatatcttactggataatgagctgttcttcgatgtcaaatctcaaggagtttgtggagccgctgaatttgtcttctaaaagactgatactctttcctgtcaatgacaatgaagatgtgagtttggccgaaggtggaactcattggagcttacttgcattcgagagacaaactaatacgttcgttcaccacgatagcaatgcacccgggaacagattacctgctttccgtctttacaatgcagttcgcaactacatctcggattcaggttcagaatctaaagccaagtatacagaatgcagtgattgtccaaggcaagagaacggttatgattgtggcttatatgttactgccattgccagagtgatatgcctttggcatagtaatggtcacaacatagccaatggcaaaaattttctatggttttctgatttgaaggagaaggttactccatctttggtttctgaaatgagaaatgagattctggagctgattaaaactctcatggccaagaagaagtgagattttcagtagatgaaaggaagaagaagaccaatgaaagagttaatgcttagttatttatgttttagttactttcctttgcaagaatatagacaatgatacagaaaatgagtacagattttaggacatcgttataggagtacttaactgttaataataatatcatgttagaaacaatcatggtttaaaattttgtttattattgtttagttatgttcactcactgtcttgttgttttttcctctttttatcattctttcgttttcttcttgtgctttcttcccaaatattacaattatctaaatatagtttcggaatattatttcattttttggtggggtagtctctgaatattacacaaacaacaatgaaaggaaattaagactgaactcgtcctagtaattacatggctaactaaatattgttgaaaagaacagacagacagaccctgcaacattcccaacagcaagaaaatcactagcatctgcaactaccgaatcattgttatgtatcggtggttacatggttgagattctttcgagtttcgagtgtcaaaatcattggtagatatttcttcaatgatgaattttcctacatacaatcaagttagaaaacagagctaaaattaacactccctccaaccatatttcacttaatgtgatcaaataacaagatataaaagatatctaataggcttcaatctatgattaaatgcattgaattatattttcatttcaaatacttactaattaaacccatctcttgtgtgttgttgtagaatctttgtgtggatttggtcttctattccttttggtttctccacttgatgataatggcctttgtttcaaagaagaaaatgtatctgatttacggttcattgataattccttgagaggacttactgatcgagatttcgaatgcttgttgtcttttgttggtctcaacatggggagctgcttaagctttgttggcaatgatttttgatgtcttgttgaatgaaaatcgaaacttggaggagggatctctggagttttaggaaccggtgactgtgctcggtctgaatctgaagatgaagaagggctagtagtactgtccatgtcgtaaagaaggttatctgtcaatggtggaacgcgtatactaggtgactctgaggaagaagcggagaaagatggcctgcgaagtctggtaagactcaccacctgtattttttgtttttcaaatgtggggttcaagacaacaatagcaaaaatccataagaggcataaaaaaattaggggtgacatgttggtgtgtcgtgttgaggtcttaaatttactaaaaaactgctgatccaaacacgacccgtgacacacgaaaaatttataaaacatgaacacgactcgaataaatttcatttcgtgtcgtgttgacaggttgtaagctaaattgttgtttttagtgtcattgtgtcgtgctcttaaatttattttagatagctgatatgacacgaacacaacccgtgacacaaaaaaatttataaaacataacagaacacgacctgcataattttcgtgtcatgtttgtgtcacatccgcgggtcaattgccacccctaaaaaaactaatacatcaacatatatctttgagctactttaccaagtctcctatgcataattgttccaaataagatgacaaaggtttatatgataccttttgttcgaggattatcatgtccttcttcaatcgagtaatcatactgttctttcttttaataatgtcttccagctctgaaattctctgttaagaaagaaaattagatctgaaaatggataaaagca

SEQ ID NO: 186692 - DNA, 1850 bp, Cannabis indica
aaaaaaaaaagaaagacatgacttttaagtccttataaacggtcatgatgtttccaattcaccctagaattatacttggcattaattaattaattaattaataaccaagctccagccagggagagaatgaaaacataaacccatatctagctactaataatatatattctcaaaaaacaaatccagctgataaaatcaaactgatcatgagtactattagtatactaatctagctgctagtagtagtactagtccaacatgaacattattactatacatatattatataccaaagttgaacttaataaccttctccaggcagtggtgattgtgtggacctattaatggggtgtctaggcctggcttccactgttcttccaaggttaaatgctcgaccagaataggttcctccatcacgggctggaacaaacataactggaaggtattcaacgatgttacagtagaaattcttagacttgaaggcctccctcaacgcatcaagcccctgagattaataataattagtacttaaatcttttagtttcagatatatatatatatacaactcttgtcgtacaaattaagtaccaacctggattttggccagtgtgacttcacaaaccttgttgcagtcatatgaagttgaccagctaaacttgtggaaagattcgaaaaaactccatgctccctcaggcgaagtgaaattcacaaacccataacctaaattagtatttgtcttgctgttccagtatttgctacattgttaataaattaaaaactcaatctttgcataaccaccgagtaaaattagtaaaacaaaatattaatttatatatatattacttgaaatccatgggcaaatacaaaaagttgtatttggaatcactgcatgttttacagtgatcgtccaagactttaatcagatcacttctcctgtaagaaaaatgattgttaaataggtcggtgcatgtctatataaactcggtcattaacaggtattaattcaagagatcaaactaagaaaggaaaaaagttgtgatcacctgaaacgattcggaatatttctaatcataaccgtggtatggtcagacctttgaagctcatcaatgttatcaggaaacggtatggtgtagttcggagtcttgtcatccgagccaccgggtttcatcaccgtcgtcgtcggcggcggcgacaaaggatgatcctttctcatccaaacggacctccgagaccgacgacgtctacaactagggctacggattcgatcatcattttccggcggattttgaaaacgatggaggttactggtagcgtcgacagcgaagactttgtcttgttccggcggtggctgaagaggtgggcagagatagagaggaaacatgggttgataaaagggatgaaaaacacgacagggaatgtagaagtagttggggatgagtttttgcgtagctgtgaaaaatggagtagcgtatggattcaagggcctcgccattggtggtgagaatgagaagaaatgaaaaagagaagaaatccaaagaaataggattagcttaagagcgagtcggcaatacagtactatataaaattttatgattattattttttattttgaagaaggtggtagagtagagtagagcagagtagagtagagtagattagattagattgattttatggggtatataaaaagatgggtaataataataataatgaggtgttggatttggcggctttggtgatgatctctgattctcttttgcactgggactcagacactcccactccattcttttactgatcaagatcacatatacatcaaaggtacagatatttattaattattattattt

SEQ ID NO: 186693 - DNA, 2909 bp, Cannabis indica
aattgacctctttagttaaccagcttgtccacgtgtgaccactttaggcgcgaacatcattttcggttaaaccacacggcgggtatttcccaaaaaaatgaacacaaaaatcaaaagtaaattaaaacgacgccgtcacgacctctgactagtaaactacataaacataaactcaatgtgtcccaatttctcgaaattttcaacaaagtacgtgtaaaaattccacagaagaggctcgaaaaaaccgaccgagcttgatcttgatcatgctactatatccatggcgtttttttcttcttaatatattttcaattcaaaaaaatagttttttttttcattaccatttctcagttttcaatttcaactacaagtttttcaattccactttccttttactttaagcttttttttttcatactaactgtagtttttctctattattattatataattaatttgtaattaagaaactttcatattataaagaatctttctttactttttcgaggctttcgtattaatcaataatcatcatgtattgtgtagataacgatcactgttaacaaactctttgtacctttttttttccttattttgctgtaacacaaatttctttgttttttttttcctcaaacacgatttctcgaagtaattttgcttgaatctttgtaacccaaatcagcaaaagcttcatactttggtgggtagtctttcaataacctgggtgggatcttgatctctgtgaaggaggggtatgggttctggttctcaggaatctcgtccatggactttagatggtttaataagagcctttattgatctttttgttgcttatattctactatgcatatcgacttttatgttctttgcatctaatttttggagtatgtttgggttggaattgccatgtccttgtagtggggttttagggtaccaaaatgggtgttattgctggcacaatttgcttatcgattggccaattagaaagatctacgatgttcagatgagtgtgaggagtaaatttccttttgatttggtttggtctccacgaaatagtggaaatgggtttgttgagttggaaagcgaagcatgttgttctagccgtggagttcaaaatctggttgatagagaaaatgggtttgattctaaaggaaaaaagcttgtgaatttaaagcaaaggactggatttcgtaggcgtagtaggagggctactcttgttgggtatggaaaatttgcccctgtttttccaaatgagagtttgtcctcttcggttgctagtgttgacccttttggtccccaaggtaaagaatcaaatatctcaatttgttcatgtgtgattattagtagaatattagtagtgattactgattgaatatgaatcgtttagagtttttctctgctaaatttaatgctttcttatttgcttttgttaagaggtttgaaaattttgtttcataagtcaaatggttaagattcttctacatttaaaatgggttgacaatgaaacttgaagttcataggtcctttgacattttataatggtttgtattttggaacttgaatttgtaggttggggattaaaacttttttgggttttagatattaacatgtttaatgatggctatttttgttttattccttatcctacctcttgtccattgagaatgataacaataacagaaacactttacattgtgagctagagagagattgtagcttgtaatgtttgtaacttgaagattaaaggaataaagatttgttcagttgtttttttttcgggtttaattatgtcgtgttgttccatctgcggattgtgttgttgcatctggaatatgtttctggtttagttcttgattttcttgaattggtgtttgcttagttctcttcttaattcgtgtttgagtgctgttagttggtgttgttccgcaacacatattgttactaattctttctgatacttgtgatcatgtttagatgttgtaaatgcaccaattggaaattacaaaggtgaggagagttgccatagttttgaattgagtggatcatttggtgatagtaacaacacttgtgagcatccgatttgctctgataaacacattaatgttaccgaagaaaagagcgacgaagctgtatctgaatatgataaagtcgggattttggagagagctcttgaagaagagaaagctgcttgtgttgctctttaccttgaactggagaaagagagagctgctgctgcaagtgctgcggacgaagcaatggcaatgatatcacggcttcagaaagataaggcgtcaatagaattcgaagctagacaatctcagagaatgatagaggaaaggtttgcttatgatgaagaagagatggatattttgaaagagattcttgtgaagagggaaagggagaatcttttcttggagaaagaagttgagacatataggcgtatgagttttacaggagacgagcaatcgcagggtgattttagcgagacaatggatgaatggggacaaaggcctttatcttcacattattcaagtccagattcacaactaatgctccaaatgacagtcaatgctgattctggctataaccacatggaaaatgatgcagattctctttcaatccatgaggttccaattgttgaggagcaaatcgatcctattgggcatgacttggttgacaaaacagtacttttagtaggaaaagaagccgaagcaaccgaacactgtactggtgatgagaaatattgtattgtgacagagatgagctacagaaaaacgaaacacctaagaaccatgttgataacaatatctaattggttggtgaacttaacaatgaacgaaactggactgatatctaaccgaaaacaaagagacaaaaaacctagcagattggaaagtggatatgtacct

SEQ ID NO: 186694 - DNA, 1660 bp, Cannabis indica
atacaacataaaaagaccatatattctataaataaaactaaaaaatcgaaaaaatgtttaaaattccgtgaaactgtatttttgtattttttttttgttgtttttgtaaaattatcccaataagaaaaggaacaagagtatgggccttaggcccaacaaggcccatgaaaacagaccattatcgttaacagaacttaaaaaaaaaaagaatagtgtggctgctgggattcgagcccaggtctccacggccacaacgtggaattcttaccactaaactacagccactttgttgatgtggctattcatttctaatatttacaaacatttcattactttagtgtcctactcgatagttttatttcttaatttctttctctactttttattattattattttatatatatatatatagactacatagtgtgtgaaatattctttcatattgtcttttctatataataatataatgaaaacctagcaaaatgtcaatgtctactttggaatgggcggaaaggaaagaatgaaatatcccaaaatttggaaatcttcttaattattattaattaaagttacacctaacgtcatgatccctaaacttggattattaattaattccttgcttcaattcaagataatccacaacaaagcttgtattaattattcatatattgcaattagatatatagctagggcttattatagaataataataaaaaaaaaaattaataataatatgcatatctccattcaagaaaaattattaataatatgcaaaagtctcaacctttatataatatatatacttttcaatgtaaattttgtttttaccaacatgtgcatatcatcgatcaagatttataattttttagggcaaagattttagattcaattatagcaaataatttattttccatgtgcatgtatatcatatatctatatttgtgtatatatatatatatatatgatatgtacgttcttgaacaaggttgactgccacaactgaaaaagtcattattaaagaaaataaaggaataatttttttccctcacttttataattatgttatgtacattaattatttaataaaatgaagtccaaccataatgcatccaacgtggattccaatttctgtctacaatcatatactatatatatacactatattatattatataaatataaatgcaagtagctttaacaaaagctatagaaactttcactttgcaatttaaaattcttatttgaaaaataaataaaatggcatcttggaatcccaatgttaattcgtgtaataattgtgtcataattattttttgcactaacttatatattaatatacacatatatatatatatatctatataatcaataataaaattagggttatcatatataatagctatatatatagatattaacatatgtatatatagagagggagctaaatatagggtataattattgtggttggaaaatttattaattaatttatctataagtatagtgactctataaaagtacatgtatatatatagtacaaagacaacttgattttgatctatatatccaaaaagaacatatataaaattaatcaagtgctcaaaaaaagacaaaaaaaacaaaggcacgggtcaatgtataataattaaaattaatat

SEQ ID NO: 186695 - DNA, 1695 bp, Cannabis indica
tttggtattaaggctttaagaggctccttcctctgaatttctttagttgaaatttatgtttctaataatttctagatgctcagaatattttagtcaatgtatgtgcaagcatagatagttactagtatgcaaatttcttagttgctttttcatttattttggtttctattattacttaacaatcttttacaattttcagaatgaaaatctagggaagcgacttgcccatggttacccctttttagaagctgaggttgcctactgtgctaggaacgaattctgtgaatctgcagtcgatttcatcgctaggagatgtcggcttgcttttctcgacaccgatgctgcatctagagcattgccaagagtagttgaaatattggcgagtgaacacaaatgggataagtctagaaagaaggaagaagttgagaaggctaaacaatttttggaaacattcaagtcatcgaaaaatgcccagttccatgatgggaaacacttgtagtaagtggaattttcatctggttgataacttatcaaatccaagatataaaaactacattgcaatcaatgacttcagtagcattcttctatttgttggctggcctcgggtctcctcagaaataagcttaactatgaaggagcttgattttcacagataccatgtttgataacattcctggcattaatttggccaaaaggaggcctttagcagtttctttctttcttatttatttatttatttttctacacaggctgatttgcaatcaatagcataatatagtgcaaagccatttggtcttggtcatagtttattatacaaggaactctatattcaatgacttgtgcttcagaactctatattcaataagctaattaataatatttttcatgtgaaattgaaaatgttgtggccaggcctgtcttttattctaaagtactctttatttacacaaagtctacagacagacagtagtaacagtatgcattttaatattcatattttcatagtggaagagcatactaaaaatgatgcttgcaatttttttttattatttttagtccaataacttacattaatccacatcttttaatcacaattaccgtgtttatagtgatgcttgcaatgttgtgcggataatatccattttattttttatgtagtgctgaagcagatcacgtaccaaaacattactcatgttgggctgttaccttgttattagtgtaattatattaggtcttaaacattgatttaataaataatataaaaaattattatttatttacaacacattgcataagtatgtgtaatacgaatgttcatttaaaaataaaaaatgttaaaaaatagggataattgcggcaaaagtccccaaaaacttgaggttgatgccgattagtcctcaacctcaaaaattggcggtgaaaatacctaaggtcccaatttttgtttgtccgttggtcctttttctaacagatccgttaaacccaaataaagtgccacgtgtcaatttttattggtccaaataataattttaattaaaaaatttaaaataaaataaaaaactaaaaaatatattttaaaattataaatttattttattttattttattttttctttttttttttatttcatcttctccaaccagccaccaaaaactaaccctacagacgtcatcttcttccctctacattctcta

SEQ ID NO: 186696 - DNA, 9468 bp, Cannabis indica
atttcccataaaaaaataaaaaagtagcagtagttattagttcataaacacaccaaataaatatctacccaacaaaaataacagcttataataaaacaaattaattagcagctataaataaataaatatactaggccggcatttaattatcgaaatacgtccagacgaaatttcaaccgttgatctcagtgttccccaaataaagaaaagaaacaaaatcatctcagcccttgatttcagctcactctaatgtctaaacccttgcttgtagaactctctagaatctaaactctttccactttcttcaaacttcagagcttcactaccattttcacgcttccaatctctctctctctacaaattactacctgctctgttcatctagggcttcacgtcatcatcatcatcatcatcttcaataagaatggatgacgacttcaatttgaatatgccgccgccggaagagatgggtgaggactttgatctgcctggtgcggacgccattttcaaggtaggtgaagagaaggagatcggtaaacaaggtttgaagaagaagcttattaaggaaggtgaaggctgggatacccctgagactggtgacgaggttgaaggtgaagtatttttccatttttctttgtttgaacatattctaatgcattgggttgttatgaattttgattgttaatttgtgttttttatttacagttcattacactggcactctcttggatggaactaagttcgattcgagccgtgatagggggactcctttcaagttcactcttggacaaggtgaaaaatctcttcttttttatatatttattacatgattaatccttagttttgtacccttttgttggtggattaccatgataagattttggtaggaagataagaggaagaaatgagctgattcgtattgtggaagcttattatatttctctgctttcagattatttcttagttttataccatttttactcacattgatgaagagaaactttgggatagtgaaaatatattttgaaggagaaatgtctctttatgagtaatgttgtgtgtaaaaatgcagggcaagttattaagggatgggatgaaggtattaaaacgatgaagaaaggagaaaattctctattcacaattcctcctgagatggcttatggtgaggctggatcaccagatactattcctcccaatgccacattgcaattcgatgtggaattactttcatggactagtgtcaaggacatttgcaaggatggtggaatattcaagaagattctaacagaaggagacaaatgggataacccaaaagaccctgatgaagtgtttggtatagtatctctgccaatgataatctttggcgtggatattatgctaaacggcctctaatgatagttttctttgtaatcttgatgcagttaaatttgaggctcggcttgaggacggcaaggttgttgcaaaatcggatggagttgagttcacagtaaatgagggtaaggctttttgtgtgtcagtgaccaactttcttacttcaaagatatataatcttttaattcaatacattgttgattcctttgaacaggttacttctgccctgcgttgtcaaaggctgttaagactatgaagaagggagagaaggtgattcttacagtgaagccacaatgtaggtttcttatttcaattagagtgatgtgtaaataaaacctttcagttgtatttggtaattaattggttatttgctacagatgggtttggtgagaagggtaagcctgcagctggaggagaaggtgcagttccaccaaacgcaactcttcagattactctagaattgatatcatggaaaactgtttcagaaataactgatgacaagaaggttattaaaaaggtccttactgatggtgagggctatgagcgtccaaatgagggagctgttgtcaaatgtaagtatattgattaaaggtggactgtggacttttggatctttgttcatctgttgatacatttatttaactggactttggatttttgcatactgtagtgaaattaattgggaaactgcaagatggtactgtatttataaagaagggacatgatggagaagaactcctggaattcaaaacagatgaaggtaatgttttgtggtttctctgtttattaccgtcttttgttatatactcgtgtgctgatttatttctttgaacagagcaagttattcaggggctcgataaggctgtgttgacaatgaaaaagggagaggtagcactcttgactgtaggaccagagtatgcatttggttcatcagagtctaagcaggagttggcagtggtacctcccaactctactgtgtactatgagattgagctggaatcctttgtgaaggtgagtcatcattcaacaacatttcacttgatttatatctatgaacaatcaattttcccatggttttgtctcaaatttatatttgggtggtttttattttgttcaggataaggaatcatgggatatgaacacagaggagaagcttagtgctgcgggtaagaaaaaggaagaaggtaatatcttgttcaaggctggtaaatatgtcagagcttccaagagatatgaaaaggtgagttgcatgattaatttgctagcatacctatttcatctccttatctcctgtatttattaagtgctctttcttgcaggctgtgaaatttattgaatttgatactaacttcagcgacgaagagaaaaagcaggcaaaggcattgaaagtcgcatgcaatctaaataatgcagcttgcaagctgaagctgaaagattacaaagaggcagaaaaattgtgcactaaggtttgtcacgccggttattcggaagatgtgtttttccttttataagttggttctcttaatgattctttatgttggtgttcaggtactagaagcagagagtaaaaatgtaaaagctctctacagaagggctcaagcatatatccaattggccgacttagacttggctgagtttgacattaagaaagctctagagattgaccctaacaacaggtatatgtcgtttttatttttacaacaatcatggtgtgtgtgtgtgtgtgtttggtgttcatattcatcttattgctgctcactctgctcggtagggatgtgaaactggaatacaaaactttgaaggagaaaatgaaggagttcaataagaaagaagccaagttttatggtaacatgtttgcaaagatgagcaaaccagactctcgagaatccaatgtgagttttctgcagtagcaattaattagcaaatttcctggaaacttgggactgtaaaattgactattaatttcttttgattttacagaaacctgccggggcgagtgagggtgaacctatgactgtagacagtagcacataagcaaggggtgtggtatcataaaggcatacaatttggaaaaaaaaatatggagataaagagtaaaatgttttttttttttttgggttgactattatgtttaatttgaattttataggactaattgatctttggtacagaggaatttataattgatttcttctggctcgggagttagactggttgagtattactactgaactgttacccatacaaggtgttttggtctctgcattattttctcctggtttctttctttttctttttgatttgaacttggcttacaagaaattccatttaaattcctcaaaataatttttattaggctgagatttcgaaaagtaaatatttgttctagtttaacagttccgtttttattgttttttaatagtgagagacaagttttatttaagtaatgtccaaaaatggccatttttcttaaatgtgacatttaatcggatggaactcataggatctgtgtcatcttcagtctactctttattagagcaatcagtttaagaagaaaatcaaagatgtgttatctcgaaaatctattctggctgtagattaatcaactagtagccaatacaaccagagcaaagaaataacagtagaaaagtatccaagaataatatccaatgtatattgaatatatgagaaaaacaattacaagctatgggagtccttatgcgtatgccccttttgatcaaaagagggaatactcaatacattgcatatccattctttctttactttctctcttatttgttacctcaccatattaatagtgggatctatcattgtcagacaaggtgaagggaatttgcaacaaacaatgcaccattggtaagagaccattgagtatcgaggaattcttagtgttctggaaacctcactagaacaatatcgaaattctagcgaggacttccgcgatattagatagcaaagtcaagaaatcttaacttgattgtgcgattgagaaataagcaaccattaatgagttttctttcttccctcatctcatctctaagtggacaataaaaatttatgagcagtccaccgagatacttaactttttgaattgaagtatacaaagcaaatcgaaatgatgacaaaccataaaattagtttaaccgctaatattccttttatttattatagcaaacatccatgttaacaagtatacagaggaaatcaaggaataaaataatggaatatcctattcctactgaaagaaaaagtcgaatatcctaatcttttatcatatatatatatttgaagtcgaatattcatttctttaatcatatacttgatacataatattcttagtctatgctaaatctttcgattatgccactccaatgggaagaaaataatcaaataaacttgattttctgaatttaagttgacaccatcattgagataaaaaggcttataagaaggcttcttattctttctgtgaataaaaagggtccatctccttatataaatatctataaagacataatcaaaataaagcacattttcaagttgagaaaaagaggaaagaatggaatgaatgcaacaatcaacataaacgaatttaatatatgatgaagctgcacagtctatcaacaaacaatacaaagaatgacccaatgtgataatctgatacttgcctcttttcgggttttgggcaagcaaaatgtatttatatatatatatgtaaagaagaagcctgtgtttaagaaaatccaatccaaagtctctttagagacactattcggtataataacattggctcacccaactgcaagtcttttttaccaagatggtatataaatatatagactataaaactctggcaagcaaaaaaattggctgcttcaattgagaagaacctttcacctaatcacaaatagattgatgcaatgcagctcttgtggtatagcaaattagaatgcgtttcgaaactcttcccaacgttttgtcttgcaccgatagaaattgcagttgaaagacagctttcagaactacccagaacagtaatgacggtcaactcacctgctcgccgatcaaatcgagacctacaactagaaaagtgattccttgaaatagcaggaagtagaagtggattccttgggcagacaacaagcttcttaatgaagcagtcaacagtataaatgctagagcaagttcctttctgtatagacggttcttttttgacttaaccgattttttagaaacttctaatttgctcagttcatcaatgcctgattctgaagatgacctgtaaagtgagttggatctgacaaggggaccagattccttctcgaaagctaccagatctgtttctgatgatcttcccgatttctttgtaactatccactcgtaggaacttccaaaccgaaacaatcctgatatcatagcattaaatttcgtcaccgacatggtgttctcgaaaaggaggaaggggactataaaaggaaaagaccgaggtgctggaagaatattcaggatagacattactccaggaacataacaaacaacccatgccggtaattgagcttctggtaggaacattgtcaatggaagaatgatgcaaaagagggtgaacgagtagaatggcagaataagctttcgcaggaggaagaacaaaaatatcaagtttactttcttcgccaaactaatctgtagtgattagcagaagaaaaaaaatacagactatgagcttgaagcatacaaaaggattcatagttttctagtaggcaaccacatctaagcatgcaaaaattttcagcaacttcattaaggtaaaatgaggttttcaagacaatttgaatatagaattcaaggattttttaaatataaaatttaaagagtgaagcttttagtaccttagaacggattacatcaacgaagcacaagcgaaacaactgcattggaccagaatgccagcgatgttgctgtttcttgtatgcctcataggactcaggaagctcacaaaggcactgttaagaagtattatatcagctacaataccaatctgacaaaatatttgaaaaataaaaatgataatgtatgaaccacaccttaacatcatccaaataaatgaacttccatccgcaaagatgagcacggacagcaacgtccatgtcctcaacagtagttcgttccagccaaccaccacaatcctcgagggcctttattctccatacaccagcagtaccattaaaaccaaaaaagttgagaaacacaccattgacctgttgttcaacctcaaagtgaaatgacaagtttatgttctgcagcctagtgagcaagttctcatccttgttcacaaaagaccatcttgtctgaacaagtgcaatgtcatcatttcccttgaaaatgcaagaactttgagtcagataaagggccaaccaatgtaaactataccatgaatgtgtttacactgaaaattggcatagataatgtatactctaatctacttctgttcttcaagttctattgtttaacttgtatatttgaacaagagctcttataatatagatgtttaagttaccttgaaatgaggaatagttttcttcaagaaatctggtccaggctgaaaatccgcatcaaatattgctacaaattcataatctttaacataatcacaccccattgcagacttaagattgcctgctttatatcctgtgcgaattaaacgatgcctgtacaatatgcgaacaccccgctgttgccacttctgcacttctgccttgataagcatttgaacatctaattcatctgaatcatcaagaacttgtacaagcattctctgcctaggccagtcctggacacaaactgcagcaatcgattgctggtaaacctgtgtggcaaacaaacaataagaattacacattttgaactaagaataacacatttttagtcactgattagtaaaacaagaagtgaaagggaaccctttcattacacacaatggatttctgctattcttacacagctaatataaagagcatcaagaaaaaacaagaaaagagaaaaagaatttagtaaagtaactgaattcaaatgtgtacaaattatactacacgacatgggaaatagttttaatacaattgggcaaagtatgagatagtgaccgccattaaagaaatgaagtttaactccaaaactcagcagacagaaatgcaatggaggaaagcaaaaaatcatagtaaaaagaaaaaaaatctctccctagagggactacgagacctacatcttcttacctccctctcattgcacatgggaatttgaactaacaccattggataatcatcaacattctcattgccctcctcatccataggtggagaatccccatactccatggctgccttaggcttcagcttccggaacttgatccagaagcaaccaaacatcaaaatcaatcgatccacagattgaatgagaaaaagaacaatgcagagattcgtcaagctctgaagcggcggcgctaagtaattggctcgtatatcaagccaatgagcgtaaactcgctcaacaaacccgagaacagcagccgagccgaccgaaggcgggctaaaatgccatccatggaagtaagcaagaagctcaaaccctagaagaagcaaaactaaagccagaaacaccttgattgctctatagagacgcgaagtagacgagtcagctggggaattgggggacgcgattcgtcggttggcagtacggagaagcaaaacgacgccattcgtaacccaagcgagcgaaccagcgatttgctggaatttcaagaggcatacccatgagagctgacgagcgctccgtgttcgctccttctcgaccgtagattcggcggttggagtccggatctcgaggctaaggaaaccattagctgtctcgtcaggtttcttgagaaggagtacttctgggttcgtctctctttgcttgttccaccattgttgaaactcgtggttcgaaggtcgagacatagacaaaagcaaaactttttttttgtatagaactgtatcacacaattctatacgtacaaacaaatatatatgaatgagaaatcttctagatttagattacatgagaggatgaatctgaaatctctctctggttcgagtagtgaaaatagagagagagagtgttttcgagggttatggaaagaggtgtggccggagcacaagaagaagaagaagaagaagttaatcaccggctcaactcagctcagctcacctcggctcggctcggcggcttttgcacttaatatagtaaagtaatgaccttataagcaaatttagcggggctttcttcgttatctctttccttgtctattttttatttttatttttatttttatttaaatatatatactcgtttaatttgatttgtattaatgtcggaaaatctaataattatttttaaaaacactatttaaaaattaattaataaaatttaattaaaatatagaagagcagaacaagccatgtgcgtttcgggtacgtagaagaagttagtaatattaggtattgtagattttttatttccacgcgctaattacggaagacgactcttgttgacgtgagttggtacgcggatcattggcgcgtaagctgtttttttatttttaattcctattttattgttattagggataaagtttgttaagtatgtctttcttacattaacagatctgatattctgatcagatccaatcaaaagcccatataaaagcccaatatttagtctaagctgggtagggacatgtcaactttctataagcccaattccaaagtccaaattttgtttttttcccaaattattcatggaatatttactcatcttttttttttaattattttatggttttctactttccctttttatatttaatacaactgtacaagtgattaagttttatacagacaaggaaaatttatgtatattttttcaaatctctaattcacatattcttattatatatactatgctaccatatttaagttgttattaaagtcccctctcaacaaattatgtccgaaatttaggaaatacgctgaccaataattaaat

SEQ ID NO: 186697 - DNA, 1440 bp, Cannabis indica
agtaaaagtagttttatttttaatatatatttttatcatgctatttttgtaaatattaatttgtatttagtaatttaaaaattatttaaataaatacagtacaaaatataaaaaatgacaaaaataaatattgaaaagctttaattataattttttttagattaaatcacatcatatataatatttatctaattaccaaaattctattatactgttaaaatttggtagttgcaaatattaaagtttataatgaaatcaaaataatttaaacttttttaacttgtaacaactaatgataatgaaattaataatattaataatttgctaaaaaagtattaataattaaaggaaaataattttgtatttggtaaaaattgaaatttaaaatgtatgatcatttggtctttgtcaaattttaaaatcataaaagaaatttcttagaaagatttgaaggggcattactacaaaatgcacttttggtatctgaactaacacttatgcctataatgtcagattatagaacaaacacctattctacagtaacaaaaaaatatattctttggtctcaatttttgaactaagacatttaggcattggtgtcagttttacattgacacttacggatgtgcaaattatttttgcactatatgtctcaatttagaactgacaccacaaaaaaaaaaaactttcagatctggccatgaattactcaaaactaaatctgagatccaaacaatacaatttacattatcaaatttacaaataacaatatacatttcaaaatccaattaataaattatatattataaaaaaaatacaacaaatcagattaaataataatacagcaaataaatctacaaaattatgagaaaaatattaagaacaagcatcaaaacaccacaatcaaacacaaactttagattttccaaaaaaataatgccttaatcgttgggctctgtttggtatttctagtagaggtcacgaaaaagagagggttggcggcggcggggttcgagcttgaggttcgaaccaacatcgaacaagagagggagagttggagggcgacaaatgacgagagggctggcgacaacaaggttcaatcttcggtgttggctttgcctgggctggctttttttggcatcgcaagatgagagagcaagagagagaaagagaggatattaggagagagaaagagagatagagagtatcatgagagagagtgagaagggaatagatgagagagaaaaatgcgaggaatggagagagggtatttgggttctcggggttgggttttctagggttaggtcccccggtgtcgcacgaagaagagagaggaagaaagagatcgatgccgaagaagagaggggaagagagagaaataaggtttttaaaattaggatttctcactttccctttatacccatttaaaattttacccta

SEQ ID NO: 186698 - DNA, 1691 bp, Cannabis indica
taaaaacatttttttttttttaaattaggaagacaaacagccaaaccaaattatacaaccgactaagtattaaccttgcgaaaaaagaattatagaagctattatagacggaggacctccaccgttaattacctgactaaaatttaaagagagaatttgtcctggcacggaaatacaagaactagtctctgttccactaccattaccaaccaatccatcgctattcgctcatcatttttctccccactttaatctcttcctcatctcctccttacccttcaaatggcatcggcgactcttttcactcttccatggaggctctcccagatttcaccttcaactttctcaaccccatccccacctataattctcacttccaaatccagtgccagatctttcactgctctctgcaccaaggccatcatttccgaccttcctaatcagacgcatccttaccccaaagtcggtgccctctcaactggacccattccgccttctcagctcattcaagtcgttgagttcgctgccaagactggcgctgaggttcactctctttcactaggcttgacctttaaattttgaaatttggatgtgaaattgaggactgccgcaagaatgtatttacattttgtatatctctgaagccctcctctctatgtgacacttaggttaagatgctgttaatttatacttctcttttcaggtcgtcatggaagctgttaacaagcctcggagtatcacttataaaggactaactgacttagtaactgagtgagaatcatcacagattacttacacagtgatgtacattttttttatacttgaaacaattaatgatcgtgtagatgctttatttgtcgtgcatcatatgatcactgttttctttttctcccttgtgcatctcctgtcatttcgtttatggtttcaacggattttcttgaatattgttcaatcatttgacaatgatcttttcaattcacggaaaatgtcctcaaaactataaagaacatataattcaatgggtgatagcaactgggaacatgttggtttagtatgggcattctgggatataatttattgagttagttaattttctggttttgttttcttaatcatcttatgtatttgtagcgatttttctggctatttttcacatactatgcaaacttgttgcagcacagacaaaaacagtgaggctgcaattttagaagttgtgaaaaaaaactttggagatcaccttattcttggggaggagggtggaattataggagatacagcttctgattatctttggtgcattgatcctttaggtttgattctctccactctatgatgttcgattttattaaattccaaaataaatttagtagtttgaaaacaaggaaattgaagaaaaatatatttggaaacatgtaagctttttgtatccgttttttttttttttagctatattaaacatgcacattttttttgtttcaatttgaataaaacatcaagacgatttaactgatgccccaattggtatttgatcacacactaatttatagtagtgccgcgttgttgtccaaagcctttaagtttatgtttatactagtgaaaataaaccacataaccttttaatatagaattctgtggaatcctagaaacagaatttagatgagaaacggaattatatttatttatttttttta

SEQ ID NO: 186699 - DNA, 1691 bp, Cannabis indica
aatcaacaacaacaactaccggcttccgcttcgcttagccgctacgagtcgcagaagcggcgtgactggaacacgttcgggcagtacctgaagaaccaccgtcctccgctcacgctctcacggtgcagtggagcacacgtgcttgagttccttcgctacctcgaccagtttgggaagaccaaggttcacgccgacacgtgtcctttctacggccagccacacccgccggctccttgctcctgcccactcaagcaagcctggggcagcctcgacgcgctcattggaaggctccgggcagccttcgaggagaacggtgggcagcccgaaacaaacccattcggtgcacgcgctgtaaggctgtacttgcgtgaggtgagggactctcaagccaaagctagaggaatagcttatgagaaaaaaaagagaaagaagccagtgcaaaactactacaacaacaacaacaccaaggtatgatcagtacgacaccgtttcatcagtcaatgccctcagcgttcaccaacacgtatcatcctaatcttgttgttgaccaatctcaggccaataatggcatggttggatcgggtagttcttcttcaaatggtagaagctctttgagctcaatgatacctctctcagtgttaaactagcttattatatatataattataacaagtataatacacatatgcttgttattagctcgctttagctttcatatgatctatatctatctatataatcatatatgcacttttttgttgttgttatttttggagttatattagtagtgtttaattaaatgggtagctatatagtaagatctttagatagatagagatgtataattttgggctagtagtgttttttttttttaccatttgggtctagatgggatgatgtgatttgaacactgtctgccttaaatgttatgatcatattattttaagcaatatttgggtatctttgcactcagtgttattttgtgtttcttgatccgcttacctagaaatgacaagttcgttaggcttaaataatggttaatatatatttcccaattaaggttgtagggttgtataagatgatgctttcaatctctctttataattagcttaatttcatatgcatatatattggcttaatggttaattagattattattattattattattattattattattgacagaattagtacggggtacttattagtttttggctatacttgacctgtatactattgtgttcaatttaagttgttttctaaatttcaaatcaattaatttcctcatttggatacatgaatgtttgggataatgaaaaggaatatgtcctttctaatttctaattaccaggaggtggtgttgtatagcatgggtcatatctcattattattttatatattatggtaataatttattaaatttaataggaatgttgaaagttttaggtcttttacattttatttcctcggatcttaaccaatagtacactatttaactaatagatataattaacataaattttaaattcactcatatttattacaaaatagttttaattatctgattattttctaataacatcaattcttaaacatactttctattttgtatatttttggaatttctatatctatacatatatgtattagtaacaggtataatccactaaacaatttaactataaata

SEQ ID NO: 186700 - DNA, 4565 bp, Cannabis indica
acactaaaaaaaaaaaattgagagaaagttcttgaattgcccctgaccacttgaataaggtgagtttgaagcctatttgcgaactattcatcaaaaaaaaaaaaattgaaccgctcgaaaaaaaaaaacaaagcaaataggcagctgatgaaatatctaatgacgcaaggcacaagatcattgacttttatacgtcacaactttgtaagtaataatatttatcctttattttaaaaatataatttatcttaaaatacattataaactatattattgtttatttttatatagggtggtccactcaaagagcatgcggttgatgcatggagggtggctcatacgaaataactattcggtatttttatcaatgaagtcgatgtagaagatttttgtaagtaaataaaatattacagtattaaaatttaaatactatattaattatattttcaagatggatgatgtccgccactatattgactgagaaagaaaaagaaacaaaccaagaagttaataagcagactaaacaaatagcaagtggataggagagtcctccccaaaaatttcttggagaggtccccccagacccatcatttggaagaaaaatcctgggagaacttagccccagaatcagaccgggaacccaagaatttgacaggatattctcatggtatttcacctaagaccataagggtgccaccaagaggattaaatatcagccatgatcaacaacattttactaagtttagtatttcatcagaaaatcactaactagacaaagtttcataaaacttaacattgtctacaaacatgataccattaactcaacatttcagttacaaggatgtccaaaataactaggaaggcctaaatcctattcactaataatctcttacagtaggcatgcaagcaagaaagttagctaagtaaattctcaagcaaattgttcattctaccctatccctcaaatgtacttcgaaattctagaagcctaaaagatacttattaggtgatgaaggtgaagattttgggaaagatgaagagcttgggaacaagctataagtctgtcaatctttgtctagatatcaggcggtctcgatgggcttaaaggaggaaccatcaagtctgagcgtggagcttctaggttttctcatgcttgaatctgatgtaaaaggaaaaggcactcgtcgaaatagtgattaattcagtagagataatttcatctttgttttctcttaaaaagttcaaattcaaaactaaaatcaggtaaaagtggtgaatggaaattttttactctatatataaggaaaaggtgacaatctacgtgacgcttgaattgatggttcagattacatcctagaaaacacaaagcaaattcaacggtttgggagcaaaaaggtcagtattaaatacatcactttggaatcgaggtggtttcatgataaatatttacctaaatatgcacactgacatgattcatcctctaatgccctaacctaagcatcacacactttcttgtcacgcatgaagtacacggaccaagaggctgaagacacgtataatccacccattagaacccaaaggttcatagctatccacgattattggtatgcaagagaaaaaggttgtccccttttgaaatttcccacatgtccgttatgatctgtgaagaagattgcaagcctccgcagctctcaagttctgggtgcttggggggtaaatattctccatgtttctagaaggaggacaagtgtcataaccaagccaaatatgatcaactaaagcaaaatttggggcccaatttaagtaacgggcttgatccacatgaatagatgagtcgcaggtccattcaagatatgagtttcttatgctccaactctgatctctctaggttttgggacatcatcgcgtccaaagaagaagataataaggaacgttcagaagagctattgggatgctatcataagggcattccaagagacgccctagaggcataggctgatgtagcgatcttttaacaccaaatcccacaatattagggctttgttctctgtgtcagaccatcgaagtgtgcacacacaaaagggaacataacctttgtctgatggtgactactcagacatctacagtatgcggggagtgagacacgcatgccacctatcagcatcaaatagtccccagtcgtatggaagatcacagccccacaagtcgggcttctatctatgggcctaagtcaatgtagtatatgtattttcccctttagtgggtcgtcacatgtaaaacctagtgggtcttgggtgtattatgatccctttaagcaaagggttgaaaattcaatactcaaacactatagcaaaaagctaagattcttaagcttatcaagaacattagtgtaatacttcaaagctacttagcccaatataattgactcgtggactaaggttcattaatacctgaaccacgtaaaaatctccatctctatttcatctgattgatttgttgtcttagttcttattttattatattgtatttttgaaaatcttggtaaacaataagaggaagatgaattgggtaaaatgtattaagaagtataaagggggacagttgatgattataattgtcctaattaaattctcatttttattttttaaatttttattcctattttcttgttatttcctttgtttaaaattttcaaaaattatttgaccaaataaaaatccaatactaattaacttgtaattgataattaattcttgtggaatgatacttggtcttaccatgatttattaaaaattatgattatatggacttgcatagtgattaaatttcacaacaaaatacaatctcatcctaagtgagactttcaagaacccctgctgaattcatagtactctccatatgaacaaaagtcacattatcactgcctttctcgttttctattctagcgttttatctttgttccgtatttttcaaagattcaatcaactcatctagatcttgtttctccactccatgtacttctttaattgaggtgactttgaatataaatttctcatgaagaactccaaggatttttcctacaagcttagcattagaataggtcttcccaagagcatataaatcattagagatgtcatataatttagcatggaattcatctacggaatcccttttttccatattcagattttcaaacttagtagaaagagctcttagacatgatttcttcactccatgcatcccctcatttttagttttcaaattctcctaagcctcctcagccaattctaatttgctaccacatatatctggttagttgagaaaatattatatataacatgaaattttttgaattatagttgacttgctcaatatctattccaatgtccaatctgccattttcttggcagatttaaccgcatcgacgaccttagagagagccttccaaacttaaaatactgccatctaataaattctatcatcctgtgctttcaagaacgccatcatttttgtctttcaataggaataattagccccttcaagtatagggagccttgttgtggaacctctaattccttgaacaaatccattggcataatacaaaataagaaaaaatccaaaaattgaactatgagagggtgagattagtctaaaaacacaataccagatcaaaatcaacacagataaacgagcaagaaacttagatcggacaatgaatagggtatgagatcaatagaggcacatctaaacaaaaattaaaccaagaatcgatcaccaaagctctgataccaaatgaaaattaattaactacctaactattggatgattactgagttgtatgcacttaattaatttttctcagatttcgattaagccataaaaataaagaaacttgaatttacaaggttcattgcaaccgaaaacgaattcaagctagctactccttgagaatttttagtttgggaaaaagatttaactaactaatcaaaaatttcttccagcaactcctgaaccagatcaggctccttagttgacagcccttgaccccgcctctagatctcgcaacaccaccaacacaaagtcagactatccccttcatttaagagaagtttgaatcataaccctaccgagtgaaatttaagccatcacaacttaaactgaaaaatctaacctctgaagacgacctcatcaccttcacacagtccgacagctgcaagagaaacccaccgagaacatgaccacaaatacttgaaccctcctagatccccctaatgaaaaccctaagacatagatcccctctgctaggatcagaaaaactgccagtcaggccggtggtagccccaagcacgagaaaagaaaaggaaaacctaggcagcggctaggtattaacattagtgttagttacaattcagttaaagccattcttttctcggttagttaggcctgtcttgaactaagctaagttagttatacctctcctatttacctctatatatacttctctacatgtaatattcaaatacatagaatataatataagctaaaaagcttctctctctctctct

SEQ ID NO: 186701 - DNA, 4788 bp, Cannabis indica
agttatggaaatttatcaacttgatgaggagttgttgtcgtttgcttccttcaattctaatattcttgcttagctagttatgttcatgtaaaagtttgacatgtcatttgcttaattaaaatattacataggttaataatttaaaatgtataatatttattatctttttgaaagaattattgtaataataaccacaacaaatgatgataaaattttatgatttgttaatatatattttttcaattaattctattacatataagatgttaaaatctatttattactagattattagagtgttaattttcatatcaatagactaaaatattttatattaaactaaatagttttaagattttgtagtggttatattaaattgagacatttcttttatatattttaagtttttaataatgttatagtggctaccaacaattatttttgtgactattatcattgtctattctcaaatattcaccattagcagcgcctccactactaaataattatattataaatttaataagaaaataattatagaaatactactaccatctttaaaaattatttttcgtaaatatacacataaacataaaggataataaaatttatacacaacaacaattagtttgttcataaaaggccaaataatgaaaaactaatcattttttaattagaaataataataataattttcaaaagaaaatgatgcttaccaataattattacaaaaatatacatcaaattagccgaaagattttaaaaaaaaccaacatttgtatccgaatgcttgaaaaattttctgaacgtgatctctcgaacaaatttcagtaagaatccttcaaaaaagctcattgatcagtgaggattttttaagttttttgggagaaaaagtttgaggattgagagggaaaatgagaagttggtttcgtatggaaggatttatataggggtcatactcgttcattaagattatgacatgttgcattcgaagaccgaaggttatttaatccaacgattaccctaagttatgcctccacaatacccaaatggtctgatgacgtcgcacattagaaaaataagaaaaacaaatgttactgtccttttgaaatcctcgtcaggacaaccaaaggtcaccatgatgtgacggtacaactcgcctgtccctcgaaaatagtatcgttgattaacaaagtgtcattgtgaaactaggggcgtgtgttatagtctaaattttttgcctagaattaagagtctagtcttgtgaaaaagagacctgtgtacttacatcccaaagaaaaattatgacatgtcaataatatggttctcgtagaatcaacctcacatgattgaaacttgcgagaaggtgaccgagacaagatttagtcgcacgctatgcccaacatagtcaaaagataagcaagaccaaaaaaagttaatactggtcatgcatatcgattatatgcgatgagcaagtacatctctcttgcgacgagtaaagactgattctttacatagggttagtccgaataactaatgcattcgacaactcgctaagaactcgcatgttgtaagttgtcaacacgaggaatatccaaatatgatgttgatcacagacaattaactttattaaggccaaagacctattatgcgagtaaaacaccacagagcctgtgagctcgcgtgacgggatatgaatggacaaactgcgacttagtaaatcgcacacgttgctgcaattaagacaagaacgaattaagttgttcttatatttattctttaaacgtttctattaattaaattgtgtaattattataataacagtcttgcctgaccaattgtataatctcaacagtcatctgctttctatataaaggggtgatccaaatctaataaattaagctgagaaaagtttactaaacagactaaactctgattgaaccgctataattttgttgtctcctttatatgtttatattttgtctatttcatagcctaaaatttgagtactcacagaattaagtgagtattcgcataactactagtaagtgttcttgtctaactagaatacttacccttttttttggtgttatttaaatttctctgataacacgtataattcaataaaaaaaaaaattatatttgtgcattaaatttgatctaaccgtataaataaataaaaaaattacttaacaaatgtataaataaaaaacagccttatatattgataactaaaactaagattgtaaaataaataaaaatattaaacatgtctccattaaggcgtggtggtatcttcttccccaacacatttaacattcaaagatataaagttatccctattcaaaatgcagggaatctccaccttattaagggtggagtacccacagactaaattttcatccataataacaataattcaaaatttagtcaactttaaatatataatgattttcaattgagagcatatatgatatacataaaaacaacaattaaataaatgcaaacttttaaaaaatttataattaataataatccacatgtgagtttttttctttcaataatcaggcaaaccaacaaaacataattatttatgacattattatttatttattaattagtggataatggcttaaagttatatatgattaaattatgtcatgtcctattagtacattattgattatcctcatataaaaactattaaaactagatacattaatcaattgtaactaactaatcactcccctaatcagtagttaggttgggataatcaattaatcatatataacacattaaaatataaaccataatataattcattattatttgctattttagtatataaactagctaattacatatgaaaaatcacattaaaattaactaaatacttatttttttgttggtgattatcaacatcaacatggatgccatggaagttgagattttatcaagagaatttgtaaaaccatcaaatccaactcctgatcatcttagagattataagctatgtctgttggatcagttcatacctgaaatgcattgtgcacttacccttttctactctgcttccgattcccaattccttcaatctgatcaagacgacaacaaaaactattgtcgtattctcaagaaatcgttatcagacaccttaacggatttttatccaatcgcagggcgattcaaagactcgtcaactatcgattgcaacgactgtggagcttgtgtcgttgaagctagaatcaactccaacctctctgattttctcactactgttaatcagagtaaagatattcaaacaattttggggaaatcgattcccattttggattcagaaaccatggaattagcttctaaatgtatgttgatcgctcaaatcactgtattcaattgcggtggagtttcaatcagcttctgcctcgagcatcgattctgcgatttcgcttccgtcatggtttttctcaagagctggagcgccagagccagaagcggcggcggctccggagaaattgtgctccccgatttcgtcggatctaagtttcttccaccccaaaacatgcctcccctaccaccaccaccacatcaaaacgcgattcaaaatcggaaaatcacgaggctcatcttcgaatcatcaaaaatctctgctctcaaatcgaaatatctcgcagaaagctcctcagatcatcagaacaagaaaatctccggcgtcgaagttgttgtaggtctaatcgtgaaatcggcgatctccgctactcaatcaacaaaatctctgctactccaagtggtgaagttacggatgagtgggactacggagccgccattgtcggagaatgcgatggggaatttcgcatggttggttccggtgatgataaacaaggaagaagaaaatcatgagttaataacaagcaatatcaagagagaaacgacgtcgtttatggacgaaaaggtaaagaggaaaataaaaggagacgaagaagggattggagaggtttttaagttggcgaaagagagaggtgagattatgaggagtgttgctaacgtggacacttactggtgttctacttggtgcggttctggggttttcgggtggggcaacccgggtttgggtgagcagtggattcgtttcgcctgttaacttgattataattgaggataccaagtgtggtgaggggattcaagcttgggtttctttggaccaaaatgttatggcaatatttgaacaagaccatgagttattgtcgtttgcttcgttaaatcctactattaattaattaaaacgacaggagatttgggtgtcgttttttgtcttatgagatggattttggtgtcgcttgtgtgagcaaagccacagatggagaattgaggactattctattgtcgtttactttctagttctccagttggtgtccttttcttatttaaagtttaaagttaaaccaagtgtgggagtggtttataaagttaaaccaaaaccaaaagttatgttatggccattttttttttattttaagtaccattttatttgatcagaaaaaaaaagcaccataatagaaaaagatgaaacatctcttttatttaataaaacccattatttttcttaaatgcatgtttaatcaattaatgagccgcaacatagaacaaaataccaaaaaaaaaattacataataaaaattttaatgtctaaaaaattaaaaacactaaagccaaaaaaacaccaaataaataaaatttaataaactttacaacaaaaatattaaaatatatatatatatattatatatgtag

SEQ ID NO: 186702 - DNA, 899 bp, Cannabis indica
gaaaaaggggtttacaagtggatgaaaacagtataattaggtgcataattttaatgttttatcatagactaacacaggttacataaacaaacgtaatattgatgagatactaatgagctcaaaattcaaatgttatgatctttgcatatgtcattacttccaaactaccttatcgactttgttcccaactagtattttgatgcaattcggattagtggagtagagctctacctcctttgcccatgtattcgataagtttgtgaaggtttctcgccttgtgacatcataaactgcacgccaaatattaaaaccatgtttattttcttaagttcatgattaatattagaaacaattatgcatatgaagcagattacaaaacaatgataagatcaccaccacaataaagttggaaataatttattgataatacagtaaagggtttccattttaaacttagctcacaacaatctccaatatcgatgtatcctgccattattgcagaacaatttggtctagaattcatgagcagtataaaaatattggatcagtgtaaatgaagttgcatacttgcaattgcataccaagaattattccatgcgcacctctgtaataagagcttattactgtgccaaacctctcttgtcccgctacatatacaaaattcaagttaaaaatgaagaaaatatataaatatatgtgtatggaaagatcagagaactcttttgtgaagtagttcctcaattatatgttactattaccaacctgtgtcccaaattgtaagcttcaatcttttcccaccgactgataataatttgatcttgaaatcaacacctgaatatcattaaaccttagctctaaacaaatgattgccaaggaattatgattaatatatatatata

SEQ ID NO: 186703 - DNA, 2377 bp, Cannabis indica
agatcaataacattgagataagcacacaatgtgaggctgaggtggggattggtccctcggagccgattggaggagaggttaagtacagcaaggttgaccaagtactgaaggtccgaagggattggtccggtgagaaaatttgaagagaggtcaagggcttggagatttgtacattggcgagaaacggcgagattgagcctcgtaatgagaggttagtgagtgagagcttatagattcggccattgttgcaggtggctccttgtaggtaagaggtgaaaccgctacaagggttagcaaaggtggatttggtccagttcttgagagacccagttgggtctgtatcgattgacttaaatgggtcaaacatgcttcgtcgctcggatctgatgagctcaatcttacggcggcgcaggctaataagcttaccatcagcactgtcaaaggacccatcatcaactttctacaaaaaaaaaaaaaaaaactttttcttttcttctttcaaaaatctagttttccaagaaaaccagaaaaacaaacaagaacaaaatgaaagaaagaaaaaaatgggttcccaaaattatttcctcttcttcattaaccgaaaacacagagcagaaccgattagattgaggtttccccaaaagggtcctctagtctggtttagcaataaataaagatcaggtaataaaaaaaatatgtgcatatatataaatttggggcctggaatgaaactatactctgttttttatataggcccagaaaaataaaagaataataataataataacaaataaataaataaaatatttctagctgttggggttgaagacgtggttatactccgagagagagagagtggaggggcactaagttggagtagtgtgggggaattggtgaaaacgaaagtactgtagacacgagtgagtcttggggttggggggtgacctgcgcacacgaaaggcacaagaaagcgaccttacgcctcagggtattttggtcatttcacctccagcttctgtccatttgtcactaattgatatgttaactgttaaaggaaattaaactctaattaagacttctcagagaaaaggaaaaaaaaggacactcattcattgtatatttaattacaaatacaacggaaggaaataaaaatgaaaaatccgtaaatccttaataattttttggctaaatattattttagactccgtaatttataaaattactgatccgactttctattttgttaaatgacgaaatgattctgtattttagacaattcttaacacgaacatatataaaaaatataaactattttgtcataacatatttagacacaagatcttatttgtactatattggaaaacacaggatctattttatcatttaacaaaacagaaaatctaattaataacttttgtaaaacatttaaaatactatctacccttaattttctcaaatatatattttccaaaaaattactaacaagtgacaatcccccttaatatggacatcaagtattcaagtaatacttgcttacaaaaacaaatagatgaatacattataaatttatagtgtaaggtttttattataacagttaacaaacataatttttaggcatccattaccaacataatttttaatatttatattttaaaaaatcatttccagttgttattaatgtccttaaatagagcacagatccgtttccgtatttaagttgtacaaatagtacactttcttaagaaatagaaataataataacttagggtttacaggagcaattaatgttaaaatttatgaacatcttctccaaggattgggccaaatcttgagttgaagtaatcaacccaactcaattacttcgcaaataaaaataaaaaaaaactcaactcaattcttttttatttctatgctttgttgccatcaaaacgttgatgcttcatttttatcttcatttaagagaattcactatgcaccttcattattgaagtaaacattatacattacatgacatttaatttaagagaaatgaaaatataagaataagagtgagaataaaaataaaaatagaaatagaacaaaatataatttaaagtgcataataaaaattgataaaataaaaataaatagtagcataagtactcaaagttttaaatttgcaaatgacataaatacaatatttaagttttaaatttgcaaatgacataaatacaatatttatttttagcggcataagtacccaatgtttataaaactgtaaaattcctccagttttgtcagactttgttttgaatttattaaaataacatttggaagtaattgatactacatgtttttgtttagacacaataatctagagtttagatataacttatat

SEQ ID NO: 186704 - DNA, 2830 bp, Cannabis indica
ttacaataattaaaaacagaattataatatattctaaccaaaaaaaaaaaaaattggtgaaaagaaactcctagatccacatctattccccaaagcaagtccctttatgatatacatatctgtggagaatggtccaagtatgagacatttctccattactgaacatttttcaaaggcatatatataaagtaaagcaaaccggtagggttacccattcaataagcaaaaaagcatatgtataaaaagaaccaaagatcattttgcttatctccttagaccatttgaatagttgttcgatcgataaatttcattgtcactcaaaaagaaaatggttacgaatacgaaactacatcagaatatccatttatgatatgctcttataaaataagtggctctacgtacttttatttctatctttttaggagtaaagtggctgtgacacttcattgaataaagttggaaatttaagaaataaaaaacaattggttcaaaagtcacacaaatgacattattttaatagaaagcatagtatggagtagaaaagattcaaaatatattattatgtccatataacataattcaaccgtaacaattataataatatacaatacaacaacaatactttaattcttacaggtctaatcacaaaactttttcaaaaataaatgaaaaaagtgaagccaacaaaaacaccaaaaagattctttgtaagggaagctatctataattttttttttcttctccgaaggtacataggaggtaatatgagccgtttcacatgatagcacaagcggcagggttttcatcactgaaagcagtagtgtatcgcacctcggtggagctcgcacgtgccagctgtgccacctgtgggtcataggtatttcgcacgtacccggagggggctttcttgtcgtaaaccccaggcgcgtaggggtgctcaacgacgtcgtatggtacgtaaggccagatctcagccttcttacccgtccgatgagccacgcgggccacaaccttggagggctccacatatccaacgactgtgagcttgttagccttgcgctctacgtccacggatttcacacccttcattccctccactgctcgtttcacttttctctcgcatccttcgcagtcgattcttactttcacctccaccgtctgaccacaataaaaaaagcagatttattacacgtggcagtgcaaacaagacaatgtgaacgtgattaggtccctccttatatttcattggccaataggagtccgacaaataatcatgtgaaaacatagcacgaaattttgctgggttccacccaacccgggtttatgattgtttgtactttttttttaaatgacctaataataaattacaataaaaaaacaaaaaaaaatggtttccttcgtagattttaatactaatttacatttgaatatagctgtttttggaggtacactacgaatttttttctttttaatcattagttaaatgatctggaaaaacaacctgggtttttgtttgagtactagaggaataagggctctaaattcagaaacctctgtcatgaacagacagaaccaagtactacggacacagatgggatgtatatcccatataagaaacactttgttttgctcataataaatttgggaaagaaatatactaatcataactattaagtacatagttacacagagacaaatattttactattttgcagatcacttaaatccagttcataataatcaatttcagcaatatttaattaggtcagcatatatattgagacgtaacacaaaaaccctagctagcttataacacaattagctgatctgaaacaattcagaagtgtagatattataaaatagaaaacatcatatataaattctcaaagaaatatatgatgaaactaatgatgcataaacgcgcgcacacacatatatatatatatatatgtgtgtgtgtgttgagctgtataaaatacctgtaactgcttccgtttcttgtacttggaacttccatgagaacaatcaaagacatgagagatatgatctaaaacccccattatcactagattaattgagctaataaaatatacaccaacaaaaaaagaaggaatatgtcaagagctttgtaatttagagagagatatataatatgattgaatggttgaacttaactcattatgagagggtccaacactcctttatatataaataaaaacaaaaaacaatctacattaataaacaacgggtgagtaaactcctttataaatctgggtcgtccgtttcatttaagtcaattaaaaaatgattataagctcgtcaacttaacagtcttttcagctagaatgcagccacgtgtcctcgttacgtaagcgcggttacaagaccaatactctctcaatcctcattccacgacgttattatccatgaaagactctgcaccgaccggtgtggtcccccccaagaccctacaccgtttgggcgggtgaggatggggttttgtggtaagttgtggagtgattgtcgttttaataatgagaaatgggataagtaatggtgtgggacccattcaaatgtaagggcccactgctcggtgttgggctttcattctttggataagggggagcgtgctgccacggccttttttcttttctttaacgtttctaaaatgcctaataagggaaattttcatttatacccgaatagtccaataaatttacaaaaatatattgggctggcctattaaaattttatacagcccaaataaaacttattatggaaaggaatacgatacaaaatgaccataattttaaaagggaaattttcatgg

SEQ ID NO: 186705 - DNA, 3604 bp, Cannabis indica
aatctctgtagcactaagaacaataggttgtgatatacttggagcatgattcaaatgttcactaatctggtcttttttctcaaagtcatcatccttataattattataaatagttagaactcgagttgttgaatttgaataattgacactcatatagcaattagaaatgcaaagatgaaactttataaaaagcatgtaacttaaaacttcttaagccattatcttttatataagaagtacaaaactaaaatccaaatgaaaacaacaaggagcccataataccacgactctctaagaaatgaaacaaatgggaaaaatatcacaaaaaagaaagttaaaacaagtaaaacttcatagtcttcaaccttctgcaagattcttgaccaaattaatcttgaaaaaataacaaagaggctgcaatattgacattgtcatcagcagaatcacaatctatccaagtctgaagccaacatttcgtccaattacaattgcatttataaaagataaatttatttttacaagagaaaaacacattaatttaacttgcacatactcatatagcagaagaaataacacagagacaaactaccccttacaaacaactacgtagatactcactcagtttctaatcatcatctccctcagtcttgttctagagatgtaaacaaaccacgctagccgcgtccttgggatcaacatctccccaatagaaactccaataacaagcccactcacaagtcctgccaaaataaatttccaatcgagttcaatcccagaatcagaatcatcatcttgattggaagcagatggtggaagcagtgagtcttggcatttcttcgacagtggttctccccacaatccttgattaccctcaaaggagttgttctcaaacgtatggaattggttctcttgcggtataagacctgtgagattgttgtaagacacatcaaacttctggaggaattttagatcagttagttggtgaggaatctttcctgatagctggttttgagaaaggtctaacgactccaactctgttagtgtccccaacgatggtggaatgtgtccggtgagcgcattgtttgagaggttgagtgagtatagagccttgaggcttccaatgattttaggaatctgaccactgaaattgttgctcgataggtcaatgacagctaagttaattggaattttcccatagtttgttgccacacttttcatcacaaatgttgttgaataatcatactcattgagttcatcaaaaagaagatcttcgtaataggttatattttctagtgctttcatgtatgtcaaattactcatcttgaaatttttcattgcattccaagataacatatattcggaaggcaatgcccccttgaaataattgttagacatatcaatgatttgtagcattggaaactcactcgtattgttttgagatttttttataactccatgaaatttgttttcccttatcaaaataacttttaatcgagggaaactccccaaccaggtgggaaactcatcactgagttgattgaatgagaaatcaacatactcaagattcatacaagtagtgaatggttgtggaagttttccttgaaaatgattgtgactgaaatctaccattctcaactcacttttctgttgacattgaagaggaatggtgccgtgaaaagagttgtttctcaaattcaaaactaagatggagtcactaatcccactgtccgaacaaagtggaaattctccgctcaagttattatttgacaactcgagaaccaaaatagaactcaaattacatatagatgaggaaatttggccgcttagaatattgttagagacatcataatgtatgatagatgatggtggaataggaagctctccttgcaacaagttagattgcatgtagaaggtaagcaaattagaccaaggtagaatggttgtgtagttatgaaaccctgttatcaagttgttggataaatctatctctttcatgctttgaagacttgagttcatcagatcctttggaatttggccatgtatatggttatgagaaaggtccaaaaataagattattttgatgaacaataaattcaggaaatttgctcaacttacacgaagccaatgatagaaactcaagattagaaaatgtggagttaggctctctttttctttcttcaatgagtaatgatgaaatcatattgtactccagatttagaaaagtgagatttttcaatttgagaaaagaatcaaactttaatgtaccacttaaactgtttcttgagagatcaagatatctaagaattttgagattggacaatgcttgtggaactgaaccagtcaacttgtttgaagataagtccatagattttaattcagtaagatttccaaaccacgaagagatgggtccagaaatttgattgtttcttaatgatatagtggaaagtagggtgaggttttgaaaagaagatgggatgtaacctgtgaaactattatttttgagatatatagagttaagttggcttagtttacctattgaagatggaataggcccatacaatccacaactcagcaactcaagcagtgtcaaagaagtagacaagtttgctaaggaatcaccaagttcatacctcatctccacataatttagtgcaaaagtactcaagctagttaagtttttcaccaatcttcgaagattcgtttttttaagtttcaaactcggaagtggttggtagttggcatcaacgttacctgacaagtaaaggtaagacaacttagacaaaagtgaaatttcagatggaatctcaccttggaagaaagaataacccaagtgaagaaatgtcaactctgaaaatattgctatggttgtgggaattgaagagaaagtgaagttattatagccaagacgaagtttttgaagatgaacaaggtgaaagagagtgttgttggagtggatagagccgtagagacaagaacgagtgaggtttaggccaatgacatgaccagtcaccatgtcacattcaacaccatcccatgagcagcaattggtgccatttgagccccatgttgatgtctttggatacacagaaatagggtgatgtagtgtattgaatctaggttggcaatctattttaaagctttggttgaagtggatcaaagcacttctctcttcatcatggcaaaaaggctgcacagaattaacaaaaggatgatgattagagagtagtaggagaggatgaaacaacaaaacaagtttgaaaaacatcacaactaatgatgacataagagccatatagctagtagtgtttcttttctaacttagttatgtgatatgttggaacgtagagatatcttatctccatttataggcagaaatgtgtagatgatgttatgtccatttattcaattttgatgtgtatattagtggcatagctcaaataattgaccaatttgacacttgactatatataatgcctctatctacattagtaggagagcaaaagtactttatatggaaaaaagactatatatatacacgtgcatggaaatgtataaacggttgatgataaaaatcaaactatatgttccatttgaaaaaaaaaaa

SEQ ID NO: 186706 - DNA, 6250 bp, Cannabis indica
ttttttcagaaataattaaaatttctcatatctctcaaaaaaaaaaagtccttatatataataaaaatcccaagagcaataaattgtaataaaacagcataatactataaacataaattgtaataaatcagcataaatcagcataaattgtaatattccctaatattaatgcgtataattcaaaatcagcattgattaggtaataaattactataaacatatagtgaagtcaataaactaatactgaaatcatataaaattaagttaataatcccatgggataatctattttcaaaagtacactagataaacactaacaaatttgaatattgttatgagccactgttttttataggttagagcattttcaacagtaataattttttttaaaaaagaggtaacctaaaaaaactaacacactacaaaggaataggcttgtcaaaatccacaagatatcaaacgattaagggagcacccctattccaactagccgaagttttggacttcaaagccaacttagctaaactatgagcaagaaggttcgcatctctaagctcaaaacgaaactcaaccaaatcaaagttacaactcaaaccagtaatttcttctagcaagttatcaacatcactaatgctcctacttgggttgtttataagattgatagcatttaaacaatccgaagctacccgatttttctttacaccagcagcaagagcaagcttcagaccactaatgacagcaaccgattccgcaggcagggcactcaaaggacgggaagaaaacccagatgaagagcagagcacctgcccatagtggtccctaataaccacaccagaactacagcttccattcatattgtagacccctgcatccacattcactttccagacccccacctggggcggactccacctgctcttttccttagtttttccttgaatagtgtactgatcttggagatccacagcaactaaaatacaccagtccaccaccccacaagcaggcatacaaaagcctgtcgtgcatccaagcattcctttcattccaacattgccaagacaagattgcaaacaatgagaagtctgacggagataactggttcatacagctttccacaaactcccaagggtcctgagttctaacttgtttaaagattttccaaaaatcgcttcttttccagattgggaagaccgcttcacatctccaaagagcgtgaataattctttcattatggagatcaccacacctattgtagctgggattagaagaagttttcctgcaaaacaaaacactattagcgggaagccaagagtggctaactctccaaagaaaatgtttgactttttgaggcacacgtaatttccaaatatgattccaatacgactcaattcctttcatgttcgatgcttcagctttaagaattaaattagatgctaacttgtaccttctcttgatactatactccccattcttagagtagtgccacatgatttcatcgtccacctccttattactagtggccaaagaaaggataagattaacatcatctgaatggaagttggattggataaatttctcatcccaatccccatcccaattcttcaagtcaatgacatgcattccttcgggaatatttggcttttcaatcaatttaaggttcacaagcctcggaatccaaggatcttcaaccactcgaatgtcattaccactcccaactctctatcgaaatccttttaggataatttctcttccccataaaagacttgtccacacccacgaggctttggaacctttggccgcatcaagaatagaataattgggaaaatatgaggccttgagcacatgactacaaagggaaaagagattccgaatgattctccagacttgcttagcgaggagagctttattgaacagccccaaactcctaaatcctaaaccatccctttcctttggaagacaaagtctgtcttacgtacaccaatgaatcttattattcttttcactagaaccccataaaaactgagccagcattttatgaaaactattaaaagtattttttgggagtctaaagcacatcatacagtaattcaaaattgactgggtcaccgctttaataaggacctccttacccgccaccgagaaaaaggacattttccaatcttttaacttgttccaaactctgttcttgatatactcaaacacttctttcttctttcttcccacaaacgaagggagaccaagataaaaaccttgattgtccaccattttgactcccaaaatcctagccaagaccaatcttctttctctaggcacattcttaccaaaagataggtcaaacttttggaaattaaccaattgcccaaaagcctccatatattggaataaaatagtcttgaagcattgacaaaactcttctttggcctccataaaaataagactatcattcgtgaagaataagtgagaaacactaatcccatttctcccaaaattaaggccctggatattaccaacactctattcattttggataaggctagaaaaagcctcagcacaaaacaaaaaaatgaaaggagataaaggatttccttaccttaaacctctctcaagataaactttgccttaaatttccccattaatcaaaaaagagtaagagatcaacgaaatgcaattcataatcttctccacccatcttctatcatagcccatcttcaacattacatcctcaatgaaaatacactccactctatcataagcctttgccatatcaagtttcaagaccatcttggatccatttctaaaattgttcttacgcatacagtaaagcccctcgaaaccaataatagcattatcatgtatcaatatattattcacaaaagcactttgggagtcagaaattacctctgggagtgtcaatctcagtctattggcgagacattttgaaatgatcttgtaagcaacattgcaaagacttataggcatgtactcctccatcttctttggcctctccactttaggaataagggcaattggtctctcattgatacttttgacaagaaagtttctatttagcaccttcaaacaagtcttagtcacatccttttccacaatgtgccaatatttctagtacaaaagacctaggggcccatccaaaccatgggctttagatgggttcagatcttaaacagcttccttcacctcatcttcagagaaatttgctagcaacatctcattcatattacttgaaatcttagcttgtattgcaccaatagccaactcaataatttcctttattggcctcatagaggagaagagttttttaaaataattttcaactatctgctccaccaatcgattatcatcttgccacactcccaggccatcttgtaaccccaaaatctcattcttttaccttctagctgaggccttatgatgaaaatattttgtatttttatctccccacttaagtcaatcagctctactcctctttttccagtattttttgtccttatccattaaacagttcaggcgcttctcctctcttttaatgtcctgccacatctctggatcatttagctctgacagcaattttaacctctctttagaattagtcaactccttctttaaccctttcttctttgccttattctaactatggagactatacccacatctactcaacttgactttcagattttctgtagagccatctgaaaggatagagttccaacttgttgtcacaatatctttacactcatcatcatcacaccatgcttcctcaaaatgaaatctcaaatttctcttaatcttaccacatttgttgtctttaataacgactccacaatccacaaccggggctctatggtctgaactacaccaatcaagactttaatcgaagccttgggaaaggagaggttccaatctttattgcaaagtcctctatcaagtctctccattattgtgcctttctcatgaccattactccaagtaagttctccttttacattgccaaaatctaataaatcacaatcatcaatacaccttctaaatctctccatggctacccaacacctcgcttaccccccccccccttttcatggttaccaattatttcattaaaagcacctatacaaagccatgctcccaccactgagtctttgatccgccgaaataacttccatgaatcatcccttaaggactggtttgggttgacataaaacccagtaaaggtccatgacaagaacccatttccagcaatggttgcaagaatatgtcctggagaagaataaattttcaccgtaattgtctccttccacataagaattaaaccacgactcctaccttgtttatcaactgcccataactcatcaaaacccagccttcgcaccacctttgctgcttgaaaattattgagcttactctccataacaaacaccaaatcagggttactctacctaacatgggatcacaacgttttgaatgtccacgagttccccaacccttgaacattccaacttatgagcttcattattctcgacggccttgacaatcaaggcttgccgcttcagaataagagagggaagggcaatcaaaaccattagaaaaacccatcccgaaaggaactttaacttcctccacccctttatccactttttccccccatgaaaggagttgatacttgtttttccttcttcagttgtgcccttaggcacttcttttcgtcttttttgtccttcctccctagcgatcttcttaattgagattctttttcttgtttttggattcgtttctctgctaacacttcttcttccctcaacaaaaccactattgacgattttggtaagctcctcattgtatctgtactcttcaaaagatcgtactccatcctccttcgacccagcaccttgagtttcccctgtcactttcctctttttctccctcgatattttagtccccttctcaatcgtctcagtcgttatctgattgagcatttgtcgtttttttgtttcttctaaatcaaaggcatacgacaatttactactctcacccattacccctgccacctcagcaattctacccccttcctttttcttatccacctcatcttctttatctccttttttcccactcaatgccacctcatcttttcttttcctttcatctattaattctcctaccccttcctcttttcttttacttcccgttacactagccaccttaattcgactccactccccaaggattgattttgtactctaatgggccagcttattattagccaccttttcacgaatcgtatatgctcccactctttcctagttatcatgcccaatattttttgaaataatgttcatcgttattcccacctttagcttcaacaactcttcgatcctctccccttcccgtactccgacgaccctccgactcccttcttcccatccccgccttagactgggtttccaactccgcatccaatctttgatcatctaaatccacctctcccttcctattattatcaaaacaatgtttgaccacattattctctgcatttaaccagtcaccataaagctgcactatttcaccgttgccaactttttccgtcacaactttttttctgtagtccttctgatcataccccaaatcccacacctatagtagagcaatggaattttctcaaatttgaagtatatccaatgcttcctcccctcgaactttatgtgctttccaaccataatacttctattcactggaaacgcaactaacatccgagcagtaccactaaaagccacatacaattattattcttccaggtaacttctatcacatccccttccattcctcctattctatgcacattgctttcattgaaagctttcataggaaaaccagccaccttaatccacacgggactgcattcaaagcagcatcttcccattgtccactttctggccactcttccaagatcattaaccctcccttaaatcgccatgggagggtgctctttacctcacataatccttttcacagccaaaggaaaagcctgcatacgtactgcatttatcatgtttatacaccttcacctcccatttttcgtctgtcttccacatcctactgaacaccgtactaataaagttcacattgcatcttttctttgaaaacattcttccaatcaatgataatttcccaaaaccagagaccatattgtcgtcaacgatccattgatcatctttttcgtctgagtcttccttctcct

SEQ ID NO: 186707 - DNA, 3171 bp, Cannabis indica
cattgctctgaagtttttacataagctttggaagtgtgtcacataagtcagatgtttacagttatggaatgattgttttagaaatgattggaggaagaaaaaatgttaatatccaagctaataatacaagtgagatatatttcccacattggatatatactcgtcttgagatagatgaggatattggattgaagagaattgttaatgaagaagatagtgtgaaagtgaagaagatgataatagtaagtttgtggtgtattcaaaccaatccttcaaatcgaccagctatgagtcgagttattgaaatgttggaagggagtgttgattgtttggaaattccacccaaaccattcttgtattcacctccaagatcaccacccctacgaatcttctcaaacatttgtataattgtaaatatttgtatccacctcatggatctcatcactcatatatattgtaatgcattatataagcaagccatttgtgatcattatcatatcaccttcttgagttaaaagacaggaaagttgaaaatcattcttaaattaattatccacactggcactctataataattacagtttttcatatcaatattgaaatgacaaataagttacctagaattttccctataatcacatcacatctctcaatcaagagactattagaaatagttctatatttacaaaaataatacagtatataagataatgatgaactattcttctcagagacaattaactttgcgatggaacatgcattttacactttttaaattctaacacggtattagaacaattaaaagcatcaattgtcttcgcctttaatctctatttatttcggcctatgtgtactagtttctaatattgtagtctttgacttattttgaaaaaatccacaaattttcggacatgtacacttacaaattctaccaatttagcctgtgtattagaaatagtcccacattattgatatgtagaaaaataatactatatataagatgaatgagttactcatttcattgtcaattaatttttacatgaaactcatacaccttatcataaattcaaacaaagactcctataaaaaatatacttttaaaaaatacataaaatattttagtaatttttaaaaatatcacatattctcaataataatttatagccacgaacattttagtcacaacataagaataacaatttataattagtcacaacgtttcacttttagtcacaaattttattgtgactagaggtaaaaaaaaattatagtgtgagtactcctgtagttacctaaatatatatatttggttaggttttcctatatttttttaactttttgttaatttttttttataagataatttttttgaaaaataaaagtaaattttttgcagagataatataaaaacataaaatttatagttttctcttatatatatgcctgtaaaataactttctgtcatattatgggacgaaatgttttaattctatttctaaattataacgaatgaatttaaaattagaactaattaaaggatcgtagattaaataaaagggactgaaatttaatttatatattgttgaaggacaaatgtctcaactctcaagcacaccaaatccccattagagtatataaattatattaatagggaaattaaagcatatatacctatacccaacaatatgaatattagtccttaatattaattaaattaatcaaagttaatttttttaattaattaaagttaatgattcaaaggggttttgttaataattaatattatgtgacgtgtgctaagattagagacatgcatgcatgcacggtgtgtgaagcaaacctagtaagtaagccattcttttctttgttatgttatgattatgactttcttggctttcaagtttagaatttaattggtttcatatataaactactatcatccatattaattgtcttataattatttgacaaaataaattaaacacacacatatatatatatatataataatcatgtataataataacaataataataatgattcaatatcatctgattctgatattgatcatcatcttcatcgtgatcagattggtccccatacaaaaccagttaggttatatggtcgtggaaggtctcttcatgccacctttggaggaggaaaaggtattaattgtttttcttcatgaaataattctatatactatatagtttttatatataataaattaattaaacactacttttttttttctttttgttttgaatggccaactagctaccatagaatttaattcatgaccaaaaattcaataagttctctaataataataataaagaaccaatttataatataatttgttttggaatcctctattaaattgtgtagagcttaattttttatagttctttgattttataaagttttgacacagccttttgttttaattttggccccattttttgttataaatgccactttttttatttacaagaaaccttaaactttttaaaatatcatattttattggggaatataggttattcacttacccattatcaaatgagtaactagttaccttatattatttttccatattttttaatttttttaaattttcccacaaaataactatttaaaaatttacatttttacacaaattatataaaaattcattaaatatgtaattttcactattttaactaatttagaaatcaagactacttacatatacaatgcattattttttggtgttacataaaaacaaatattcctaaaagaagggtataataattttagataatatttgagaattaatattaattattgttaatatataaattaatgcagttgctgatgtgttgttatggaggaataagaaagtatctggtgcaatattagctgggttaacaactatatggtttcttttcgaagtagctgagttccatttagttactcttctctcttatattcttcttttcacaatggtaaccatatgcctttggtttcgagcagcatggctattcaataggtattattatataaatacatacatcttttctttacatattagttaaaaaatcttacaatgtaacatttaagaatatttaattcaagaatgggttcagtttaaaatttagtaggttataaaagaaaatatttagaaaaaa

SEQ ID NO: 186708 - DNA, 3725 bp, Cannabis indica
ttagtgcctcaaagcaatgctttaataaaatatattgcaatgtttacagaacgatacaaattattttggtgctcttgttggacgagttgctaaccgaattggaggtgccaaatttacactaaatgggcatacgtacaaactagttgctaatgaaaagaaaaacatactccatggtaagtttcttacatcgatttcttgagacgaatctgtttagtaccagattttagcttgttgaagatgttaaaacttcatttaggtgggaaagtaggatttagtgatgttgcttggaaagtgaaaagttaccaaaacaaaggtcttgctcctcacattgtgttcacctatcacagtcgtgatggcgaacaaggtaaaaccgccttttcttttcactagttgtgctaatctaactacctatactttgacactaaagattgagattgataaaagtaatgtaattatttatttttacaggctttcctggtgatgtactggtcactgctacctacactctatttgggcacggaaaattggctgtgatcatgacagcaaaggctctaaacaagcctacaccggtgaatcttgctcagcatacctattggaaccttggtggtcacaccagtggcgatatcctttccaatgacatccaaatcttcggttcccaaatcactcctgtggacgatgagctcattccaaccgggaaaattcaatctgtgaaaggaacaccattcgatttcttgaaaccgcatcctgttggaaccaaaatcaaggagctacctaagggctatgacatcaactatgtcctcgacggtgtccccgagggaaaagaattgaaaagagtggctgttgtgtatgacaaaaagtcgggaaggtctatggatctttcaacaaataagcctggtgttcagttctacacaggtaacaacatcaaggatattaagggtaaaggtggatttgtgtatcaaagtcatgctgctctttgtttggagactcaagcatttcctgattctgtgaatcaccccaattttccttcaactattatcagtcccgaagagccttacaaacatgttatgctctttaagttttcaaccaaagatcgtcctaacttttcaagtgtttgatttagaattatcatatctttttatgaacccccttgaattacaataacgatttgcattttgtaatcaagagattgtgtaaaatctaggatcaaaggaatgaataaataatgtgaaatggagaactttacattataatgattgttcctaattatgagtaactttaatactcatgtagtgtttgttttattactaatactaatgcatagagaaatgctaaaggacacctatgatattttagtgctctatagcaatgctactaatatgcacagttgcacacatgcatgttaaatatgagcaatcaatccttttcttctcattagaaaaatgctaaaagataccactagtgtttaatattctcttcactattatacggttattagtgttttatataatttaagaaagaatagactaagaatgcttttgaaaaataataaaaagtagatactttttttgactgttttgtaaaattattgattagattatttgctttgttaaatgataattttgactctttattctttaaaatagtacaaaataaatcatgaatttaacatttgtcaaattaaaatttgatataatcaaaagtgttatacaagaataattatatttctgtactaaaaaataattttagattagttatatcaagaaaaacatttaattctaggtctattttcattttgtgtcactttgaaaaccacagcgtctgaattgttattaaaacccagctattaaattctgattgcctacaaaaactgtagactcagactcaccggaaaacagtaggcaaataaacgacatgataaatgtcgttagttaattatcgtttacttcaaaacgacgtgaagtttttcacttaaaataatgtcgtttgcaattgtcacgcactattaacagatttcaagaggtaaaaacagacaaaaacagagaaatggctctgctgaattcagcttctttgttgggcatccccactaaactccccaccttcttcaccacccctaaaggttttccctttcgccttataaattcttaagaatgaatttatttattttattaaaacatcaaagcttcgtattcctatttgtttacattgattaatattcgcagataaatggaacatttgcagattgatttctcctcaaactcgttcatttctcactagttgtagtgttaagacaacccttttgggtgaagactctggcgctgtaatgggtcctcatacgacgtcgttttcggggtcgtacgggcaatccaagagggtgtggatatggactgagaacaaggaggttatgacggccgccgtggagagaggatggaacacttttctcttttcttctcaaagtcgagaacttgccgatgagtggtcttgtaagcttaatacccagttggagatttttgctaaaatgttttgtagaggcacgaattcaagtttttaaattctaaattatggcagcaattgcagttatatctcctctatatattgaagagggaggggtttttgataaggagaagagaagagttggatctgtatttaagatttctaatccaggagagttggaactacttcaacctgaaaatgggttggcaaagaatgttgttgttgatttactagattggcaggtacctggttttaggtaacaagtattttacatttaaagattgatatgctctatagtggtttctatggagttattcatttagatttagagaatcatgttaggcgttgttaaccttaatgtaatgcaaaaattttgtatagaagtttcatcttttgcctttgaacattaattacattactttgtcaagtttcaacattttatttaatggtgttatcgatttaatagagctttctaaattctttaaacttgaattgggtttgacacactgttaatttttttacaccttcctctgtttttgcgcgagcaattgtaagaaaatgcaaatattgtaacgccactttcacctgtctagtctcatacctacataatatacactggtacgtaactttaactgcttcctgaaatgcaaatagtcttacaaaccaacatgagtcttaacagctcattttgagattactccatgcttaattttggagttcttaagtgatgagctattaaaaaaaaatgtatcttattgatataggtagtactcatcaattcatttaagttctcttcaactgtgtagtcctataggtacacaattttagaatcatcacacttgacctttcctaaacgatgtgagattgcacaacttactccctcttttcccttacagatcacgagattctgaccgtcacacaaatatttagtgttttgtggaatgacaacattaaggaaactgtcaaggcagaatatttcatgacaaagattttagtttactatgctgcagcacgataatatgaaccttctgtcaatgtctttcttttttaactaaagttttgaaatttattttctgattttgtttctttaggtaattcctgcagagaatattgttgcagcatttcaaggaagtgaaaaaacagtctttgcaatctcaaaaacattttctgaagcacaactcttccttgaggtatataaccaatgtgcttgatcagggtatgagttgaggctcaca

SEQ ID NO: 186709 - DNA, 1575 bp, Cannabis indica
atatcatagtgagaagagagagaggtagtacgtattggtatttaatcttaattaaacatatatattctacttaatcatctaatacccgttatcaattaatttattatagacatatatatattgcaattttgttataaatccaaatattatcgatatatatctatatacgatacctgcagacagcatattaattatatatatatttccgtgcctccaattctctcaattaaatataccatatataatggcatacgtatacattataattatactacatgatctcaccatggtttccgtattaattaaaaagtatttaagaaacactagcatgcactgatgtttattttagtgatgactttaaatatggttattgatagtgatttttagttacgaaacatcagtgaagacaagattatatagtgacgagatgtcgccattgatatgctcatcagtgacaaaaaaaagtacacttcagttacgatcttttgtcctcactaatgctcttttttttttcttgtgtagtagtgttctttgaaaatatatagaataatttagggtgttaaaaaataaaaaaattaacacacttgcaaatgattatttgaactttactattttgaaaataacaaaaattaataaaatgcatggaaccggaaacaaaagtataaaatagtaaaggaaaaggaaaagtaataaattaaatatataaaagagaataagcatgataagaagaatataactatataatgtattgccaaaagtgtacttgcattgatattaattacagtagagattggaatatgatggtatatattatatgtacaagtaatatttatataactttaatattatattgaatataactatcatgtacatgttggtgaatataattatttaaaaacataataaattaattaagtataggcaattatacgatcatatttagatggagatgagtaggtagtatttgagtaatgtgtatgagtgttgtggcagaagttagcatgcatgcatgcatgaaaggccgttgcagaggaaatgtcaagcccatgcatagcctttatttattgtatatatattattcttctatcattttaattagtacttattattagtcatgaaattaattaattaagaaaacgtagtcaaatcatgaggagaggagacatagaaaaagagttttggggatttgtatttgaattttgatttgataaataggtttggttttgggggcaatcatgacgtactttgcgcaatcatcactttccctgctccttctgctcccctccccctactcctactccttatttattactcttacccacataatatataaaagtattattcattcaaatacacacattattttaatatatctttgtttgttttctctctctctctctctctcagttaagatttgtcacatttttttttttaagaaaaatactagatggttgacaatattaaaatttgtccaccataatttcatatcacagtaattaatgactttttaagtaaaaaatgtcatgtaaacattgtttttattgagcaatattttatataaaattagtcttaaaa

SEQ ID NO: 186710 - DNA, 846 bp, Cannabis indica
ttatttttttttaatatttatgctttggcaatgtgaaattgccagttgagaataacaaaaatgccagctatataaaatgtgtttcattttcatcatcacctaacatgtatttaaattattgtaccaattatggggaaatgcctaaaaattaccatatcattgattgtggtcggtttagtttcaactaattgcattgttttgaggaaacttttattaaattattgaattgaaagtagtgataattgaagaatatgcttattaaagaaaaagggttcgtataattttgactattattaagtcttcttgggtaaaaaaatgtagggagtttagttagttgaaatggttggtatgaaaataaaaaataacaatattaaaagattgacaataatggattagttgtgatgaaaaaaccaataaaatatacatttttttttgggttacttcgtttttagtcctttgatgctagtggaattagtaaaactcacaaatctaatctcactctcttaaaggaagaaatttttggaaggttcttatgatatattaactattgttaattacttattatttttcatgtccaaacaaaaaaactattgtttacctttaggttagtttcagacttataatagaaatagtgaaaatggacaatgacaatggaaaggtaattgttaaaaaaaaaagtcttaatgttatttgaaatattatattattataatgagtgttatcgttggttttctattataattttttaatcaacttctgtgctcgaaaatatataccagaatattaagggttgattggtttgtgattcaaaagttatattttctaaaaaatgtattttggaaacaa

SEQ ID NO: 186711 - DNA, 2663 bp, Cannabis indica
ttgtaactttttctttgaaggaatttgatttaacagaaaaaaatctcaaatcaatgatttgtgaataataattgaagactatctatgtgtttttttttattcttttgacaaattttagtttttaatataaaaaagttaatcatcctttcattttcaataaaaagaaaatgtgaaatttaatgcagcgttaaaaaaaataaatggaaataaaaaaagaaaacgacagtgaagaagtgaaaagagagagtgagatgagagggtttcacaaatttactcgtcactttcactgaacaacataccataacgcacattcctcctccaactcgctcattactctaaaggtaatcctttgtttgctttcccagaaaatctgccatttttatttactacttatttcttaatgctgttttcaattttcaatacctgagctgagttagcaccgactgtttgattttttttaaaaaataattatgctatatttggttactagaagatgaagatttcaatttcaagttagttaatttggattcgaattagtatccactaattagttgtgtaaggattaggttatgaatttaaatttaactagtttttcctttttgcccaaaactacaaaattacgcatttaactgttctgtatgagtatgactcttagtgagatttttttgttttgtttttcaattgtgtttgagagtgacctgacaaagtgtgctgtatatattttactgatggttggttgcattgtttttatgtgtgctctctcacttcatattggattggcaagtctcactcttgatggggtaattacatttacatcttttatagccattagacatgctttattacatatatatgtgtgtataacatacatgagcaccggcttcagcttatgaaattgactattctgatgccatgtgaaagattttatcatagaattacagttgagtcttggaagtttatcctctcagaatccttttccgatcagatagataaacttccatatcaaatatctgactcatttccacaaaaactgttttgacgactgaaaaaaatacagcttagtttgaaaattctattgtgattatgacactctttgtttgagtggatttctgtcatgtcaccattttattacatttcttttagaggaaaagtgatttttggtgtcatgtcaccattttattacatttctgttgctgatctttcataaaagaaatgaaactatttcaattgtcttaaacatgattgattgatctttcatatttgtttgaagtcattttgagtcatactaagtgaaaaaaatttatctatgagaataggatactaggatatgattatcttattattgatatccttttagtcctggtaactctacaatatttgatgggaagagaagaaaagaaaactttaacattttgttagttaggtaggcccaataaagaattaaacccccagacttagaccttatgcaagtaaattatggattgtaaaggatctcttggttttattccttgttatccatcttcttcatcagtactttggttatcacatgttgttggtgttggctcatcctacataagttatttacatgttatttgatttctctatttagatctttaattattttatttcattattctatctctttgccctgtaagagtgtggattcttcattagatttattcgcctctttaaaaatgtccacagattgagttctatgttcaaatggctgcataaagtgggtttccatttgcattgcatttacattggatattgccaaacttgctttatgaatctgagcagcatggcatacaagttttttagttgtggaatggtagttgttttacccgttttctgtcggcaagcttgcatgttaatctgatcgagcatcctaattattaaaaccaatgtacacccatccatctaatataatcattgagatccttcctacaattcttttacttggaactacttgataataggaggattaggcactttggctaacattttgcctgtatgaatgactagttctgactgactacattgtatcactttgcagcctgatatgacatggtaaaaccctagtaaattttatgacaaattagcgagttgaatcaagttgaaagaaaaatgttatattgacatcctaagcacatcttactaaagggcatggatgctgtattaaatttgacatgctgatattgtacctttattttctgttatttggaatgcagtaaatgaagtattcatctctaaagtctaaactaaattgctctaggtttatactgtgatgtatatggtttttccttgactatcaactacaatttaatcatagcatattttaatgtcttacatttttgttgggtcatattgattggtaaatttcgttttcaaattgtattcttgttgtagtttgctgttccaaccatcgttcttgatttttgcagacaccaatctcactttttggtctctagacaacaaatagaggtggggaatctattatcctttcctttttaagcaaattgtctgctgtgggcattcatgaatgaatgacataaaatggtacattcagacacaagtttaaagaaacttgaaagatcgtagacaattatttccttctttattggctgtccgattttgcaaagcccgtttggggctaacttttc

SEQ ID NO: 186712 - DNA, 1706 bp, Cannabis indica
gtttagttttttaaaataaaaatagtaaaaaaaaattacaaaaatttttaaaaataataatgaaaaaaataaaatctatggctttcctttataatatattgataaattctactctatatattgttgacttgaatgtaacttttgtttagttggaggagtttgggttgccatttgcctaactatgacattaaattggtgaaaaattagtggactaataaaaactcctaattaaataattatttagaattattttagtagttttctattattttaatcttttatgttgaagctttgttagtgttactttggtcttgactttggaattgaatagaacgttagcctctctattttcctttccaccactttattgttgattattcatcattctcaaataattatcattatcataccaaacaaaacacaatcatacaagtttggtgcaacaaaactaacttttcaaatttacaaaaacaacacaaaaaattttaattgggtgtgtttcctacaagcatgggtcaattttttatcacacgatttaagtggttatttattgcttgtaatcaaggtgttatgacataataatagcttaggcccacactaatggggtgtgggatatctttatcttgttcacaactctaacaattgcaccccttttgaagtcaaaagggcattcttttaaactcacaaccaatcaagacttgtaatccgaacacgcttttatttcatggtactccactttttatcaagacgtgattagcaccccaaattaaattaatcttgttctacacaaaagagaataaggaaaagtacaaatacaaagtagtctttaacaaattaacaaaatctctttatgtctctttctctctctctctctctcctagttgcaccaaccgtaaacaaacaaactcttgttccaaaacaaaacaaaaagagtaacaaacattctgctccattccactccattccttaaactctacgttgctttttcacattaactaaatatgacagtgaaagcattagcttccttgaaatccaagcttcttaaaccatgcaggaaactctttccaagcttcaaattcatcaaacttaagaaacccgtctttataaggcctcttaattatcgtcatagaaacaacaaagccacaaaatcaccaagaaaaaggaatcgaattacttcattgctagcaacagctttcggttctagcaggaagacagaggagatgaaaagactagttcagctcaagagtttttctgacagagggtctggtgaaggaatactctttccttcgcctctcaccccggcttatctaaaggctaccaaggcagccggtaaaagggttgtttcgggtcttgatgaggacgtcgaagatgcttgcaggagtttcgagaactacttggtggagatgattgttgaggaacgaaaagtgaaggacttgatggacatagaagagcttctctattgctggaggaatcttaagtgtcctgtttttgttaatttggttagtagattttatggtgagctatgcaaggacttgttttctactgactcagatggagtttatggctcccaaaaactttgaaacacttaaccgtcttagttcttaattcaaactacacattttcctattcactaatagtatttcatcaagcttttgtatgtgctcacttttgttgtatgagaatgtgaacacacacaatatctacct

SEQ ID NO: 186713 - DNA, 2570 bp, Cannabis indica
tttggggtctggatattgtgtttttgttaatttgttttttagttgattataatagttaattctatgtcagttttacttttggctgattcatgaattattctagagtgcagatttgcgatatggttgctgttgctaagatcatgaaggcaactcttggccttccttctcttgatcacagctcatattgggctgatgagaggttggtttagtgtttctttggtggataagttgtttgggtcaatatgcatcgatacattgatcttagaaacacaacttcttcacagctgattttagcctttttagtggtattacacaagctaactatttcttattaaattttgcagtgactttaaagatctgtttgattggcggcacttcatcgagacattgaaggatgaagtccacataattgagtcactaccgcctgcctttgctggagttgagccctacttaaaaacaccaatatcttggtcaaaggtaatgcactagtgcttaggcagttactcaagtcctagctggcatgatgttatgtaacctcagtctcagacattgtttcttaccttcccctaattcccttggtgcgatgatggttagctgattcatgctcttatgttcaggttgattattataagaaagaggttcttcccttgttgaagcagcacaaagtagtttattttactcatactgattctaggcttgccaataatgacattcgagattccatacaaaaactgaggtgccgtgtcaattacaaggcactaaaatattcagctcaaattgaagaactagggacaaccttggtttctagaatgagacagagtggaagcccttaccttgctctgcatttgaggcaagtatactatttataatgatgtcaataatatatttggttcattcaagttattaagatttgtattttcttcttcatattttaggtacgagaaggatatgcttgcatttacaggttgcagtcataatttgacagtagaagaagatgatgaattgcgtagaatgcgttatgaagttagccattggaaagagaaggagattaatgggacagagagaaggttgcttggtggttgcccgttgaccccaagggagacttcacttttactcagagggcttggttttccttccaatattaggatttacttggttgccggtgaatcttatggaaatggtagtatgcaatatcttaaggacgacttccccaacatcttctctcattcgaccctagcaacagaagatgagctaagacctttcgaaaaacatcagaatatgttggctggtatagactatgtggttgctcttcagagtgatgtgtttgtatatacatacgacggcaatatggccaaggcagttcaaggacacagacgctttgagaacttcaagaagactatcaatcctgacaagtaattccaaactctatacccttttcaaagctttctagttttggtggaatgttaatgttctagttatatgtttacttcggtactctattttcatgtgctgattaaaactttgttgctgctgcaggatgaattttgtgaaacttgttgatcagttggatgaaggaaaaatatcttggaagaaattcagttcgaaagtgaagaagcttcatatagacagagatggatctccatattggagagaagctggagagtttccaaagctggaggaaagtttttatgcaaatccattgccgggatgtatttgtgaaacagggtaagataaattaagagtttctttctcattcatggtacgcgtttaagctgcaagcaatgtctgcattcggtttagacataaggacatgccaatttcccaaactgaggccactgcacggttgtggtataagaaaaaagagccttgaagcctgtggaaattaatacaagaaagtttaaagacattccaaccaaaattgtaagccatcacatcttattctcagtagatacgactacaaacaaagtaaacagttataccaaccaagaatagaatcacttctctatactaaaccacatttttattatgacaatattctttttgcctactttttttttctttctattttatatttttgtggagaggaattgtagaatgtagtgaatttattggatctggaaatactgaggggagtaccaggtgtgatactgatgtaatgtacaactacacaacaatcctggggaatgctctttatggcaatgaaatatcaaaattttactgtcaaagttgtgaaggtatctgtttagtgtttagaagtattttacttctcattgaatgaatttgtattaatatgtttttaagagataaatattgagccgattaagaagaaagaaattgaattgttctactttagagggaaatgtctgttggtacttggtagtcctctaaagatacctcctagtcttggagttggatgaacattgtaaaggtaaaataatggggactacataataaaaagtgatagtgatctctattcaaaattatgtataactaaatttaagtccatattcttatgtgtaaaaggtgtccatattctccgaatattcattgaattttgacatatactaaat

SEQ ID NO: 186714 - DNA, 1692 bp, Cannabis indica
tataattatatttacatatattaaaaattattatataattataaatattagaaaagtaaaaaaatatattaattataattttagtagtttttttttttttttttttgtgtttgaatttacttatatgatggaataagtgaacaatattttgtgaaaatgatgatgaagggagaagtgtgtacggccatttgcaccagaaatggaacacatatgtgggaggcctttaggactaaggttccacaagaagacaggagatctatatattgcagatgcttattttgggcttcgagtggtcggcccaaatggtggtttggctgctcctttggttacacatgttgaaggtcaccctcttcttttcaccaatgatttagacattgatgaggataaggatataatttacttcaccgattcaagtacaacctaccacagaaggtaactgagttgacttaatactcttctacacaaagtccaaattgatttcctttatttagatagattcttgagtgtagtgatggtctcatctcattgttcttattaacatttacttttgttcatttctttgttagctttaatatatgtttatatattttgcaggcacttcatgacagctgctctgagtggagacaggacaggaagattactaaaatacaacattctaaacaaagaggtaacagtcttactaaaagaccttgctttcgcgaatggcgtggctttgagcaaagaccggtctttccttctagtcgcggaaacaacaaggaccagagtcctcaggctgtggctcaatggcccaaatgctggcaatgttgatgtttttgctgagcttccagggtgtccagacaatataagaatgaaccataaaggagagttttgggttgccttgcattccaaaatgggagttgtatcaaacttgattgtttctaaaccttgggctggaactactttgctaaagcttcctttaagctttaagcagttgcattatattttgataggaggaaaggctcatgccactgctatcaagttgggtgaagatgggaaagtgttggatgttttggaagattgtgaaggaaagagtttgaagttcattagtgaagtggaggaaaataatggaaagctatggattgggtcagtccttgtgccatttattggcatttataacttgcagtaggggattaactagtgttactcagaggaaagtttagatttttattacttagaagtcatttggaatcaactagtgttactcaaaggaaaggttagatttttattacttagaagtcatttgatgaaggtttttctccctcatcattcacaagtttagtctcttaaagtacttgaactcatttgataaatgttatggttgttcttttctttctttcttctacttctttgttgtgacacaattataaaatatgtcacaactcttgctatgaatttgcttccgttttttttttttttggtttcaaccaatgctacactaatagtaaattgcatttatacttctaactaggaaacggcccgcgcttcgcgtgcggtataagaatgttggatttaactctatgtaagagtgacaaaactatcatcgtattcgtgttatatattagttaatatgcttttatatttcatgtcagatgtgtcaattcgtttttaaactgcgtttaattttctcaatcctaacccgaagcataaaaaatc

SEQ ID NO: 186715 - DNA, 4763 bp, Cannabis indica
taatcatatttttattatatttaagagagaagaaagtgaaaaagtcagtaaacaaagtgggcaaaaacaagaattggcagtacatctttttctctttgctttctctacttttcatgtctctatattaactactctatgtccaatgcctctctttcactgcaaaagtagggcaattaaccccatctctatatcacactgctctgctcttttttacacaacacaaaataaagaaaagttgagagagagagattccatggccctttgttcttggacatcgtgattcaaaatacagttttaaatatatatctcaattaaaaaagaaaaaaaattcatagaatttgataaactatccaacatttttctataaggctgtacacttattccgtagtcacccttccccctttgaatcttctctcggtggaaacatcatctctctatgtttccctgtacctctatttttccattccaaatcttcaatatattccttggataccacaaaaatttcacccaaaaaaaaaatccagaatccaactttgcatccccaccaccttgaatgtacaaatccctgcggctttccacaccgcaataacaataacacaatggctgtaatctccaaaattcagccataatcatatacttactccccagaaaggccaaccccaatccttttcccacatggtcatcatggaagttgtatttccattgtcgtggtttgagaccggcgtaggtctttcgttacatatacaagcatcaagctaaagctaaagctaccgcgccactgctgctttcttaaggagccacttccttcagggggtggaaaacgcatgctgctagattttgataaaaatccaacatagaagattattttttttaatgttggtggaaccttctttaccattcctacctgtcctcgacaaaaattctccctataaaatctcgaaaccttcttgagtaaagcttgggatcaacagctgagattgatgaagggtcagcttgtaatgatttataagcatgttctaacttcttgctgatgtcgtagtcttgtaagatgtcaatgatcccaaaataaaggaccacctcatagacctctccactgcgtgatggagtcaaatggctaattccaccagatatgtattggtcgaagtcgctcttcctggatgttcgctcagctcttgcaggcatattggctcccagccggatcaatggttttctgttgagataaaatatttcaacgtcaatagagaacaaggatatatgacaccaccaataaatagcaaaatcaaaagtgcccaaatagcttatacaaaacattaatgatttaactttatggccactcgaattaaaatactatcttcaattaccatgcaataaatggtggtttttattaatgccagataagcaaaattgatggcataactccgtagtaattgacagatcgtgaatggttttaaaagacaattattattgggccacaagaaatacgtgcaaaagaagataaagagacattatgtatgtgctctcataatcaactgctatcaatactcataaattgctaagcaaccccagttacattcaattatttggtttagcgaaatcaaataagaggcagaattagttggccaactactagccttaaagctaaggatgatgcctttactagtttgacataattgcctgcatggtcctcatcaaagtttctaaaaactattttaaaatgtattcgcaacattttcagccagcaacactcaatgattacttaaccaaaaacagaaaaagaactatcaagtcagtaatacgtactggccagataaaactcggtccatatcttgcaattctgcttgaaggaaacgacagccacgcataaacttctcattttggtacgagtccttttggcctacaaggagtcacaattgattcagcattctaataatccgaataacaaattaattacatccatccttacaaaaacaaaaataactacatccatataacctgagggcaagaagaaaaattaccagttcgcaatacaaaaggcgacaggcctattttgtcatacttattatcatcacgaaagtgaagaccgaccaatagactgtaatccatgattctctctgcttccaagaactcgcaatctcgatctatttgcctgaattttcagaagaacatcaataaacaaagtaacatgcaataaggactatcaatgtgacaggaaaactcaatttgacctacttcataaggtcttggtaccaattttgttggaggcggaaaacaaaattgaggtcgagatccttgagtgtcgtcgtttcatcaatctctccctcagacttgtcagtagtgcggccatgggaggaaccttttaagtcaaacctcctatgaatccgatactccgaacagaacaaattccccattacaatgaaccttgtctgaaaaatagttcacatgtaattagagataggaaaacaaagttccagcagtgaataaagaggaaaattacaaactcaaattgatctcttgaataccataccttctgaccaccaacaggcttcacacaatgcacaccgaagaatttcgtcacaagggaattttcataccgacagacatgttgatgataactacaaagcatccgtaatagcacctgaaataatattacaattaagttattttacctgacccttcaaaaccgcaaattatgctactcaaatggcttttgagacagcataagctccataataaagcaaaagtcaaagaagtaggcaacaaaccttgacttctgatttcttcaccgtctttatcataaacctatcatcttgtgtcaagtaaaagcaactaccactctttcccggagaggaaagctctcggagtgcatcatttccacaaatggccagcatgtaatcagccggatctactcggaatcgatccctcaaatgtctgcaacaaagagaaaaaaaagatcagctcagcaacctgtaatggattatttcaacttcaactacttatatatataagcctaatatcatcaaagccgaaacatgaagatatgaaaataaaatacctaaacaccattggacagtaatctttccatcgaaagtcaatggattgatgaggtggagttttgttcgatccttcgggaggaaaccttgtccaaaatttctccttaggatcaaagtcactcgtcttaatatttcggactatggatgcatgctttccgacagtatacctaaaaaaaatgaatacccacatcaagaaaaaaaaaaaggaaagaaaaaatactccagatgcgaaaatcaaaccctagcaattcgactaatctgaaatcgaaaagcaaaacctattggcaaaattacctaatacccagttggagattaagcatcaagtcataattcttgtgccctttggatatggtctgcccaggcttcttggcctcgccactgaaacaacatgggtttcgccgaaactgcctcaaatcgtgttcgggtgcagaacagctcctgtaaaacatcgaagcctccgcattatcaattatgtcacaagtaatgtcgccagcttcaccgtccgattcccatatacaaattctcgggaaatttctctctgtcacgcttcctcttgctccatctacagacgaccttttcctcattgttatggtcagattatcactcataacaggcccatttgtcttcagactaaagtctttcccggccccgggatagaaggttccattcagttgatgaatcttcaggtccttattccaactccccacatagcaactcccgtcaggccaagtgaagaccccattctctttaggaatcccgttttcccactggccttcgtatcgattcccgttggcccaaatcagaatcccacggccagaaatcactccattcttccattccccaacatattcatttccattcttccacacataacgcccttgaccatcctggaggtttctcttccacgacccttcatagaaatcgccattcgcgtacctcttctgtccatacccatgtttccgatccgagctccatgaaccccgatacgtgtctccgtcggatccaataaaggtaccaaacccttccatacgacccgatttgaattctccctcgtacgtagccccgaccggccacgagaatttccctttacccgaagcctttcctctccgccaatcgccctcgtacatgcacccgtccgtccacaagtacttcccagatccgtgaggcacagtaccagagaaactcccgatgtaaagatcgccgttgggcaagactctctcaacagttgttgtacaaccaccggaagttaggctgatggtggtgtctcctacgactgatgagatagcggtcgtggtcggcgtcactctccgtgttcccccttgggaacgactgcgggcaactaccaacaccggcggagttaccaaaaccggcttagtcgtcggtgtagtagtagcagtagcagtagcagtaatagtaacctcgttatctagcttctcctcctcagacctcttcttcttggtgctgcagacaacgtcacttgggtcatcacagagtagtgcttcacgcattttcgatacataaacactcaaaccccccaacccctaactccctttctctctctaaatagatatataaatatatactcctcctcttcactgttgcatttggaacaacaaaccgtcagcctgcgccgtagtaaaccttcgtgccggaaagcaaactcaccggataaccaagactcgcgagcattacctcctctctctctctctctct

SEQ ID NO: 186716 - DNA, 2583 bp, Cannabis indica
aaaactgtaagcagaatatcggagcaaaatggctgaggacaagaggctgggttcctggaacgcataccggcggtagcagcagtggtggatcagatttgcaagaagaagataccaatatggaaagtgccaatcaaggagtagagatgggcatgactcaaagagtaaatggtgcctacattaaaggaaatagagcaattacaaatgattcacttgatatgcaagctgccaagtcttctcaagaaggaaacaatatctctcctgggattaataatattaaagaagtgggacatagtcagctaatttcaaaaggtagtattttaatattggataataaaagaaagaagtcaacagagaccttagagaaaaaatttgtgggactggagggggaagctaatgggctttcaaaagactcagatttggcgggccttgcttatggggctcgcccaacattatgagtgtaataggatggaactgtcgtgggcttgggaacccgcgggcttttcagttcattcaagaacttgtagttcaaaagcggcccaatgttatttttctaagtgaaactctatgtggtaaagaaaagttggaaaggctaggtaatgctattggttttgagggatgctttgtggttgaagttgatggcagaagtgggggcattgctttattatggaagaatcaagaggaggtttgtatcaacagttactcgaagaatcatattgatacttcggttaattgggatggtcaacatcagtttcggctaactgggatttatggagaaccgaatagaagcttgcgtgcaaatacttggagaatgataagaacacttaaagatgagagtactttgtcgtggtgtttaattggtgactttaataatgtgctggatcaaagtgaaaagaagggagggaatcggtatccgaattggcttatcaatggctttagggaagtcgtgggggtttgtcggttgcaagacttagaattgtatggccatcaatttacatgggagaatggtagaaacactagtcaatggattgaagctcggttagacagagtgatggttaatggggattggttgcaacttttcaaatttgcaagattatttaatcatgatgtctctccttctgaccacactccattggtgttggaaactcatttttggaatcatggcactggtattagaaagtttaaatttgagaattggtggattagtgaccctggctgtgaggcagtcattcaaagctgttgggcgactaatgtggggggctcacttcaattcaaaattagtaagtgttgggaagctctggccgagtggggtaaaggtttcaatggcaatttttctcaataaattaagggctgtaatagatctcttaaaaagctgaaagggagacgtgatgaagaagggatgaagcagtatagtgagactaaaaaacaacttttcgagatacttcatcaaaaggagatttattgaaagcaacggtccaagcaacattggctgcgagatggagatcaaaatagtaagttttttcatgctcgagctaatgccagacgtaaaaataatcaaattgttcatttgaaaaatgatagaggtgtcttggttgattgggataatgggttggataaggtgatttttgattatttccatgacttgtttaaggcaactgtggtggattggagggaaattttatcatgtgttcctacaacgataatagagggacataatataaatttacttaaaccaattcttgaggaggaggttaaagcggcggtttttcaaatgcatcctgataagtctccaggacttgatggaatgaatccagtattttaccagaagtattggcacattgttggaggggatgtaactcttactgtctgagagttcttcacttcggaatctatgcaatctgttatgaacaaaacaaatgttgtattgatccccaagaaaaagtgtcttgatatgatgagtgaacttcgaccaatctcactttgtaatgtgcttgcgaagataattactaaggtgttggctaatcgtatgaaggtacttttggatgacataatatcggttaaccaaagcgcttttatcccggctagattaattaccgataatataatggtatcatttgaagtgctccactacttgaaaagaaaacaaagaggcaaggatggatacatggcactcaaattagacatgagcaaggcatatgacagggtcgaatggtcatacatttgtgatatgctttaaaagatggggtttgctaagaaatggattcgcattatttttaattgcctatcatcagttgagtatacggtagtaagtggtgatcatgcgattggtccgattgttccttctcggggacttagacagggggatccgatctctccttatctttttctgatatgcgcagaagggttctcagctttgattcgtaagtttgaggaaaggaaatggattcatgggtgtcgggtggcgaacagaggtccgggtgtctcatatgctcgcgatgatagttacatttattgtaaggctaatgaggatgatgttcaccgtatacaacaactcttggagttatttgaacttgcatcgggccaaaa

SEQ ID NO: 186717 - DNA, 3364 bp, Cannabis indica
aaaaattgttcctaagtttcttgtttaagtctaattaatcctaattatttattaaataaaggacatgttctactaattttttatactgacagtaaatattgatatttaagtttttttttatactttgactaaactcagagaaagaatgctcgtacatgattagacaaagccaggacaatatatttttataatatatatatttatatccgaaaagttataaccaaaggacaattattgttttttttttacatggtaaaataataaaatttatattttctttctatatataaggaccaataatttcgtacgagaccattcagtgactaaaaaaaagccccatggagtccattaatccctctcacacagccaccaacgacatcgaagaagtaaacgacgactacactcctttgcagagccatgccggcgccgggaacggcgacccaccgcccaatcacgggagatctataaaggggttcgccgtgatagttgggtcaatagtttttctggtgtcgttggtggcattaattaacattgataaccaaacaggaacgttacagcaagaatccagctcagctacaacaagaacaacagtggaagaggcccaaaacgacaagtcgtttaataggagccgtgagattgagatgtcgttttggatgcctcgaggtgtggcagaaggtgtttcagctaaatcaaatccgaacccttctctttccgacttggaattatcttacaactggacaaacgctatgttttcttggcagagaacggccttccattttcaaccggagaagaattggatgaatggtaagtagtaagtacaaccatgtccagcctttaatttcattaattattaattaattcattgttgactttactagatttcttcaccactctaaatcaatgtttaaaattatttataatcttcacttcttattagttttatttttcccttaatatttgttacgttttgcctttcttttaattaattagttttaaggtaaatataatattgtactcatcattggcttatgtttttgttttgttggttatggcaaattattacaatgatcatctggctggctttgcttcatcatcagatcccaatggtaagtatattcttaatttcttacaagaaaacgacttccttttgtttaggctaattattatttagagctcttaattactgtttcctttttcttataagcaagtcataaataaaagtatatatatcccaattaatgaaacaatttacggtaagttattaatgtcaacatattggtaagtataaaagagagaaatcttcggcctgttctttattttaaaataccttttgaaatatgatattggttggcacgttttataaattcgttctgcgttgtatgccatacatttacaaatatttggaattatatattattgttgattagcctaatgcatagacataatttattgtgttttggtttattttactaaagaaagaaaaaatgtacgtataaattgtcgctttatgagttgtggaccaatcaatagagttctctagcatgaaaattggataatcatagagcccaatcatggttttattttcctggaagctaatgtgttttggtcttgtgcctgtggacccacactctgacgatgaattataatgcatgtggctctcctaaattgtaatatccacaaactgctcatttttagtctaaactgtcacgtgatacccgttaccatatcccacgtgacatatcatttttttttctaacctttctcaacttccacctacccaaaattttggtggttaggttggataatgaggatttatgtgctctttaatttgtttcacgtgatttgttttaattagtgaacaaactttaatctttctaatttgactagtaaatgtgatgttacatacttttgggtgacatgtaattaaatagaaatagctgtatttgtataaatctgaaaatgtctcattcggaggacgaatattcaattattattatttttagtcgagagaaacgtgattaataatttaattaattattagtaataataattgtgtgtgtacaggtccactgtattacaaagggtggtatcacctgttctaccaatacaacccagaatcggcagtgtgggggaacataacatggggacatgcagtatcgagggacctaattcactggctctaccttccttttgctatggtcccggaccactggtacgacgtcaatggagtctggaccggttcagccacttttcttcccgacggtcagatcgttatgctctacactggatccaccaacgaatccgtgcaggtacagaatctcgcctaccccgccgacctatctgatcccctcctcctcaaatgggtcaaatccgacaaaaacccagtactggtacccccacccggaatcggagtcaaagattttcgtgacccgaccaccgcgtggatcggacccgatgggaaatggaggctcacaatgggttcaaaagtcaacaccactgggatttctcttatgtacacgacgactgattttataagttatgagctgttggatcggtatttgcatgcggttccgggtacgggtatgtgggagtgtgttgatttttacccggtttcaataaacgggtcgaatgggttggatacatcggtgaatggtcctggtgttaagcacgtgctgaaagctagtcttgatgatacgaaagtggatcactacgcgattgggacttactttgtggggaatgatacttggatacccgataacccgaaagaggatgtgggtatcgggttgaagctggattatggaagatattatgcgtcaaagacgttttatgaccagaataaggagagaaggatcctgtggggttggattaatgaaactgatactgaaactgatgatctggcaaaaggatgggcttctgttcaggtagtcaattttgtagttttgtaacttgtaacttgtatttagtaactaaggtttattttatttttggattttgtagacaattccaagaagtgtgttgtttgatgctaagaccggaaccaacttgcttcaatggccagtggaagagattgagagcttgagactaagcagtagtgagttcacagatgtagtggttgagcccggctccgttgtgccacttgatattggctccaccacacaggtactaaataaaaatttatttttatgtcttttactaagaatcttttttaaatgaccattgtaacaaacaacacacatataattcgtactttgcaagtattactgtaaatgaatttttggtatgatagagaattgctacatgtacaacatttttttcaccccaccaactaaatacaataggtacattaattagtaaaattatgaag

SEQ ID NO: 186718 - DNA, 3617 bp, Cannabis indica
aaaaaaataacgttgttccaatcatttttttatgctttcttttatatcttttgctgcacatccatatatgtatatatacttttttgtctttttgaatatacacacaacaaaatttcaaacccacagtagtacactgagagggatcactactttcaagactgcaaaatgacactttttgcatacatatcaaaagttccaaacctttttacaagtgttggttttggatgaaaactcctgattctcaacacaatatgagagttatattctctgcgggtatgtaattctatttaatctgcacatattcagatagtgattgtgtttactttaatacagttcaaggttggtgaaaaaaaaaatagccatattttgagagaaattattgtgaacattgtccacagagaataaatagtagaataatgagctatatataaaaacataagctactttacttatagtcaattaatttttagatagaaccacataattctcaacaacaagacacattaattttttatctgcaatgccaataacaacactttctacaatatattctgtaaagggtattttttgtttgttttgttttgttttttaacatggtctcctatccttgaatatatatttgttgtaaaattgagttttcataagctggtattgataataaaggacctaaaatgattcaattttggcctaaggtgggctgttatagcatctcagattccaggaagaacagacaatgaaataaagaactattggaacactcatttgaagaagcgtggcatttgcttggctgaaaacctccaacacagcttgctcttatgtcaatctgataatccaagccataacaaggaccaagtatcccctttacctcgccactctatacaatgggagagtgctagattagaagctgagctgagactttctatggaatcatcacaacttagctcatcgactaataagattgcagatcacttcctactcctgtggaattcagagattggaaaatcgtttcgccagatcaaatcaaaacatgaagacatgtaccgaagccatgtacccgaaataacttccactgcgaaattcgggtcaagttcttgtgtgcctatacaagcaggaaacataaacaacaatcactcaactaaaatgattcaacaagaagaagatggctataaaccaaatactgattccaactcatctagcctttgtgaactgtctgattttactaatacagtttctgatatgctgctagattccccagttggctttgatttggatttctttcaaggaaatgaagatggttttgccatctcccttgacagatcacctgataactctcttatgttttagctcattattaggctatcttcagtgttagatgtttaaacttagaatatatatatgtgtgtgtttagcctttaggttactaaaagtgatacaaggacttctaaacttctaatgtttagaagtcatttcaatggaagttctttcttgctgtgtgttttagtttcaccctgaaatgaatgtaacaaaatctaaatattgaatataataacttcataaattcaataactacaataaagataaaacaaaacttaatctttcacaattaaattacacttttttgtttgccctccaaacgtctatacacacaaatatagaacttatgcacacaaactaatttgaaaccaatatatcatctgttaaaacaaccacatctgaattatccataagaagaagaaatctgagaattaaaaaattagaaacaaccgaggagcttctttggagcagttccagtggcgcggtatttcgctgcggtttcctctgctttgagaagatcttccccgcgctttgcctcaatggttgctcttttctcctctgcatccttgtggatcaaagccatcttgttcttcattttttccacatattctgcctttttcttctctaaatcctcctgctcatgtataggtacattattcaaatagaaaaagataaaaggaaaaggttgtttttataatctcaattttgaatgtcaaatgccaatgttctgtataaatgttttcattactctatgatacactttagcactccaagctcttttaaaagagcatttctttaaaattataaagaatcatgtataaaatgaatttaagagctcattcaaatagttctttattttagaaaagcaaaattgttgctctttacttagagaagctttaaagtttctttattttattcatttctctttctctttctttttcttaatttaattatttttttgctttaattaataaaaagtataagaaaataaagtattttaataatttagagaaaagatagagtaggtgttgtattgtatgctgtaaaatttcgatgtaaaatagagaaattaagttttaataatgtattttaagagatagagtcgacacaagtttataaatgacagaatgaattgaaatgtttgatacctcaagcttcttcaactgagcctccaaagatgcttttttgctattttcccatgctccaatggaagacaacttcttttgagctctgctcaacatcataaaaaataaattaagtaacaaggtatcagccaatttgaaatcagatttgccattagtcaagttcgtgaaccagagcaaccaaaagtaaagtaatcattaacacttaatagtaaaagttactaaaagagagaaaaacaatcttaataaaactcttacttgttctctgccttagacttttcactctcttcccatgccttgataagagacatccttttttctgtagcaacccttgcaagcacagcatctttaaaagaaaattagagtaaaagttaatatcaaaagagttatattattcctactaaatttacaaaattgaattgataaaggaaattgaaatataagtttactttacctctgttgacagaaccctcactactacttttctctataccagaatcagatgcctctgttaagaatatgtaacaatttagattaatttaaaaggggagaacaaatttttatggttttaactattataacatatttatatatatgcatgcctctctagcaaaattttaacctgtaatttgcctagctttgctttttcaaggatttgaaaattaaaatcaattttactaataatagtattaatttgatttcaaaaatctagtcctctatgaccaaaaaaagaggggttgataaatattatacaatacgatcaaaataaaaataaaaggttcctgattctgatatttataaaacaaatacaatataatttagcttcaaatttaatatagttttatgattttgtatgtaggtaaccaaagcaaccaacttagataatataatacttttgccaactaaaacaattttttcctttctaaaaaaggaaaaaaaaaagaagaaaaagaagagcaattttcctttctttcctagccaaacagaaaagacaacaaacatataagaaagtaagagttgaagttagaagaattactagtctctatactgtcaacaacaacaagagctttggaatcatcaggcttgtcctcagaagaaggtggtggaatcacagctttctcctgggtttcatctttgggagcttcttcagtggtggccttc

SEQ ID NO: 186719 - DNA, 4964 bp, Cannabis indica
tatctcccaaactatctttatgactattattttttcactaataattaataaataacccagaaaaaaaacagaagaaaaatctacttaaatcatttgaaatgtggaggtgatccaacggttccagccacaataacattaaacagcagcggtaacaactaacaagaagacaactcagcgttccttcgcccctcccaccttttgcaacccaaatatcaaactcatgctaattgacacaccaactgccacgtttacatatattaaattgtcgtctcctttaataagatacatatccatagcatccgtacggtagaagcttcaaaacacatttgcccaaaataatttcaataaggtcgaactaaaatttagacactgcttaaatattcactattacacattgacattcaaaagaaaaaaatatataacagtaacaaattataatgaatataattaagtataattacacaaaaattatattgaataatgaataaagaagagtgggtcccacagaaaccaagataacaagtcaacaaaatccgagttacccgccataaccctttcatcgcacctttttttttaattccctctctcaaaaaaaagaaaaaaaaagtgaaacaaattggcgggaaattcgaaggtttagagggaaacatcaaacactgaattcggcaaaccctaatccccaaaactttcaaatatcttatctgttaccccattcttttatataaaccgtataagtttcgtttcatatagactacacgcacaaacacaaactgttcgacgaaagtcctcagtcagagagcgagagagaaagagagaggcaagatgtatgttgttaagagagacgggcgtcaggaggcggttcatttcgacaagatcactgctcgtttgaaaaagctcagttatggcctaagcatcgatcactgcgatccagttctggtcgctcagaaagtctgcgctggggtctataagggcgtcaccactagccagcttgatgagctcgctgcggaaactgctgctgccttaactgccaatcaccctgactacgcttcggtcagttttctttatccgactcttgactcctatgttcattttgtttcggcaccgaaatttttgaaatattctgaatatttatcgcctctgtttggtcagttagtacagacagtcaccttgttattgctgaattatttgttagatcatgaatagttattgggttttcaaaattatctaaattttctttggaaatgaagagtaaatggatgtagttttgtctgatttgtacttgcgattgagaattttgttataatgagttgaagtctgtttcatttgatgcagttggctgcaaggattgttgtgtcgaatttgcacaaaaacaccaagaagtcattttctgagacgtaagcctcattaatagtgcattttttagtttgtctaaactggctctggcatctaatcaaatatgtaaacttttctgattgtatgattttgcaggatcaaaatcatgtacaaccattttagtgagagatctggtcagaaggcgcctctaattgcagatgatgtctatgaaatcatcatgaatgtatgtttattttctccccttttttattttactacatatattgctcgctagtatgttcttcctagttttggaatatgcgtacttctttttaaagatattcatttacctgacaatagtggttatcctgattattttttttttcctttctttcagaatgcagctcagttggatagtgaaataatatatgatcgtgattttgactatgattattttggctttaaaaccctcgagaggtcatacctcttgaaggtacaaggaaaggtcattgaaagacctcaacacatgttgatgagagttgctgttggaattcacaaagaggatgttgaatctgctatcaagacataccactttatgtctcagcggtggtttacccatgcttctcccaccctcttcaattcgggaacaccaaggcctcaggtatgattggtgtacatttggatattttaagaactaattgttataaattgtgtgatgcattgagttctcatactaatatcaattgccacttggtgattgttgttgcagttgagtagctgcttccttttgtgtatgaaagatgatagcattgaaggcatatatgataccttgaaagagtgtgctgttatcagcaaatcagctggaggaattggtgtctcagttcacaacattcgtgccacagggagttatattcgtgggacaaatggaacatcaaatggcattgttcctatgatacgtgtttttaatgatactgcccgttatgttgatcaagggagggaagaggaaaggtagttatttcttgatttgaaagtgatatgatttccatttgaagtgtgaattcatgctgatgttgcgtatttttccttgtaggtgcatttgctgtctacttggagccatggcatgctgacgtatttgaatttcttgatcttaggaaaaaccatggcaaggtatgcataatgaatcatccatacgtgcaatatagcaattgaagaagatttatttaggagcttgaccactaaatatgtatgactgatttattcttgcaggaggagcatcgtgctcgtgatttgttttatgctctttgggtgcctgatttgtttatggaacgagtgcaaagtaatgggcagtggtcactgttctgccctaatgaggcaccaggtttggcagattgctggggtgaagaatttgaaaagctctatacccgatatgaaaaagaggtaaagtgatttgacatttgcattgttgctgcccttaaaacattttttattaatgctattttgtctagctggtttttaataaatgaatgtgttacagggaaaagccaagaaggttgttcaggcgcagaatttgtggtttgaaattctaaaatctcagattgaaacaggaacaccctatatgctttttaaggtgcttgtcttgtaatcttacttcctgacaatacctcatacgtgatctgcagcctgaatgattttcttattttgtcttgtaactgttgtcctgcttctctataggatacttgcaacaggaaaagtaatcaacaaaacctcggtaccataaaatcttcaaacttgtgtacagagataattgagtacacaagtccaacagaaactgccgtgtgcaacttggcatcaattgctctaccacggtttgttcgagagaaggtaagacacttctagaatttattaataaaacctgatttttgttgtttggtctgttgtggtgtgacacttttattatttgttgtaggatgttccaatagagtcccatccttcaaagattgttggtagcagaggttccaagaatcgatattttgacttcaataagttagcagaggtttgtgttataaactcaatctacttgttttgttttattttataacacaatgtagcataaaataagatagctggagcgctttcttcatttacattcttagtttctctcaagtctcattgtataaattgtctcaatgtttatccttttgttttggcagatcacgtcaacagtcactttaaatcttaacaagataattgatgtcaattactatcccgttgagacagcaaagaggtcaaatttgcgacacaggccaattggaattggagttcagggtttggcagacacctttattttgcttggcatggcatttgattcacctgaggtaattcttactttagtgctatgctgtagtattttattagagtcttagcttggatatttgaggttgacattgtcatattgtggcaggctcaacaattaaacaaagacatatttgagactatatattatcatgcactgaagacttcttctgagttagctgcaaaagaaggcccttatgaatcctatgatggatgtccagtaagcaaggtatataagtgtacttggttatgtaattacatttcctattgtcattaatgtacatctaaaaccactggctaaacctttgtgccctttgattactaagggtcttctattctagtattgtcttgtcagttcatttgttccttcagagatttagaacctcaacaccatagtcagataatgatgcatttccagtttcttaacgagtcatttttcttgtgcagggaactcttcagccagatatgtggggtgtaacaccttcagatcggtgggattggaaatctcttagggaaatgatatctaagaatggagttagaaattcgcttcttgtagctccaatgcctacagcctcaaccagtcaaattcttggaaacaatgagtgctttgagccatatacttccaatatttatagccgcagggttttgaggtttgcttttctggcccacatattcaattttcttttaaggtttttccaatggtctaaatatttttttatctcttacagtggtgagtttgttgtggtgaacaaacatttgcttcatgacttgactgagacgggtgtgtggtcacctgctattaaaaacaagataatatacgaggatggttctgttcagacaataccagaaattcctgatgagcttaaagttatctacaagtatgaaactgcaatttccccacaagtgtttttgtttctgtatagttacttttttttgttttttggaattgtgctaagaaaatattctttaatcagaactgtttgggagattaagcaaagaacattggtagatatggctgttgatcgtggatgcttcatagatcagagtcaaagcctaaacatacacatggatcagcccaattttgggaaacttacttcgttgcacttctatgcgtggtcaaaggtatgtttacatttgctgctactttgagataaagtggacaagataaacttgttatgtagaacagtaatgtgcttaacgtttgatctagttaaatttgcaatgaaccagttctattttcattatgtgcttctcataattgagtcagccacttttataaa

SEQ ID NO: 186720 - DNA, 836 bp, Cannabis indica
cctagatggtttatttagaagcaacttcgtatccaacttccaaccttggcaattacaaatcttttgaattgttaaatatggtgaaattggtggattccctggactgaccccagtacaacttgttggaggttagttgcgactgattactgttgtggtttacacgagtgattcttagtttattgcttccacggagtaagcaactttagtagcttagattaacctctaatggaaatttgcctatagcattgtcatctgcaagaggaaattactcttttccatttcaataagtctcatggccaatgggtattggcaacaatacagtcttgaggccaaggtttccctgtagaagtgaataaggctaaatgtctatttatcaaaagaaaaaacaatgaaattctttttttcttatactctcccttgtttggtcacctttttctttgtaagctcaacacagggccacctgtttgagtataataaaattcattttcatatagatctctccccctcgctttctctgtgttggtgttagtttcatttttggtaatttgtcaaagggtgataaagcaaaggaatatgacttttacgcagaaggctgtgaagaagttattcatctctcaagtaaaagttcatggtagttacaagtaacttgtctctgtcactgtaacaaaagctaaattgggacttaaaagagaaaaaagtaaagaaaaagttttaataagatatgatttgattgacagtcttaggtggttagatgaaacaactcttaacactgattttaatggtttgtttaaagaaataataaagcaagactcttttggtttagtgcagctgttatg

SEQ ID NO: 186721 - DNA, 1487 bp, Cannabis indica
atttagatagttggtaatataacgtgcgaatatacttatgaataaatataattttggattaattcgtgttttttttaattttataatttacggtcactactttaaattttgctgtaaatattatttatttatttatttttttttttgtaaaaggaaaaactttattaagcaacactaggtttatctgctattaaattagcagcagcacacataggtaaacaatcagtccacatatcggacttttgggccaaacggctccacttagctaaactattagctaccttattacaatctctaggaacaaataaaaaatctaaggactgaaaatattcccgaagctgtattatttgttgaaccaaaggaccccactctgcataatttgtattctgcatccgtatagcatttatgatggttttgctatcagaagcaacttgaacctgccttaaagaacgactgatagcaagcttcaaacccagcacgatggcttccccttctgccagtagaaccgtgctgcagccaagcaaaaatttagattttgctataactaaagaaccctccgagtcacgaattactgcacttaagctatacccggactgtccttcaattatagaagcatcattatttattagcaagcagttcggttgaggaggttgccaatgaagtttcggctttaaagctctgatctggggaggtttctggtttgtgcccaattgcagctctagaaaatcttgagcccaagtgatccacaattgatcattcatggttgtattctgcaaaataaacttgtttctcctctgccatagcagccaagaataaccaataaaccaaagcaaatcatcattttttttcaagttatcttttatccaccaaagaaagtcagcagcatgattaataagagggggaaagaattgagaaaaaccaagtatcttccagatttttaaagacttcgggcacctccaaagggcatgacaaacatcttcttcctgctgtttacacaaatcgcagcaagtatttaaggccatacctctctttgtaagctcagttttagttggaagccaatgatggaacacccgccaaacgaagtttttcatctttggagtaagagtggatccccaaataaatttccaccaagctttgagtttggaattattggaacattcagccactaaaggattgttgaagcgaatcttatatccactagcaaccgagtaatttccattagtagtagaatgccaagttatccaatccggttgatgtattgttggtttgattcctatgacccaagggatgtcgtcttggtggaaccaactaaacacttcattaattttccattctccatttggttcgagcaaagaactaatagtgacatctttaggaatttgaattttggtgcggagtttgaaaggcgggcttcttgggatccacatgtcttcattgattcttatagtgcaaccatctccaatacaccatcttacacctttaaggag

SEQ ID NO: 186722 - DNA, 1190 bp, Cannabis indica
ttttttgtagtgttacttagttcttccattttatagatacatgggtggaaggcgtgaaaataaactgagtaggctaaatgtaacagactttaaagccatttgaaattgaacctgaattttccgcttatgacctaactagttgatcacatagattgatgacatcagcctcataaattttttgcttcgactaatcgaagacatcagcaaagctaagctcatgcttctctccaatcggtgatctgtatgagcctgacattccttattaagtaaggaaaaatgggctgaaatatttgagcttaacaacttatcaaaagttcctttggcttcacataggaggtttcaattcagtaatgatgcctgaagagagaataagtgctaagaagatagctaaaaattatgatgttttgaaaagttatgttgaagatgcaggttccttttacatttggaccaacaaacaagatgttaccaccaaagttttttacaaagcttgatcgaatgacaccgaataagaagtggcttgacaattatttgggtgcaaaggtcaccttcttcccaaaaggtgagtttgatcattgtctggctgtcttcactgtgtattctttacaaaataatggtttgaaactttttggttcactacaagaaatgatacttttttcagcacatttcggcaacgacgccaacaaaaattgccagcaaaagatcacacaatctagtgccagttttagccaagggttttgatatgtgccggaataagtggcctttactggtggctttcatgaaatgcaccggaaaaaaggcttaaatgaaacctttttttgtttatgctatttattaccttttttggtgcagtcatccaccaacaaaagatgtaagagaattgtcgagtgaataaccatgtgtgaaaagattttagcaacgcaaatgtgcgccaaaaaaagtcttaaaaaaataggtaggaattttcccacatgtgttttgttttgggggaaacagctttgtcagcgcatatttgcaccagtaaaggtttcgtaaaaaagtgtgttttactttagggcctctaagatttatattaccggtgcattaagacatttttactggcgcaacgaattgcaccgataaaagttttttaataagacatgaaatagggcttcttcttccccattttgcctcttcctctctctctctctctc

SEQ ID NO: 186723 - DNA, 1787 bp, Cannabis indica
aaacaacatcaaagcaaactttgctaataatctaataaaggatgaatttactgagaaatgtggaaatattaaaatcaacttctttctttcccacatggtgctcactcactctagcaaaagctagaagaaaaaatactaagtatgaggaaaagcatgctaattttcaaagataaaatatggaaaagcataatttattaaggaaaaggaagtttgtgttgtaatagctactagcttatagctatagctattaagaaaaaaataaatcaataaattaccatggtagtagtagcaccaaattatagattattaaataatttatacactaataaatactagtcttaatcaaaatattcccactaaattttaatggaagcaacaatcaagaagggcctttagttttattttgagccaaaagaatcaaagctactaggaatataaaattcacataggtatatttggaatccaattggtcaaaagtgcaggtctaggatttatagtcttggattggaagatcaactttattttgaggactaaatatttattaatttcaccaatacaatatataaattaatcttggtcccctctctccattaccaccattattcatcctctacaagataattaattcttcccctaacttcttcttcatataattcaaaaataatgtcattgtagtaaaacttgctataaagcataatgaaggagggagctcattatggtgttatacttatagtgattaccaaaaattattgttttctattattaattttttaaaaaaggaaaagagaaaggtaatcattcccacatacatacattcatgtcaaagtcaaaaacattttccttacatggaaaaataatggtcatgcaatttgattatttattatggcactaaaacataataaccttccttgcttccacacaaggccttggccaagcaatcaatatcaatccaatctcaaaaagaagaagggttttatttagctttataaaagaaagaaagaaagaaagaaagaaaagaaggaaaaaagggtagggaaggagtcagagaagtgaggcttagattattattagattctttaaacttttggtaacctgggcatgagttgaggggtccaatattcttaagacttcttaagtcattgttccccttaatcttactactcggttcacttgataacctattttattatgtagtgttgctcttcatttcatacatatatatatcttaaactctataaattaatataactgaaatttgaaactcacatgtactaacatttaacattgaaggtacgggtggtattttgtgttaataagttgtatcaagataagtattacaagcaaatatcatatttaaatttgacttatctataagtttgtcaaaaattaaaactttaattcaacctgtttataaatgtgttgacctatcacttagttctacccgatcaatataatttatttatataaagatttttgcttgatttttcgttaatttatcaatttattaacatatttacaacaaatttaacatatccacaatctttttataacatatttattgcactaatttaactaacttaatacagatgttatatatttgtaaataagttgttgtgtgatttttaattcaataataacccaaactcatttaacaaaaattcaaatctttttatttaatgcaatttttgttattgtctctcacccatcttcttcaggcccctaattgaataaatcaaataattctaactaacaaaattaaacatgaagtagaaaaaagtataaagacc

SEQ ID NO: 186724 - DNA, 1522 bp, Cannabis indica
gaacaacttcaagatccaacgccacatttccaattagctgcctctcttttacagaaatcgcctgaaaccaaattggggtttcttccgatcacatgatcggctgaaagataaagttcttgaataagatcaagtaaaatatctaaagaagtgagaaatcacaaaacaattacagaattgaaacgatgcccctttcacatatttaagtaattcagatcaagcctctaaaacaagttgttagggacattatttgttctgcatattgttgtttcatggttcctaagtcagatgcatcagcaggattagctggtcgggcactaactatttctaagtattggctaattgacaatatcctgtatttgaacagccacacaaggatgtaagttgcattagaattctttagtgtgaaaaattaggtgcaagaattaactgggctaactacatgtatgtgcttgatattgtttcttttcttcttccctttttacttggaattagagaattataatataatctcaatgagcctaaacaaaatataaaaaaaaattgagtagttattgaactcattaagtatacctcattaagcttcatagaaagttgatcaagaaattcaatgcgatcctttgacttctgtaaagcttccatgaccttcttcttctgaaatagcaaatcccttgcctcatcttccttccctaaccggacactaatggctgcttgtcgtttaagattctcagctgtctctgacaaacgcataagcctccctctggcactgttcgctacacaattctcataactgtgtcacttagtctctaacaaattaacttcaatccattcaacatggcgaactttcgggaagagaaattcaacacaaagaagacgcttttcgagctcaaaaatcaaatgggtatctaaaattggaattagatattatgaaattgaagagacaatatacctttggctctggcggtgtcagcctctgtttgaagctgatccagttgggcacgtagctggtctgtattcgtattggaagccgaacacataatcctccatgaaggtcgccatggcagagccaggactgacactgagcccagtccagagttcatcatcatcgtcgtcgtcgtcatcatcctctttcttcggttcggatttgggaaaagtagacaacgcaagcaaatggatcagtggcaaaaaagtaaaaacagtgtttttacaaatttcgattttttgtgctaatatttcaaaaatgcgatatgggcttcatacacattttattggaaaatacccaattaattttggaaagatgttattattcaaattaagaatttggaaacaagagtgagtgaccatatgttttccaaaatcgacatttgttcatattacacacaaattccacactgtggcgttaaatttaaaatctttagaaaaaatttaaaatcgacgtaaagttattttatgaatttttttttagagaaaagttaaaaaatatagaaaaatcatggggtacctacctagttaccattttatggta

SEQ ID NO: 186725 - DNA, 4028 bp, Cannabis indica
tgggttttgattatttgcagcctcttctgcagttgcaagcaccaagcctgttcaatctcaggatgtggacaataagaaaaatccagagcctgaagtcactgaaaaaaagaagacgaaaaatgccacggtcaaaaaagcaacacaaaattcagatgctacacctaaggctgaaaaagaccttcgttcacccatttgctgcatcatgggacatgttgatactggtaaaactaagctgttggattgtattcgtggtactaatgttcaagaaggtgaggctggaggtattacccaacaaattggagcaacatatttccctgcagcgaacatacgtgaccgaaccaaagaactaaaagctgatgccactcttaaggtgccggggctattggttattgatactcctggtcacgaatcattcacaaacttgaggtcaaggggttcagggttatgtgatattgcgattttggttgtggatattatgcacggcttagaaccacaaacaattgagtcattgaatcttttgaaaatgaggaatacagagtttatcattgcattgaacaaggtgcacactatagctgaacagtactggttatctcccttcaccattttcttcatattatactcatgttttttattctattctttcaattttgcaggtagacagactctatggatggaaaagtacccgcaatgcaccaattgtaaaggcattgaaacagcaatctaaggatgtccaaaatgagttcaacatgaggctcactcaggtcatagggtttccaattcttttctctattgtactgtgtctgttcaattgtacttacaaattcttaaatttgttcggttcatcagattgtaacccagttcaaggaacaaggcttaaatactgagctctattacaaaaacagagaaatgggagagacatacagcattgtacctacaagtgccattacgtatgattcattaacactgggttcagatttcaatgtaacttttcattctctttggacggtctgtttttgctttcttgtctgatgttttatgtttggggtaactatttcagtggtgaaggcattccggatatgttgttactattggttcaatggactcagaaaaccatggttgaaaagcttactttcagcaatgaagtgcaggtttgctttattttctccataccaatactctactcttagacggttaaaactggataaattctgattaaatcttcttcgtttttgccagtgtactgtattagaggttaaggttattgaaggtcatgggacaactattgatgttgtactggtcaatggagtgcttcatgaaggagatcaaattgttgtttgtggcatgcaagtaagtgtctttaatccttcttccagatccagatgagacttttagttacgcatatttgtaatttatttctggagatttcgttattcatatgaaaagttattgatattacattaagaattttactaataattgttaatgtgtatttattttaagggaccaattgttactagcattcgagcattgttaacaccccatcccatgaaagagctccgtgtcaaggtaatctttttcctgagaatctaagaatcttaaaaaagaaatccaattactaattttatattatgtcttttatagaagcctcacctaaagtccttatccacttggaaaagtaactaaattaaatctaacgtgaagaatctaaatagaggaaaattgcaaaaaaatttatgttttggctctcacatgtgctaccaattttccatcaagggtttttctttaattccatgattcaaattgagaattcctgttgtctcatgtactcataaaagcttcccaggatttattgatatctccaaatcaacagcattattatgtttagatggccacgaaagtgacgaagtggaacatttcattaaacttgaattgcatgcattggactggctaacttgaaaacataaaatatgtgctttccttatttaccgttttgtgtggatgttgtgatattctggtgtcccttaatcttagttctgaactattttatttgagttactgtttgtttgatgtttagggaacatatctgcatcacaaggaaattaaggctgcacagggtataaagatcacagcacaggttatatttctaactaatcctccatgttttcaaaccctaagcacttcagaagtgtcatggttactgttgaaggtcgcatccttaattgattggtaaatgttttatgcagggtcttgagcatgctattgctggtactgctctatatgtagtgggccctgatgatgacgtagaagatatcaaggaaacaactatggaggatatgaagtctgtcatgagcagaattgataagagtggcgaaggagtttgtgtgcaagcatctactcttggttccttggaagctttgctggagtttcttaaaaccccagaagtaaatattcctgttagtggtataagcataggcccagtacacaagaaagatgtcatgaaggccagtgtgatgctagaaaagaaaaaggagtatgcaacaattttagcttttgacgtcaaagtgactccagagtcccgtgaacttgccgaggagttgggtgtaaagatctttattgctgatatcatttatcacttgtttgatcaatttaaggcctatatagataatttgaaggaggaaaagaagaaggaagcagctgatgaagttgtattcccatgtgttctcaagattttgcctaattgcattttcaataaaaaggatccaattgtcttgggagttgatattcttgaaggcattgcaaaggtacccttgttttattttatttttttatttcgtattattggtagtgtcagtgtcgcaaaccgtaacaagtcggtgataaggttgtggccttatttttcatttcatgctttctgtcatagaaccgggcgaaatacaaaatgcaagtagaacttagtctgcttaatttactcctaaaattgaaggtggttatttggagttgttaaattaattgttctaactcatgaaatttgtgttttgtatggactttctagttgatgtgtgtagttgtgacttgttaataaccaggtcttatggcatagggaaagggatcgagagttcttttattttaacattttcaacagtatcagatgaattattagttctttgttaacattgcacatttctctgtataggtgggtactccaatttgtattcctcaaaaggagttcattgatattggccgtattgcttcaattgaaaataaccataaacctgtcgatactgcaaagaaagggcagaaggtggccattaaggtaaatatttaatgcttgtattagtcaatttcaatttgttgtctgttgtgtagcatgataagtacggatttcatgcgttgtcaacattatcagtaaagtaaaatattctctttaaaaattaaaagtgaatttgtcaagttgatgctttgaaatataatatgtatttgggatttgcaaattcttgtgtaacttttgtgcaccaaagatttgtaatcagtatttctgtatgacttgttgagcttttagtctgccaagtttaaattcttgtgaggttttctttatccagatggttcgtaagtttttaaagaaaataatgcagattttctgattttaataagagtgaattaattatgttatgtactatttggtgaaactttcttcatgggtatggttgttatgaagacaatttgagttctgaaaatgtattcatcacctgaaaattgaacttaaagttcaagcttttttgacttgtctcaaacctttatgtcaatcatttcactttaattatcaatatgataagatttggtgttttcattcaacgtggtagttaagagttgcgcttatagctctttttgttcttgcgcttttgcagattgtgggcagcaattctgaggagcaacagaaaatgttcggcagacattttgagatcgaagatgagcttgtcagccatatctcaagaaaatctattgacatcctaaaagctaactaccgagta

SEQ ID NO: 186726 - DNA, 732 bp, Cannabis indica
atatatattataaatatatttttccttcttcatgttttgatataaaatttcgagagaaaaatctttgtttcggttgtattagtctttagtgttacatttttattatttatcagactaaaattcttttgtaatcttttagttcttataaagttctttttaaagtaagtgaagtgaagtgagcttaaattctgtttcattagagccttctttttctgtttgattcattcatttatttaaaaaaaaaaatgaaaagcgagagagaagttgaatgaatgaactttctttcttaaacgaatggatgacataaaacacttcaactaagttttaacactaaatacatgacatggcagcaaacaaattgatgctcttctcctttcgctttatcactggtaatatttttgaactttgcttttttaggtgtttgggatttggtaacaagaacttgtggtgtatgggtaagaagtaattggcgaaatttatttcatttttggctagacagccactacaattatactgcttttatacttaaaagtaattttgtataaaaataagtatagaagtttatgatgacattggatgggactctcttattagtttgtgagttagctgttaactttggttagttctagcttagctttacttggtttggttatagtttcggttaagtgctttgttacttttgttgtgtatatattgtacattgtatcatttgcttaatcaataagagttctt

SEQ ID NO: 186727 - DNA, 6084 bp, Cannabis indica
attaactaaacaactttttggtttgtagatgtgaacaaattcctcagtggattcaactgtacaattagaattgaaaaaaataatggaaagacatttaatggggtactccaaaagggcttctaaaacaaattttcccatctaaggtcaaaaccacgaaaaaatcaaaatccctctaaatcaaattctctttaagcctgagaaattagagaaatgttaaagagaacttatggtgtctaacacaaaagtgacatactgttattggtgcaatttaatattggatctcacacattataggaaatcgttaaccaatcacaatgcgtcacatcagtatggtgttggacaccttaaagtgcctaatagcaatgctcgagaaattgggtgagccagctttactgccattaccagaaacatctggagagtttcctattaatgatagtcatgcaatacttatggcgaaaactgtgatcactctgttgaaagcaaagaaaagaaagaggaacagatcaatgaataagaaacaatctaaattcaaaaattgttttaatcatcctaatgcagaaaaatctatgtatctagcaaaagaaggaaaaaaatcatgatactttaaaggaaattgctgataacaaatatcaaggtaagaagtaaaaaccatcacatagctaatttttcaattctagaaaacattttgtactacttgaattttgtagatttgattttgatgtgttttgataattcatggtttagagaaagtgagaatgattcactaaagtcaattaataaaaaattagacttgagagtttgtttgcatattaatgattgatagagaacttcataatcactacaaaaatgatagaatggttacaaaacaacttcaaaaacaaaattagtttaagataataatggtgaatttcaaatgtatatacaataatttcttgaattgccttcttcctctcatgtaataaatttttaatcatggaaatggaacacactacaatttgacaaaaataaaaaaaaaaaattaatgaaatggtatttatcaaacttaccgaggaaattatcaaaagaaatagaaatggcgtcgcccgggttcgaaccggagaccttcagtgtgttagactgacgtgataaccaactacaccacgacaccatttgatgataatagagcttatatatttttaataaaaacaacaaaataaatgttagaaattcttattcaatctctcctcgggttttgataattctcccaatcctctctcgttgataatatagctcagtgggagtttttcttgtgtgagaaacaatggttaatgccggaaatttgaattttcttctcacaattcagagtactactactactacaactaccacagctttctttcttgttcttcccacacaaaactcacctgaaccatttcctttcaaactggaagaatccctcttcacctttttcaaatgggttgtgttatttctctacccatctgaagttttcatctgttaatggccggagacgaactgggtcgagactattttcatcgaagaagaagcagggtaagcaaggagtcgaattcttggaaatggaaggttttgatgatgatgatattgatattaatgatgaagaagaagaagatgatgatggaagcattatattgccattggagaagatgaacaagtggttggagaataagccacgtgggtttggtgttgagaaggtttatgatacttccattgaagataaattgcttgaggaattggagcaagctagagtggctcaggctgctaatttgaataagctcaagaaggatacaaacccaaattctgatttgaagaaagatgaagaacagaagaagaaaggtttgtttgttgattatttgtgttaaagtttcaatttttattctaatttctgaatttgtgtttctgggaatttttgtaggtaataatgagattcctccaaatggaattagagtgagggtttctaaccttcctaaaaagaagaatgttcatagagatttgagttctgcttttaagggggttcctggtatgatttgtataaatgctatggtttctggaaacaagaagactagagaccctatttgcaagggttttgcttttgttgatttcaagtctcaaggagatgctattaggttggtacattttgatattaccttatagagttttgcttctgaatttttgtccattgaaatttttttcttcaaactataaaaatcgttgcaattatctccttgcagttgcattctagtcatttatttaagcaatttgttaatggagcattataaagttgatttaggccagataaagaatctagacaacatataaatacataaatagcagtctcatgataaattataagagtatataggtgcatttttaaaactactgtcggtatgtttagtgctaatatactgaattttaggtagcttaaaaaatgagcagaatgtaactagaagggaataattgtaacgatttgcatagtttgggagaaatttttgtaacagagaaaagttcaagggacaaaactctacaaaggttatagttcaggggcaaaaattttatttactctaaattaaattacgcgaaatgagacccgatacttaattacatcaacgatatgatatatacaagtgttagacaccaatatttctccttaagagcattgctatttgctttatattgcataatgtgtgttactctttagtttagtggtttattggtgtaagaagatatttggttgttaatgtgtgaagagtggtgacttgttaataagagttatggctcactttaccaattaatgaaaattatatgaatatcttactctgactcaattctctctattctttatgtttccacttctatcttcttcttcttagttttatggagtaagccaacactcaaaattttgctattttgctattctttacattaagttttatatagattccagtactaaaccagtttttgaatgtgttttgtgtagtcattgatcataatggtgttcattttacttggacaggtttgtacaattgttttcaaaacaaaatgtaagttttggcaaagttcagaagcaaataaaatgtgagataataaactcgaaaacatcagagtcttctcttacacaatcttctagcaacacttatggtgttcctccacttaaagttaaggctgaaagtttgggagaggtccaaattgcagattctgataccgatacaaatgactcttccccgaatgaatgggagaagagttcttatgttgaaaccgaagatgttggcaacgagcttcttatgtcagaattggaagatggtatggagaatttgaacttggttaatgctttagagaacaattctagtgataggtttgaagaaggaacggaatctgagtcccgaactgatgacaattcagtttcttcagaagtggaaacaattcgggcacttgagaaaaaactacttgctaaactagggaaagaagggaaggctggtcctaagaaaaaactagctgcaaaagctaaaggagaaaaagcttctaagaaaaaacaggttgtgaaaacaaaagaagccattccaggatctgccaagaggtattatattattgataacattgattttgatgaatgctatcaaatgggatcaactgttttttctgtttgttgttaatgtttaacacaattattgtgtttgattgatattaatgcaggctaaaggtcagggaaaaggctgtgcttaatgatgtgatatctaaatatacacaaaaatcttccattgattcaaaggaaaagagcttagttagtggaatgtgagtgtgaaagattttagctaagagttttgttacttacatttttgtatatctaatcttggattagacttaggtaataggtaaatttgtatgtttattagtgactatgatcttaatttttttcttttttaaatataaatatgattatttctagaaaaatatttgatgatatatctttcaaagttaagaatgtaatttacaatctctaatccatattacaaactgcaaattacattcctttacagaaaataaaagtgaaaattaccctaaagttaaattccttggttatgcacaagattctcttatgcaattgctgaaattccttcaacaacttctctatccaaactccttttcaaaaaaaaaacttctctatccaaactcctctcaaatattttattttgtttaaaatttgactcctaattatgtgtaaaattttattagtgttcatttaactctaatagttaatttgttatcttaattaaagtcctttcaaaagaaaaaaaaaaataaaatttgttggtattgtgcaattttgcaaaatcaccatattaattgcatttgttccaaagaaatatctcactaaatagtaaatgggatgtcacattaaaaaagaaattaaaaaaagactaattaaaatttttaccgtaaactttgaaatgtaactaatcatgtcccctgaacttttaagattgttaaaaatgcctcctgaactattgagattgttggatttaaggacttttttctaattttagtaaaaaaatctaaaatatatgaaagtttagggaacatgatttagtacatgtcacaatttaaggagcataatttggtagatatcaaagtctgggagcatagtttagtacatgaacaatcactgaaatagtaaaattgaatgaaattagacaaaagtctttaaatccaacaatcaatagttcatggggcatttttaacgaccttaaaagttcagaaagcatgaattggtacatgtgaaagttcaaatgacaaaaatcctaattagcttacaaaaaaaatgataagtacaagtatttacatttagaccccaagtgttggattaggatgatggacatgacatccttaaccttatcttaccaaaaccaaaagtttcaatttcttctcacaacaacaaatagtcatttttttgtatgttattcttattcaaatttcaaaccccattaacttaattatgttaactcatttgggaaattggatttcaagtccaacaacaacccctttgttagtgccctgtgttttttcaggtagagccatagccatagccagtggcactagtagtattaatacaaagtttagagaagtaataaatagtactaagctttatgcttctgccagaagaagagtacagagatttaatgaagatgatgatgatgatgaagaagaagaagaatatggttatcatgaagaaattgcaatgttggaattgtatagtcaaaatgttagagatgaagcacttcttctacaaattttgctcgatggccaagaaatccaaatccttatctttaaggtcacttgtactactttttctttcatactatatttatttatatttatattactcttctctctattctctttccactaaactaaatatcatctttgcatgtatcactttaattgtcattttttcaaaattcaaaaattttaatttttaaacatataattagaattcatgtttctaaaaattgattcttttcaaaattcaaagctgttattctcattttgtatatcttgaaacaattcatgactctttttaaaaagttttttttttaattttgaaaattgtcacaattgtagacatattttgaaacaagtcgatgtaaataattaaatttaattcttaaataaatataagtttaatttttaactgtaataatacttaagttataatactgaaatttctataagtaaatgaccgttaaatgttcagtcattatatacgtatcatttttttattagtatattttaattaatttttaaataaaaataaaaaatttaatgatttaaaccaatcaaaaactggtacgtggttattaatttatacttgtgaaagttctggaaataagttaagtatttttacctttcaaaaattaaatttaaatatttatgtacaagcaagagttaaattaacatatttataccgtaaattattttttaaagaattatatatattcataacttttgatattatttaagaaattattttgcatatcaaatacacttattttgcatatcatatacacttcttcc

SEQ ID NO: 186728 - DNA, 1973 bp, Cannabis indica
tgaatggagtgcgagttgattatttttataacaagttggcaatgattaacgcctatgctacaacttgaaggggagtgttaataaatgtatattagttgtaaaaattaggatgaattgtatttagtagtttcccatttaatatccaaactttatatataaatataatattattctatgaaatacaacatacaattcaatttactgttttctacaccttatatatgttgcaactaaaacaagtgaacgcttataagttatgagtgaaactgctataatcatgtcttttgcctctactttgatgtttgggctgtagtttttaccaacaatttttcaccatttgtcttaaatatacaaagaatgagggtttttttttggctgagaatgagggaattttcggctccgtagccttccctttctcccatatttattaagagcagaggtgatatagttgaatacaattaggtgatctacttagagataaaagtcacagcgcgatcttctaaattctagttagattttagctatcgttacagatattctttaatttaacttcttcaaaattcacaactgcagctacttttgcacttttgggagcagcttgcaggttggctgcttgcatgatggcctgtgtttgacttgttgccaattttaggtgtggaagaaggcttgctgttgcaggctttttcggtcactgcgggaatttttcccataaaaacactgatatgacatagtatgtttaaaacttattttggcatatatagtgccaaaataactaaatttgtggagggaactgtgttatgttgtcaaaggatacatatgatcccaactaatttatctgtctgtacagttaatacttttactagtttgattctaggattggaatactaggaaacatgtaattatggatgtaggagccgtcacaggtgttcctttgaattgattttatttttatgtgacttgtgacatactggtttctataatgtgtttttactggtaaaaggttcaagaactgctaaaagataatgagtttatgcgaccagttgcaaatatggagcttgcttggtttgtggtaagtagtactgcctacttgatcatcttaattacttactaaaccaaagattcacattgtaatcagaaataagtcatccaatttaatattccttttctgcttcataggctactgctttgttggctttgcctgctctttttttgttcaaattgttttcagttgtcttcaggttagtttgtttattacaagtaattatggtccttttcagaggaaaattttatcagactccatactttttcttacctaaaagtcaaaatctaatatgatgcaggaaaaaaacaaagaatatacaaaattcaaataccaaccacacaagacgtaggcccaaagatcccaaacaatctcatcccagtaaataagagcacgaaatataggtgcgtgcgttgtacttaaaaaaattaaaaccactaattccttgggtgtctaacaacttcattgaattgctattttggaaagcatgtgtgaaaatcgatatgtttgctttttccatacttttgttttccattaggtattttatgttctttcttcataaaatataaagtcaaaatttggtcaggaaatttggctttacaccttttttttttgaaggaatttggtggtccccaaatcgatcaagaaatataacggaaacaggtcttgaatcatattgtaggagtgataaattagagaaaaataaatatttgattgaattggggtcagtttacaggttaacttgtactgaatgggctaggaatgttctaaacttaattggtgtaataaatgttgccaaatacaaatagtggattgatgagtaacaactcaatatcccaattgggaaatgagtaaaagcagttttattttgcactccaataaattctaaaaatactctattttactatttatattttgtataatatatattttt

SEQ ID NO: 186729 - DNA, 1305 bp, Cannabis indica
aaaaccaaaaagctcaccaaaatatcaagtggattgcgtatcagtatgaagtgctttcctttctttattaaatcacttgataaaccagacaccaaatgctttgctatttgctgtagaaaatttaaacattagataagcagcttcaggctttcatctaaatacttaaaacctatatttccttaccttacagtacctgtacttcttttttccaggactaaaaaggatatcatctataactttatttccatcagattcctgttggggtgaatgataaaaagcaataagttatgaacttatgtctaatgaaaaatgaagctagaataacagatgaagcaagctgcaagtctaaatgggaggggggcttgtagaggaaattttaacataaggtattatgatggaaacacaaagagatatcatataattgagacggaattagatagcctaataatatgttgttatgatgagaaacaaaaagagatggagagttagctgcataccattgttgatagtagttcctctctgtagggcctatcatagcctgtgacccgaataaaatttgcatacaggggttcatcaagcacttctgtatcatctctctgagtatatccaaaacaaaacaacggtagcgtacattgtcttataatcactaagttttcaacaataacaaaggaaaatcaagatatcatgtcggaagtaaggtaaactagaaaaaacccactggtaaaagaaattgtttctatggtaaattaaaaagcttgactagcgatttgcatcgtgattggcattcaagaactagtggaagagaagtactactgctataagcatcataataaattaatctatacaactcattagtatcacaaaataaaaaacattactttagagcaataaatgatacttcaattagaaatacaaactttgataatggttcgcaaattatatcaaatcccaatttcacaactatcaatctattctctaattctaatgagagagagagagacacacacacacacacaaagactcctgttaaaagaacagcattgattaaatccaaattcgaaggcaggtgtgtactactttaaattcaagcattcaccactatacttggtttggtacagaatcgaatcaacactagtgtagtgtagatcatttctgttatctctacgttctgacatcaatacatacaatcgattccagaaatttcacatttagtgccccaacctcgtagatttcacccagaaattgaaatctttccaggaagacaataaaaacaaaattcctactttggttactcaaattattttt

SEQ ID NO: 186730 - DNA, 1774 bp, Cannabis indica
acagtataagtatttttagacgtttttaagttcgagtgcttagtaatttatatttttttgaaaaggagacaacaaaggtcaattgtttagactgacctcttcccaagtttattagggagccccacttaaggtggaggtaaaccgtggtaacatgataaacataagtaatgtccgagtgcttgaattgatctcaaacacttgggaagtacaatcattaacactacaccctctatgcagtccaagcagtcaagtttgggtgcttagattgaaactttgcaagctccaaacaagagaatggaaaggggaaagacaatctgtcagataacttgatatcaaatgatagaaaagcataaaataattttacccaatatcatcagacagcttcaggtgcgcaacaacacctctacatgtccttagaggaatccttccagcaagctcaggaagcatgtctgctttggcacctagacatattattactgcctggtattcccctaatattacattcaccgcaaattaacgataaggggaaagaaggatgcattgaaaaagaagaacaatctagtaaataacataaacaaccaaagaatccacttaagacattaagtaataattaacatggaacttttaaagctaaaatgaactttctaaattccaaaacatgtaagtaaatagactggctgtttgatgaagcattcaacgacaaacattgaggaactgaattaccttctaaatcagtgagtttgttaacatttttcttgtgcaagtgtagcatttttcaccaacgccggatgcagataattcttttgctaaattcttacacgccgtgtaaagcgcctagcaaataaccatcagactgtcaagtcatgaaaatcaaatatgttatatttaactaagacatggatttatgattcagacctgaacataacgttgaggatggatatttacagcctcgggcatgtagaaagccttgttcaagggtaaacataaattgggtgcaagattttggacagcatccttctcaagagtttctattctgcaactggaaagacaactccgagcattctaatggcgcagagaaataagcaccaacattacaataacatcaaaaatcaaacaccaagcccttgtgctcataccaagttcagagataattacatcgcttaacaatagcatgtttttcatgctgactgctggtctcaagattcccctggattaagaaattttccaccaataagtagagaatcgttttcaccttttataaaaaaatatcactagtacaatttaaacccagcgtaataagaacaagattaaggtaataataaaagccttttcttaacttaattttgcaacatatactcaaataccatataagaacaaggttaaggaaatagtaaaagcattattcagttaattttccatcatgtactagtgcactccattcatccagaacaacctcatacttcacgcttaaaaacacaacatttcacaaattacaaatatgaaatagagtacagaaaaaagttgaaataactgcagttatataaatatatatatgtatacaaatatatttagagagaggaagagaccttcttcgaaccatgaggccttgaaggttaggatcaaaatctgaaattccagagtttaactggccagaatccattgatgcttctgctgcttcagcaacacccaaaagctttaaacactcattccaacactcagcacccttccatagaagcttagctacatgacataacacccaacgtcatcatcaaca

SEQ ID NO: 186731 - DNA, 1906 bp, Cannabis indica
tggagggaaggtccattaatggcggagcaaagtggtctgaagagaagaatacggcgttgttgaagagtcgcagtagtactgaaattcatcgcaagcttagtagtggtactggtaagtaagcacaattgtcagaggtgcgcacgccccatacattttcgttatgcttacaaagctaacgtgcgccctatcgcctcactcgttacccccttctttttatatatttatattatatatattttaaaataaataataaataataaataataaaaaatgatttaaggcagtttgatggcttggcattggcataagttgggtaagtagtaggcctaatttgataattatacagaaataataatatgtgaatattataaatgcattgattaattttaatatagttagtttatttgaaataatattgtgaatagtatatatagatttagtgtatgttttggttacacatattaatatcattttgctcatattcattcttgttagcattcatattgggtacaatttgtgtctgtcacttattataggtgacgttttatgattgattaataatattcttaaaaatgttacatttttaagttatataaaattcgatatttaattatactaataatagtgtaaggctatatttcttttagttattctctttggagaaagaaaatttgaataaggtcataattaattcatatgataaggttattttaagagaaatactaaagggtagcactctcctatgtgttaatattgctattagttcaactaagtatcgggtcttatataatttaatataatagtttttagtgaggatcgctagccaatcgtaatgcgacatgtcgagatagtactagacaccactagtgccttattgcaatgctcttattttaattaccccaagtacaagaatgtaattaaataattaaaaaggttgaaagaaacacatacatcatacataatacatacatgtacagataacagatataccatcttttattatttctgtttcgtacgtgtttaattaagttaactgaaaagttgaatacatataccattaatgcatatacagttccttttcttgtttctcatttttgatcagacacaattcattgcttttttatttattattttgttgcattccacagagaaagaatctgcaagaattgaaccccaccgaatcagaggtagtgatgaatcagctaactgttcaaccttagatataacagtgagccaaggccccacgagccctctcccaaggggcataccaactttctcagttgaaatcataaacaactgtttcactggctgcaccatctcaaatattcatctcaaatgtggatggttcagctcagacaatctcatcgacccaaaaatcttcaaacgccttaattttgatgactgtcttgtcaatgatggcaagcctttactcaatggtgctattgttagtttcaagtattccactactatgcaattccctttatcagtttcttcagttgtttgtggttcattagtttgatatatagtactatcgtatatacatattataattagatatatatatagttactacttatttggggctatttgctgccaatttttggtgtttgattggaaattttttgttctagttattataatagaaaatggttcagacttacaattttgttgggagtataaaattaagaacaataaaggaaaaatgattctgaaatgagtgggtgggaaaaagcttctgctttaacttgagccttaagtagtagacgacaaaaagagttattgtttactaaaattgactcgacataatggacaacatataaaactgtgatcttcctttgaaaattcgaactgtattggcatgttcatttaggtctagcttgttctgtatgtttttttttttaaaaaa

SEQ ID NO: 186732 - DNA, 1148 bp, Cannabis indica
atgtttttttaataaatttaaaacagaatatgtactgataaaattgaaaaaaaatttttttacagttttataaatatttgatatttttatcgctaaaaataaatattaaatttatgttacttacaaaattaaaacttttacaacttacaccactattcatccaatattaaaataggattaatattgcctaattttaattatatattgtattctacatccataattataataagaaattgctaataatccgtgaaactaacttttttgtgatactagacactactcacaactagtaatagtctttcttaataataataattattataaaatattatatatttttaatgtaatcatatcaacttatatattttaatataataacgcgtttagaggtattatataattagtaaataattaaaatacaaagtaagtttatatacgaggattttacaaaatattttaaataattataacgtatatgaatataaaaaaattaaactaaataatttttccgataaaaaataaatgaaatatttgtttttatccgatgttaaaaaaagaaaagaaaagaatttgttaatcttaattaagattagattagatctaatctaaccgccaaagtaatataatttccaatgctataaaaggagaaacctttctctccattttgacctcaattttccattcccatttccaaaattcagaaccagacctcaattccccaccgacctagatatggaaacagccatcaatagacagcgaattttactccaacatcttcaaccttcttcatcatcatcttctcctcgacctgaatcctccccaatttctgtaagttgtttaaattattttatttgattgtgtagtagctgatcatgatatctttgtgataaagtctgttcctttcgtagaatcttgtgttgaatttgaaggaattcgttttggggttcattcaaaatttgattttggtgttgttgtgatttgtttcaggcatcggaatgtttggctggggatagtgctgcttaccagagaaatcatgtgtttggggatgatgtcgttattgtggcgtaagtctttcatttttcagatttggattagtttttatatcatctttttttgattttgggattaaaaatgtcttttttaag

SEQ ID NO: 186733 - DNA, 2617 bp, Cannabis indica
acagatagtgattgtagttttttttttaattattaatattttttgattatagttataatatttgatatgggtacgttaaacatacaatgttttctttttcttttctttttcttttcttttttctcatttttatttttccatttgttattttatataattactatattaaatataattgtacagattagagaaattcatgatgtgccaaaaaaactataaataaacaactctgtacatttgtatacacatacatatttatttatatttgtatattttttactatctcatttacaagttaagaaaatagtactaaaaagataataaaaaaataagattaaagctcttgaagaagcccaaagaccaacgccttccaacctcatcttccattaaatttaatggagaactaaagctcaatgttccttcttcatacttgactcaagtgcttctaaaaattaattttttttttctgaactcctcaataaacccattcataaaggtaggctaaagaatttcttacattcagatttgagattggtgaagtttctctcttaaaaactctaaaatatatctgaaagatggcaataaagtgtatatatatatatatatatatatattagattttaaaaaagaaaaagcatacaaaaattaataatatttattattaaataattaaaaaataaaattattataaataccacaccatgaaaatcagctagaaaaatggtgaaccagcagcaaaggaagtggaggggctggtcggggacgaagacgacacacggtcaggtcgataatggctccgtcgattggggtgagaaagaaagagagcaggaaggggtggaggcggggacgggggacgactgggcggtaagggcaaggcgtagacaacgcacaaagcaagggtggctggtttttctagtattttggttgatattcagagtgaaagaaaaaacgcagaaaaaaaataaaatagataatggggttagggaagatgttagggtttttttatatataaaagtaaacttttaggggcgacaaaagtcgcccctaaaggtcgcccctaataaataaagtgtgtcagattaaatttttagaggcgacaaaagtcgctcctaatactattagcgggaaaaatcccgcccaaacacaacaaatatatttcaattttattaggggcgacaatgtcgcctctattaattataaagtcgcccctaatagtatacaaattatatataaaaaataatcagattcctttaggggcgacactgtattgtcgcccctaatactcctattattagaggcgacataaagtcgcctctaaattggtcgcccctaaagcttaaatttgttgtagtgggagctttatattctcacaaattctcttctttattaatatacatggtgcactcatttgacccacatgttatccttctttgtagtaattgtccaaacatatttaatcatggctgctttgttccatttcactatatttttgaagcctaaacccctttctcctttaggcctacacactaaatcccaggccattgctcctggactaagcaaagctgcttgtctcttctagagaaaactctcgagatctctttaagaattttctttagaagcaccataatttgactttagtatgaatgtatagtcaatgaaactgaattgatcaataaaactcttctcacaaatgataaatttttcgagctctaactttttgtccttgctgtcattttctcaactaacaatgtacattctttagctgagatttagacagatggaatatcatacttattttttcatcttatttgagaaagagtttactaggcgcaaacaattagagaatatattaataggaatatattattattatatactcaaaaatgttactaatttgtttaagaaaaaatggcatgaagaaaacctacctagctagcatgagatgcaatctagtaatctacatgggtaatttatcatatgtctaaaatataatattaactattaattaatgccaaatattcattaatattatatatatatatattaatcatctacatctaataatattatataaatatatatagtttcatctaataaaatataatttccctacaagtagtcggtggagtattctttctattctttctaagcatattgatcctctacatctttgaccaccataatcattttagtccactacacctctctcttctattctatctatttataattttgtatttttttagtcaaatatttagcaagtaatgatattaatttgcacttaaaataaacactaaaatatttttcttttaagttgcaatcctcagctaattctacaatataaatatgtataaaaatattacacaaagtaatatggtaattttttacttaccaattacatttaatttagatgaaacttaatattatattgttgtgtgtatgacagtttagttcatatcttaatttcaagagcatgaaaaaaacaagttatttcttaataaaaaaaattaattagggtaagtttattgtacgtacaaatgtacaatcctttaaaaaagtatttcggtagactccctatttaattatttcagcatataaaaaaaaagtttagtcaatt

SEQ ID NO: 186734 - DNA, 3645 bp, Cannabis indica
ttgtgagatgaagatagaggtacctgagtggatgttgagtggaaattgcagggaattgttgctcattaaaaacaacattacgtgcaatgtatatctgccttgagagttctcacacatatatcctttatgatgaggagagtatccaagaaaaatgcattgttcagatctaaaatcaagcttgtgtgatctataaggcctcaaatgaggaaagcaagcacaaccaaaattcttgagaattttgtaatcaggttgagaaccaaatagacattcatatggtgtcttgtaatcaagaacagctgttggcattctatttatagtaaacacaccactttggaaggcaaaccaccaatatgcaagagataaacccgattgtgccaagagtgtaagaccagtttcagtaatatgtctatgttttctttcggctcttccattttgttcatggtcatgtggacatggatgttgaaaccctattccttggtcttttaaaaacctagcaaaaggcctatactccccaccccaatcagcttgaacatttttaatgggaagattgaattgcttttcgaccatgcttttatatttaatgaacacatcaaaggcttgggacttgagtgttaaaggaaaaatccaggtatatctagtatgatcatccatgaagtggatataatacctaaagccatccttagagggttcatgagatggaccccataagtcactatgaatcagttccagtggctgtttggcatttctaagagatagagagtaaggttgtttgtggcttttccctttttgacaggcaacacaaaattgcaagtctttgatagtgccagaatgtgggagctgtttaagcattcggctaagaacagtcgagttaggatgacctaacttttgatgccaaacattgacatcttgactgacagtagacataaagatactaggattgccaatgtaattggaagaagaagtagaatctttattaatgtgtaaatgagaattacaaagtggcactgtgttggcagtaaccaaattacaattggaactggtatgaacattacaactagactcatctaattgggaagtagttgtgagattgcactgtagagtatgtggtgaggtcttggatgctcctagcacatacaagccatctctaactggccctttcagaagaactgccccagtggacttgtccttgacaaaacaacaactcttgtgaaattcaagaaatatatcattatcattagtgagtttagagacactaactaaattcttttgcatttgagggactttaagaacagaatttaagtgaatgactctagagttgtaagagggtaaagaggtagaaccaacatgagtgattagaagctgcttaccatctcctacatcaacagcttctgtccctgtgtaagcagtggtagattcaagtgtttcggacccagtggatacatgagctgtggcccctgtatcagcaaaccaaacatggtcatcaccaaaatcaggtaaaatagcagaggaatatacctgagggtcattatccatgtccacttcagcaagaaaggcacgaggattggcagcggttgtttttgggggaacccaggctttatcaaagcggtagtggcaaaccggtgcagagtggccaaacttaaggcaaatttgacagatcaagcgagcttgaggtggtatgtaaggacgaccatttcctttaggagggaatcttgagtaagagtcagaggcatttcctcgagcaggtggcggattgaatcgattgttgttcgatctggaagcaccaaatgcaagatttgcttgcattttaaccgaaagatcagtcatgttgttgtgatgttccagtcgactttcgtgagacataagaagcgcctggacttcctcaagagataaagaatcactacgggatgtgattccagataccacagcatcaaactcgggtccaagaccatttaggagttgaagaacgatgtcttgagtgttcaaagaactaccagcaatggcaatagagtctgcaagacattgaactttgtcaacataatcagaaattgacaagttacctttctgaatatgagagaattggcctttaaagttgtagaagccgtgcacgagactggcttgaaaatttttgctcaagagctgtccaaacggcaaaagacgtatgatgattggccacggatgcaagaacaccttcagtcatagaagatctgagccacgagagtaggagctgatctcttttcttccattgaggataaagcggattagtagcaccattaaccagggtttgcggaggagggacaccagagaagagaatgtcgtcaagatcatgcccaatgaccgtagggacaacttgagatttccatgccaagaaattggtacgatcgagcttgatcgtgagggaagaggataaagaactagagaacggattccaaggtggaggatttgagttggagggttgagaagagttatcttgggcaattgctctgccagacgaaaccgcaggaccagacggattggaagactccatgggaggcatctgataccatgtagaagcttgaacaagcttaaagaggtaaaaccttgaggtaagaaccaaagagacaaagcagagaacacacagaacaaaaggcagagaaaagctcactctgcaatagtgagcagagttctttatttatagggatcaagagtacatgaattagttacagagaaaaacagttagttgtaactaactgctacaacagtatttaacagctaagaagaggaaaattaagtaactaattctttatgtgtaacagagatagtcaattatacgaagatattgtttattgaacataatcaataaaaatagtttaatcaagctaattttgaaacattaaaataatatgaataatatttttccatcgtgaatgaacaacacatattaatgacaaacagtcataattattcaaactagagtaatataaaaaattatgacaaaacatgttcaaaattctcgatattaattatggattaattataaaacatgatgttaaaagacacatgaaaatattcttgaataacttgtgcatccaaatctaaaaaatgactacaaatcaaatgagtatagtaaaaacaccattattagaagaaacaacaaaccataaaaatttgcaacacatgaaaacaaaatattaactcaaatgaaaatagaaataattggtactactcccccaaagctcatcacatatgaaagtagggaaataattggtactttttcattctctttttaacttctctttgtgtagaaatataataccattaggtttttttatttatttatttttgaaacagattcctcacgagaggcaaatgatttacagtgaaattattaataaatttaaaacttacaacagtaggaagattcttattccaaacagtcttaatccattgtcaagagtatactacttggctagataataagaaacaaaactctaaaaataaaattaaaaccatgaaattaggttctctaaagatcattaggttatgttttatactacttttcgtttcttcaaattagtaataattgagagtgcaaccaaagtcttctattggtatgaaattttttaggaagacacttaagaataaatttatgagggtttagcttaaaac

SEQ ID NO: 186735 - DNA, 4426 bp, Cannabis indica
aagagttttgattttatgatcaaattttttttagcaaatttttaaagattcataaaggttactttaacatcagatttgagttttaaaggataaattaattcatgtgaaattactgaaattgtcaacaaaatggacatagtatctgtatctatcttttgataatattggtgagggaccctaaacatccgagtgaatgatttctaatggcttgctggctatttttgttgatgagtgatagtgtttatgtttggattttccaatatggaaagcatcacaaaattgtggttgaactttgaaacaaattttctcatttactaacatatttttcattacatttaagcttagatgaccaagactcataagccaaagagtgggactgctattactaactgactgaactaacaaagactaagtagtaacgcacactatgcagcaacatagtaaactaaaagtaggactaaaagaagttatcataagtcatgcacatattaattatatgtgaggtgattctcttatgtgtcccacataaatattacatttttacaaacgcctggtctgaatgactaaagtgcgtgactactcatcttgaacctgtaaagttcaatgttgtcagtacatgaacgccatatataccaccgatatagttgtaggcattctatctcataaatgaccttgaggttgtaattctgagactttatatgggagtaacaccaaagaacccacaagttcatatgttacttaaggaaagtgaatggtcagtatgcgactcctaaagtcacatacatttgaatattaactctgaacagtcaaaattattatttcatttatttagtaaatgttttttgtcttaattaaatttaattaatgttgtaacaatcacgtctaatcagttatgtaatccaaaatatcacttgctttctatataaagaagtaatccaaaccgaaataagaataataaaaaaaaattcttgtaaaagtggactaagcagaccaaactctagctgaacttttataattctttgtctccctttatatatatattgttattttattattcatcattttactttgagtactctccattatacgtgaatactcgtaattctgtaagtgggtatttatgtttatctcatagtaaagtaaaagcaggaccaatagaagttatcaagtcgtgcatacatcagttatatgcgaggaccaagtgattctttactgcgttccacataatgaccacatctttataagagactggtctgaataactaaaatgcttgaatactcatcttgaacccgtaaagtttaacattgtcagtacatgaacgttcaatatacgacatgtatagtcacatgcgttctatctcatatataagtggccccgagattgtaatcccaagattttatataggagaaataccagagaacctacaagttcttatgttactcaagaaagtgaatgatcagtaggcgactcccaaagttgcatacattcgaatattaatcaagaacagtcgaaattgttcattcatttaatttattcaacaaacgtttttcatcttaattaaatttaattaatattgtaattgtcctgtctaatcaattatgtaacccaaagaatcacttattttttatataaaggagtgatccaacccaaaataagaataatcacaaaaattcttgcaaaaatagactaagcagaccaagctctagctaaattattataattctctttctcccttatacattgttattacttaattattcgttgttttactttgagtactctccattaattgtacatgaatactcacagttctataaatgggtattcttgtttatcttgaataaacttccttccctcaaacgatcttccatatatctactctatctcgagagttcttggtcttttctcaggctaactcctccatagcacaccgcttatctactagagtacatccacagatcccatcgtgagattattgaggctcttctcatttgtttgatattttgaggtttcattcacatggttaatttgggatccagttttgataccacttgttaggacgatagacaccatgtatatccacattggtatgatattgttcgctttaggtctaaatcctgacgaatttctttttggacaccttctcaaaaagatacttattagaaatattcatccttatatacccataatatttcttatttctcgccaatatgaaattttagttgcagacccaacaattatcattaccattctattctaccaaactaaacataaccttattatatatagtcaaagtcgatgggcctagagagatcatttgcaatttactactactattattattgtatgagagagaagaaatgtaatgtaatgtagtagtaggggcagttgtgtgtattgtcttaggagttaggagtgggagcacgtgactatcacgagggtcccccctcgaatgtctgtcttcaatccattcaaataattaatttcaagtttgaaccctcttgatcaatatcctctttcttctcttcacctattcattcaccattaattgaatgtactcataagtagtaactgttatttttggattcccttcttgccccatctacctactcatatttacactacaccatttttatttctccaatatatatatacatgatggatgagaaattttccaacacactatattcttaaaatgattaacttcatgctacaaccatgacaaaaacatgtcttaattaaaaacatagttatacatgcatgggtatgtattagtattaataaagcaatttagggcttatttggtaggccatataaagcaatatattgtattaattattacaaccaaaaattttaatacaatgtatgttgtattatctaatacataataaatggtccatattaacttgtactaaaatgttttcaaaaagattcggggtcaacaccaaattcggaccccagacctcggatctcggatcccagacccaaacccagatctagacccgagactcagacgcaaatgcagacccgtagttggtattggggtcgagtatatcgaaaatatattataattttacacaatctattaatacaagttaataccaaacatagtattgcattaaataatattaatacaatacaatataatacaacacaatacaatacaatataatacggcgtactaaacgagacctcaattagtaatattatcatgcattggagggtagttaagtaattgatgtagtaatgatcatgtattggcaatgggacctgggtaaggtagataagtggagtattgaatcccttcatacagctaatatatatagctaagtaagtaaccctttctttatggctgtagctaggagaaagaaagggtcactcacactattcactaggccatatgcatatataatgcattcactccaaaaatgacccttatcttccatatctgaatgggtcccaaattctatttagacccccaattaagatttataagggtcccacccacttttctttcttaccttctacattttttcttttttgataaagaccatctacatttacaataatatcaaaaattccagctttgccaaaatttcttagtagtagttgtgctagttgtagttgtacgcatttaatggctaaaagcataggcttaattcaatcgtatagtcacaagtcactaatacaaaaatggactttcttgtcacttttatacttagttatccaaattaaagctaaattttgggtaaatattattttaaattttatggcttattacgaaaattatgatcaatcaatctttgaattatgtgttttgtaataaaatatgatggtaccctagtctaattttagtcaaatttaaaatatatataacagtataatggttggtttggtttaaattttataagctatatttttagaattaattttttttttaggtgtgtttggataaaaaaaaaatcattttctaatttaaaagtcattttggaagaagttaagatttgtagttcttccaaaaggacttttgaaatttatataatttttaatttactcaaaaatttttgttattaatgatatctaaacacattgaaagttgatatttatataatagttatttaaacggtaaaaataagacaaaacttatacttattttatacttttagtgtaaattagaagcttaactaaatggaactaatattttttcctagaactttcccttccctatactaacagaaattggttaaaattacttatggtaccattatgctctatttggtacaattagaattattatttttttctttcaataaaatagagaaattgatgggaactttcacaaaaaaatacgattcaaaattttatttattcaataaatttgagaattattttggtgtcacgttctgtataataataataataataa

SEQ ID NO: 186736 - DNA, 2635 bp, Cannabis indica
cataatatattttagaatatataaaaataatcataagataaatgaatatgttaattatagaagtataattaataaatatctaaaaattgcatattgatatagagaaggtatgatcttgtatgttagtacaagagaattaagatcatacaatatgaataaaataagttggtagtgtactaaagtacaaaatctttaatatagagttaccaagtacagtttgctatgcactatactagtgcgcgtgattttgatttggatcacatatgtagatatgtggcaaaggtattgtgtataattttattatacatgactagaccgatataaaataatatctttcatcaacatgtcatttatcatttaagagttatgtgtatcacaacaatgatcattagtagattagtttgaatcctaagtatacatgaactcctatttgtgttcattgagttctttgattcaatcattaaagtttctcagagaagatgattttcacaacttctattttgagagcttaataacatgagtggttgggaacatattgtaaaatattagaatttgttatacccaaatctgcacagagtgacatgacgtttctctaggcgacacgtggatcattttgggcctggactgggtctaccacattagtatgctgcctagattgaattactcattagatactacttatggtaagagtgtcgtgcaaggtaaatggtaccatctgacaagcgtcgatttcacaaccacttcgcatatgcctgccagggtaaatgcaacagagagccttaaagatactttcctcctttatttatcaattatatccctattttcatgggatttccacacatgaataatgtaattaaggaaattaattagttttcctttttattcttcatttcttttgggaaacctaatgaatgtaattattccctataaatagcgaaggcatttcactatttaaggatcaaaaatctaattttgaagagggtatgttaaaatctatataagcttttgagaaagatcaagaactttttgcttctcttctcacaagtaatacaagtaaaatgggagtaggctattacaaccatcatggggtcaaacctctataataaatatgtgttcttgtttcgcttaatcattattcaaattctattatttcaaatcgcttcaaagactcagagttgttgactaaaagcgagatcaacattttagtgctttcattagatcattgttttgaatctcttcaacacacatgcagatggttgtaaccacatggagaggtaatcccattgaaataattgatctaatggctacggatcctaatgtgtaaactccagcaaattggggagatctagtgtggatggatcccagtccaaccattcctcagcctccaagaggtccccaatcagtaggacaaggagtgacaacacctctggttgggttcattttgggcacgcatgaatctagaatcactaatactcaagctgagcacactggtcggagtactgaaaaatccatttattggaaatcctccagtggtgattgttgatgataccaaaattaaaagtttacaagttgctttagcgaagatgcaagagcataccaaaactcttcaccatgatcaacaagatacccaagcagttgtgaattcggcctttaagcagcaaaaatatcaattccagaaatggatggatcaacaaatggagatcagtagagcccaacaagcagggattgataatcgctctaggcaggcaatcgtgttaattcagtgagcttatcagataactggacaacaatcagtgggagatacttcagttttacaggatctaaacaaaaggacagacatatatatccccaatggacaacaatatgggccagaagaatgtttggcccgcaacactcagtagactgaaggtaatgagtcatccaatttgagactagaaaattgaactatgagctacacggtagatgagcaacttttaccagcccattatcttagggggaatggtcagtataacatctgccctcaaacagatataccaaaccaatcaactactaataacataagaaaaaaggaggcctccaagtatatcagtcttaaacagattgggatctgtaaatgatttaagagatgatctaaattgtagaaagggacaggatagacaattcatccctcctaatgctcagccgatgaatgtaataacaatgtgcctagtatgttctagggtgtccacaggtgacacaagtcagtccacaggcacgtcaagtttatttagtggtgcaagctcgaatagataagcttaagagccttttacaaagcctgatcagcccaaaactcaccgacctagaacttgaccgactaggggataccccttttcactagtgttgcccctcttttttccaatatacgtggcagtctcaaaataagataggtggaaagtgggtataaaggtcaataaatatttatgataaactccctaagagattttatctagatttagtagtcatgttcagaaggtccctccgagagcttcaaccacatcctaatgtcaaggtattttattcatctccgagagctaggtaaagcctctagggccgatcattacgtctcagatgtgacttgtataggtgcattaaatgc

SEQ ID NO: 186737 - DNA, 2069 bp, Cannabis indica
gctcatacgaagaaggctctcccagttccacgaaggatctgcccttggaatattcaagatttacatcaacaacgtatcgaatgacgtaaacgttgctcttgatttacctttggatcagggtaggaaggatcattaattatatatatatcaataataaatgtacggaattgaatatgtggtactggtggttctcatttctcagacgtacatacatccaccgagaagatgctgtaacttttgtttggatttacattatttgtctttttttcattctttttagaaaatactacatcactagcatttatacacatagcttcttttcccatctatatatactctcacagacagtcattcgttttataaattgtaataaaaagaaaagtaagagaacagttaagcagagagctgaaaatgaagaaaggagaactagttttcgttccttttccgggtgtgggccacatcgtgtcatcgttggagatggcaaagcatctcgttgatcaagatcatcgtctttccatctcaatcctcatcataaaaatgtccggctttgattcccccaacaaatcctacatgcaatctcttggctccatctccgaacgcatcacgtttatcgaactcccggaagatcacaaagaagcccaaagttttagaaattcaaatcctattcagttcatcaattcgttcttcgaaaatctcaaaccttacgttcgaaacgctgtgaagaacctcatcgactccttttcgactcgacccgactcgcctacgctggctggtttggtcatcgacatgttctgcactgccatgattgacgttgccgacgagtttggggtcccatcctatgtctttttcacgtctggagccggctttctccgcctcgtaactcatctcgaatcccaaagtagccaccaaaacaaagacattaccgaatataaagatcaaccggatgcagagcttatcattccgggtttctttaacccggttcctttgaaggttttacccgatgtgctactggacaaggaagctcgccccttggttttcggtcagtacaaagatatgaaaagaaccaaaggatttttggtaaatacgtttatggagttagagtctaacatgattgaatctttaattgaagataagttaatcccaccaatttaccctgtgggacccattataaatcttaacccttctcaaggcgacaaacaacttggtgggaccgaccacaaggaagctaacatcgtgacgtggctagatagccagcctatatcgtcagtagtgttcttgtgctttgggagcatgggaagctttgatgaggatcaagtcaaagaaatagccaagggattagagatgagcggggttcggtttctgtggtctttaagaaaaccgccgcaaaaaggtgagtctatcgtaccaaaagagttcgtggatttaaacgaagttcttccagaaggatttcttgatcgaacggctgaggtcggaaaggtcatagggtgggctccacaggtgactatcctggctcacccttcagttggaggattcgtgtctcattgtggatggaattctaccctagagagcttgtggtttggggtgccaatagccacttggccgttgtatgcagaacaacaaatcaacgctttcaagctagtgaaagagttcagattagcggtggagattagactggattacaagaagagtaattataataggtctgatcatgttgagaatcaagctgagatattgattgtgaaagccgaagaaatagagcttgggattcgaagtgtaatggaggctgataatgatattaggaagagagtgaaggaaataagtgaaaagggcaagaaaggcttgttggagggtggatcttcacacacttcgttgtgtcgttttataacagatgtgacagataatatgccttgaaaatatcatatggagtatgataacatgaaaattgttaagcaccactcatgtttttaattagcatttctttttgtgtaatatgtatgttttctaaagtacctattggtcaattttcacaaatcctccattcttttttctcctaataccacttcttctga

SEQ ID NO: 186738 - DNA, 3720 bp, Cannabis indica
aaacatattttacaatttaatggctactagtaatggaaagcaaaatacacatgtaatctaaagctttaattatgacattcataataatacatgtattcctacctgaaaagaaaatgacataaagaaacaaaaactacataaattacagggccgtgtacattcttctctttgaaaagacaaaaataagtaacgcccataagaagaggacaaaagaaagaagttgatacaactacaatttacagcaccgtgaggtttaacactgggagacagagtagctcttggtcttccatagaaagctgaaagctttgcccatctttcttctggaaatggatttacaataaggcttggattcgggagcaggcggcatagacatctcactacattcggaaggcaaatcatcctcctcctcctcctctggagatgattgaacttggtctcgctgtcgttgttcacgaaacaacatgagaagtttttgtgccttctctttccctctcgtggtcccattgactgaaatcgaaacaagtcctggtatcacaccttcttgtaagaccatttgacagcatttatcattcccattacataaaagtaacaaacagcatacagcttgttcttgctcactgggttcaccagcatccaacatcgttgcaagtacactgataaggcctggcgccgacaccatttcatcttgtcctgattgacttgaagccaaatttaataaaactgccaagcacttttctgtccatgtgctgtcaccagaggctgcaaggaattcaagattactgataatgccagatgaaagtagatttggaatattggagggcatactagagaggttgtacagggcatggagggcatcaagcttgcactgaacatcagtattagcttgaagaagttgggttaaaaacggaacagcctgagatgatccaatgatagctttggcttcttcaaggcatgaaagattcaaataaagtgctgtggcaaaaccatgagaattggtagaggagatcatttcctccagtaatggaattataccaccacctagcatcatttccttgtttctgccataagaaaaataaaaataaaaattaatggagtgattgaaatgaatatctcagtagtttatataaataataaatgcaatacggtcattaaaaattgaaagatatttttgtctcctagtctttttccacatgaggaatttaacataaaaataaaaaaaataataaaaaaaaaaggttgaaaactaagtgtaagcggagatacgggcaaggtattgaaactcataggcacctatttaattatatacaaattgtaacacaagtatattcaatttcaaatattattggctagggcatgaactagacaggcgtttgcaaacctagtacctcttgttttaaagttggcaagggtgtaaaataactaagagaatcactcattagtcctgtagtacaatatttcactacttgtcaatttggagcctttagaaccaggaggctggaccattagaaaataactcacctgttattgttgacagcgaggttgaaaagtgccattgctccactttcctgagcaacatcatttcctacccgcacagctatgttaagaaactgcatgagtgcttcaacaaacccattagctcccatatatatcctagcttcttcatcatccttcagcaagaacctcaatttctccaccactttgcactttatcctcatgtcttctccgtcattcaagacagtcaaaaagtcctgataactttcaagcacattgagctcagactcttcctccagtggacaaacattctcagttccatttccatcagcctcaactaaagtaccactttcttccaaaggaaccaccttaacccccttaaacttgcaagagttgacactacccatagacttcgaattagtggtctcagcctcagacagtgctaacctccaatagttaagatcaagagactctggaggaccatcaggaacacacactccattatgatcacaccaactagcaacaagacccttgacacagtaattgggagttaaagaaagatgagaaagcttttgttgagtctttgggcaggtattgtgcccatcactaaaccatttttcaatgcaaatcctttcatatgtttgaccagaagcaatgattactggatcatacataagctgcaaagatatcggacacctcaattcttccggtggaagaggcatctgtcccgatctcctattgtttggcttgaagttgaaagagctaagttttgatagctgtcgatcaaagacgtgaccatttcccccaggccccataatatccatagaaccctggaccgtgggagaacatggggcagaaccctgagaatcattgtcatctgagaattcacttctaaacaacttggagtattttctcatgagatgtaaaagaaaagccacaatagactctttccgtttatcttcctcggccgagctctttctattagttttttcaaagctcttctctctgtaagagctgccctggaagaggtaatgccaagtttagtagcagcctgatgaaatgattccaactcattactgtcattacagttgtcaaattttctcccctgctgaagcagtgcaattatatcatcacctacttgtttctccaagggatcaagcgagaatgtagtaccctcaagttcaccaacaatttcttgaatctgaaacaaaattgcatcaatgcgtcagtgaaagtcaaagcctcgaatatataggtgatgggaagggtagagtaggaaaacataattgaaaagcttccatcaagggttggttaataaaataatagggattgagaaagaagaagtggaattattaacaaaagattttgggtctccaacgcacatttctgcagtagaatctcaaatttcaagctatgtttcatatactacttgataaaaatgcataatgtttactagaacatctattgcacaaaatcaaccattcatatgacaattcacctaaataaaataaacctgacctgacaaccaatagattgtggaacaatgtcttcaacacgcctaagactatcttcaagagcacatcttgccttctccaattttgtaagcacagaatctcctgttatagcctgcatggtaagagatattcagctgttgtgcattctagaataaaaatagaaacatcatcagaaactagttttaactctgaatgtaaggattaaccatccagagattgttactaaattgttatctgaatgcaaggatttaccatctaaaggtacaagcaaaagaccatgtatagaatacagaaaaggaagcctaccaagtaaagtttactacactcagaacaatgttgaagaacattcttggccttctcgagtgctacatgtaatgaacataaagcttgaatcccggatttgcttctaggccgagaagcttccaatgaagggaaaattggcaatattttgcaataaattgaggaaagggtcctgcacatttctgcatgtaactacaagcagcataaagatacattaacacatattctcacacgcacacaacacagtcaacaaaccaaaagcgaagtgcaagaaatactgttgtgccaatatttcaaatcgtacaaaagatttgaatatgtgcaaattttcataccttagcatcactagcagcaaacatattttcatcaacatcattcatatccattttttgagctcctactgaaaaagtgtcgt

SEQ ID NO: 186739 - DNA, 4784 bp, Cannabis indica
ggtccttgacgtccgttggtctaagtctttttgtggtgttactcctttctttctttttctagtatttcttgtaattcttgtatagtaaattacttttatttgttattttgagttattttgattgtaatcctcctattctctcttgtaatgagtaatttttccaactagtttttttttttcaataattttggtaattagtgtataatcatatatgagaataaaattgttaccaaaaaatatacacacttagtaaaatcgtggtatataagaaattatgaattataataaacaaatatttattattaaaaaaaatagttatagcaaaacatgtatataaactaatataaagtttgtagatgtagcatctctatcaaagatggatatatagtagacactaaaaataatgtacataaaattataaatttttatttcaccataatatatgtgtatagatgaacaaattagatatttttaatatattcttcaattatataatactaaaacatgaaaaaaaaatattagatagtttggaaaatattgctcaagaagataaaaattttgttcctcaaaagttcttttggatctgttagagaggttgagcactgctcgaaacctttgccaaatacgatcaaaagtaacatgaatgttgcaatatttaatagtacaggaaagtatggtttttccttagtcatttgtgacactgatggtgtgctggttgagacccgagtttgttgtgtcgagggtcttgtgcgtgcagaggtggctagggtgtaaaagaaactctaagttggttaaagaataaccctgttgttcatgccaaagtagaaatcgactgcatcaatgttgtcaataatgtcatttatattgaaatgctttttaccgtttggtattattactcatgattgtcaagaacttcttgcttctcttataaatgtgtctatttgttatgttaaactgtctataaattctcttatgaatgcgtctatttgttatgttaatctgtctgtaaatttagttgctcattgacttgctagagcatcttgttatctccaccatcgtatagaatattagaatgaataattgtcctatgatttgttgccatcggtggctgcgaatttattaataaagttcaaacttttttaaaaaaaaaggttacaacatgttatataaagcatatgtcacataaagtggtataaaagaaatcatgtcttaaaatggaatctttttactatttttttacaataaagttccataaagtatcatatagcaaaattcaaattaacaaagtgtattcacatttcacatgatcaataatctttcttacttccacgtttattttcgcatgccactaattagtgattttttttttttgaaaaaaaattaaaaaataattttttttttaaaaaaaaaagataattaatttgttaaataaaatgggaagagcgtcattgatgagtcacatgaaaacctcaccccaaatattatttagtgacgaaagaaaatgatatttataataaataataaataataataataatattaataacaatttattcaaaaaataatgctattataatgattacagcccacacaccaccaccaacaccaaaactcggcccacttaatccaatcaaagcccaggcccaacccaaacccaaattcagaccactcaaaatccgaatttccgaaactacccctactctaatcacaaaaagataacaattattgagccctcttaagtaatttcaaccaaagtaacgaacacgtcgcttctgtcctaattgtctttctttagtggtggtccccactcccaactccatatcttgacacgtggcaaaattaggcggctgattagagtgatctgattggctaatcaaaactagtggtgatgacgtcagcaaagcactcgtggcaatgtcgttttcgaattttccgatataaatatccccaaaaactcaaattaaaaaaaccaaaaaaaaaaaacaaaaacggttttctaatcatttttcgaattcaggtttcgtttttctgagctgactatgtttttgtttgttttccaaaattcgttatttattttttctctgattctgattctgtgctgttcattttgcaaagaccagattttgaatccaaaaaaaaaaaatcacttctttttctctttttcgattatgggttggttttaaatttatgaaagttgtgatttttattaaagaaatgagaagaagaggggtttagctttaatgggtagtaattgattttctatttactttcttatagactgagaacaatggcaaattcatcagtaggagtggaaattgttcatgaaaatgggacccaacaacaggttgttgaaattgaagagttacttcttcctgcaactaatgatgatcatggtggaatcattgttgatatgaaggagcctatggagccttcttgttttgctactttgctcagagcttccatgtcacaatggaggagacaggtttatatatatgtatatatatatgtgtatatgtatgtatatatagagacttttggggtttttaactttttcttgttcagggaaaaaagggtgtttggataaattacccattgagctggtaaacctagttgaaactacagtaaaggttagttaatttttcagtcttactaactttagttaaagtgtttttattgtgtatatgaatagagcatctctaagtgtttgacatctggcttgtgtgaagagtatcttcttgaaaatttgaatccactatattggattgtatttcaactttaccccactacacatatggatgatgaacttgaaaatgaaatctaatctttagttatatagtataccccactaaactttaggacagacaagtattttttaattggcatgatgataatgatatctcatcattttgaacagtttactttactcaaatagtcacatagtaattgttatagttttttggtctccaaatattatagtgttaggtgggaatccaagcttccatatctcattcttttgaacagttactttactaaaatatcaaagttactcaaatagtcaggtatgtggtttgctcgttcgagtccttcttaggtacttacataacaattgttatagttttctggtccccaaatattatagaactagtggggaatccaagtttccatatctcattcttttgaagagttacttgactaaaatatcagttatgctggttcccaaagggttactcaaatagtcaggcatgtggtttgctcgagttctttttaggtatctacatagcaattgttatagttttctggtccccaaatattgtaggattaggtggggatcctagttttcgtatctcatccttttgagcagttactttacttatattaatgtatctttgttgggcatgaattgaaagatattgatggaaatttggttttgatcacttctgttattgattttggcaggaggggtttagatatcatcatgctgagccacagtacttgatgcttgtttactggatccctgaaactccaagtacaattcctgcgaatgcttcacaccgagttggcattggcgcggttgtcattaaggatgaaaatcaggtattattagtattattaatctcctctaacatcaaatcctttagtcttgtcagaaaacttgagataattctatcatatccaattccatatttataagtttttgtcaccaaatgactaagtcatttctattttattctattgtcttatactaaatcaccctattcaccaaactagaaacaatggtctcaagaaaatacttttggttcagtggttgatgattgtagaaatctatctcataatttagtcaggccttcttgttcttttccagatcgaattttcaataagagaaatgtccttactgaatttatatctattttgattagaaatacttatttcgattcagtttcctgttctttcccacatcaagattttagtaggagggatgttcatgtccctatggagtatatatctattttgttagacgatttatcttcttattaaacctctatttccattaaagaaaatatcacattgtataatgacaatttttggtattttcagttacttgtggtgcaagaaaaagctggtgtattcaaaggaacaggtgtgtggaaaattcccactggagttgttgatgaggtgagtaaatttgattttctttttttcattttgttctactttttgtttatactattttccttgagaagacatttaagtaaagtaagctcattgattaaatagggggaagatatttttcaaacagctataagagaagtgaaagaagaaactggagtaagagttatcatatcattttgtgtcttatttattttggtaataatacttctttctcatttatttaatctcataaagacttctggtttttcagattgatactgaatttttggaggtattagcagtaaggtaataaagtttgttttaattaaagtaattgaaattttgactgggaaatgaagttggtcttcttttaatgaaaatagtcaattgggcattacaataatatgaaattctctaatgaaaatgagaagtgaagattggacttgaccaaattttcttactttttgactgtcaaaatcactaaccaattttcactagttgacttggtcaatttcattagttgacttggttgagcatgtggtttgctctcataagattttaaattcaagtcactatcatgaactccgacatactaggccggacctaggttaaggcgggctaggcggcaatcctag

SEQ ID NO: 186740 - DNA, 1960 bp, Cannabis indica
gtttcacaaagaatatgaaagaatgactttacacaccacagatgagttactgtaggaccatttatgcgtcgctcaggccttgaaaaccgttgcatgtcagcagctaactgtcagaaaaatgccatttgtactaaggtgaacatttcattctcaatactacattttgagaaaaataaataataatataaaaaaatgcatatgaacttatactttagaagcagctgatgcttgccattgctgtatttcacgcagacgactcatttccaaatccagaacttgataagtttccatatacaagtcaccttgactttgtttcatggattcaggaagctgaaacatcattccaacagcatatatgatgtacatagcatcagaaaataatggtaagaagtgtggaagttagaagccgtacaacttgcttactggaaaaaaaaaaggcccaacagaactacaaggattatgtctacaactacaagacctaaggttaacagtgacactaaaaaaagtttctctgcaggaagcaggaaaaaattaaatttttaggtaagtattttttatgctataaaagagtaagaataaaaatgagtaatgtgaaagagttgtattgttgagattcaaaaggaaagttttactttgaactataaccacattaacctgaggtagcgctttgacacaactacgatatgtataaagaactgatgacatctcctttccttcatgaataagagcattctgcacacgttccagagttcaatttagaacaccagaccatgtataatgagagattaagaaactggtaatcattgtaattatcggataacattatatgttagttatatgaatataacttttaaaaaactctcaataggagcaaaaataaattcataccaattgattaagagcttttgtgtcctctgatagagataggcgatatgcagaaacatcattatactctacaacaatgaagtaataatttaaaaaagagatatacgtgggacttttaccaacacaaaccattcaacactaagaaaaccatggcaagttttcaattagacttcaacattctatcaacttaaaacactaatatccctacaatttttcatgcaaggatgatgataacttaacttgtagacgtagcactaatgaaatttaaattattcatgtctcacgacataaaaagcaacatattctcacagaaccataaaaaaaacgaagaaaataaaaaattatcataccaattggactttcagttgctcctctctcagttaacacccaaattcctggtccttgcacttgtgcttgctcatcctaacaataattatttaattattatgcatatatagaaattaaaacagaatgagctgcacttcaaatctcaaccctcatacatgtattgattaaactgtacatgcatttaggtcgtttctcaagctaaattcattatattgctatcaaattccagaaagctagcatggtactggcatctctaataaaatataaccagaaaaattaaataataaatcagcaataagtacggaaaatgattcgcaagaaaaaaaaaagtgtgttcagtggaaatacctcgagtgagaatgtagacagcgccgcaatggcttcttccacaggaacagccataatagtagaggtcttctttatgatctgggaaaattcgaatcatcgcatttcggcaaacattttgagcagaagaagaaaatagaattattcaaagtagtcaacacattctcttcacatatatataattatccaaagttcatggcttaccagataatttgggagagagaagatcggagagagtcagtcgcactaggaaacattggtctgaactttagttaacgctgtccgaaaatgggagtggttggagaagagagaccagtactccgagtgggtcggagtcggacaatgaggacatttttggaatttttcttctttttcttttttt

SEQ ID NO: 186741 - DNA, 5918 bp, Cannabis indica
tttgagtatcttatatttttcagagctccctaattaatgtattacggtgatcttaaaagttaaaagagaacgtcagaaaatagtttattattacaaacagagagagtaaattgttctgacactgttttcatattgatagcaatttttctgaaagtatttttctgaagcttaaactattgttgtctcaggcgttcagtataagactatagtcgaatatgctccttcccagcgtgttccaaaactttctagcaggagggatggtcgtgaggggaccattattaaaggtaccgaatttgttgttaattgttactccggaatgttcttagctgtaaatataacacatgatatattattctttatgatgtagatcctgattatttggagttcctcaaaatcattgcgaagcctgctgagcatttaccaagtgccgaaatacaattggaaagaaaagaagcagaacaagctggttggtttttacacatgtttatgaatctgctagtgcactgtagtaattataagtagtttaggtttggaaaagatgactatttgctaatctcttaattacgcagaaagaatctgcaacatttacatttgcttgcgggcacccttttatgggcttgttattgaattaacttgagggttgtcttggaaagtttacgatagaattgtccattgtcacgaagaaaatatctaccaaaataatatatcagcgcatgctaggttttttctagtattgacagtctgtgccatttatttctcaggtgctgcaaaagaaacccctatcattaccccccttatggaatatgttcgtcagaaacgtgcagttggaaatggagctcaggtagggactgaatctttctgtttatgttcacaagttttgaataaacaccagacccttgggcaaaacgtggtccaaaattttgaagaatcggttttatgttttagtcttcattgattctacttatttgacttgaattctctttgattatttctttccaatttcaatttgatttttttatttggtacttttggggtgaatgttgattgtggttttttatttcgtacttttggggcgaatgttgattgtggtttttttatttccagtgcatagcacactcaacttagttactgtatgattgtttctctttagtatctgatgtaccctgctgctatgaaatagtaataaattgcagtaacaatggaagatgaagagagaaaattacttcagtgagtgttatttaatctcagaaaacagaggattacaatttagagccctataggacccctgctgtaaagagaaagtctcaatacatgcataaaccccttaaacctcccaaaccagcatataaccaattacaactcactcaacaattacaataataccctcataaagtaaaagaccacactacccttgagcaatagcattcttacctctcctagcataggtaaaacgtaccttagtcctaacagtatcagtgttttcttgaaatttatgttatcttattttacaatagagaagcttattagctgaacagacgttacttggaatttggaatttctcatttcattgtattcatctatacatcctcactgaaatctctgatatgaaataccaattaggaggaaataaagaatatgattgccctggtacaagttacatcatcttcttttaatgctttgattattaaatattgcctataacctgtatattttcaaacttgattcatgaaggacagaaagtgttgctttctcctgattttagtgattagtttttttttgtgcgtgtgtgcatgtggtgtgtgcgtgtctaatggtcaaattttgtgtttgataatagggttcagtagttgttgggaaagttagcagaagatctggggccggatcttcacgaaagcggcagcccagctcatctacgaaaaaagtttcggagaagaaaaaggttccgtctaattttatctcacagaaatctcttggtttctttttgcagttaaaggttgaggattgtttgtattggtgtgttggattagttccaccagaaattgaaccatatttattttttaaattgatactttaaggtagtaatcatctcatcgggtgagaggtactattttaatctcaatgcagattgttacatgctcttaactgttaaaactaagtgatgcttacataagttttccttttttctttgataaattgatgattaagctgaaaatccattgaagagctgtttttgtttttcttctttctgggagtaaaactaggtttgacctgtagcttgttttatatgcctctgcaaatatttaccaatgcctttagtttactgcatgtgtggtgctgaattctgttacacgagtaatatgagatttgttcaatttttctttcgattgacagtatatattaaaggacaaaacaagaaataccagtcgaaaggataagtcaaatttcactgtggtgcctagacgagaggatcaacttacgacttcaattgggaaagaaatatctgaaattgaatctggtatgttttgttcttcaaattgtggtgtccactttgattggccattttgattattttcacattcaaatgtagtttctgcaattgaaggttctttttctggcattcctgtgattgctgattctgggaagaagaaaatcttgcttcttaaaggaaaaaggcctgaaacaactgtaagttattttttcccaggttcagttattctacgtaatttacagttcattctgcgctttcttgtttgaaactttgataaaattttattcaaggatgtttattcttttctctttattttgtgttcttatcctatcaaaatgtcactatggattataatgaaattgttatgctggctttttgggcttgccttgttgcagcagcagcaggagacatctctaggaaattcttctgtttcaggttctccaaagcagaatcaaaggcgtgaggctagtggtaggttgatcagaagcattcttttaaacaatgaatctcgtcaaggtcaaagttcaactgcaggacagcctcagcagaaaattgaaaatttgaacattgaaaatgtgaaacgacttccacggaatatgagagggctgaacggtcaggtttctcaccatgaactgaattcattgaagtctgaaggagacagaaaaaaggatttagaagacaagtttatgaagaaaggccagcataatgggggtaatgttagtgaaaagcaagagaaacgtaccagaaataaagacagacctgaccgtggtgtttgggctccccttcgtcgtgctgatgtttcacatactagtgatgagcgcatgtcatcctcagtcttgcaatctactcagttaccctctgataccgtttgaaggtagtttgttaggcctcacagatccagtgttggcaaatatttggggggggggggggggggggtagggtggttcaatattacggtcataacattgttcctatattgctcgtttcaatctcaatccactaatgcaagcaacatgttttatttgttatattttgataatttgaagcaggagacgcaatttgtttgttacttggatagtattttttttgccttgtaaaatagatgtttcgttggacactttatcgttagcaaattgtttagcttttccccccaaatcctgacatgtgttgcattctgtcatgtaccatgtacttactagttgtaattatatttagtttggttgtatgtgattctgactgcatctttcactaagcacaaattgtttttacttgtttcaaggttctcataggaatgttggtcatcgcggaactgtcaacaatataaaagatgagatcccccaaaatgcaagtgagggaaagtcttctaaaagagttgctgctgttcatggtgcccatgaggtatgctgtaatgtttcatacataagttattgcattctatttattttcccttgtagttttctctaagcagttacttcggtttaccgtatgcagaaacaagtatgggtgcagaaatcttctgctggttcttagtatgtgattggtaagttatttttcttgcacattgtttcttttgttcttcactgaaacttgaggttttagtgtaataaaccatccttttgtgtctttttttaatttcttttctatctttcaagaaacagatactaaatacaactctttagttctgctttcatgttgaattgtaataaagtaggccaggaagtttcatcgtggtaaaagtaaaagcccgttattgcaatgttctggttaaagttttggcttgttgatgatacaagttactttaggatctgtgtttttcgtataactcaggaatttaatatggtgtttgttggattacattctaattgttttaatgcttcattgaatagatagtggcattcgatcagaattgagattcctcgagtgcctgggaattgtttgtcttttgtggcttacaccctcaaatgtcatggcaccgtctccgatactacagctccactccccattgaaggcatcgtgtaaagggcaaattttttgggaacacaattatctgttaatgccaaatttaaggtacatggacaaaacaatattgacttttaatcatctgtgaacaaataacacaggtgccttactgcattaatttcttttggtgcagaaacccgtcatgcttgtggactttttgattgcggttacaaagctctgatacgcggtgttcgtggggatgcagcaatgctcggttggaggagtgcgaagtgatgtgtccgagggacaaaggtgataagtttggggaaaggaatgtttgaatttctcagcgtatgacttttatggccatttgtatagtttttttttcactagtgtgaagtacagtatatctcgtgagaggaaaatgcttggtgtggtctgatttacttggtttcaccttgatgtaatggttcacttatcgaaaactgtgtaggcctcattttatatgatggggttctatattgactcatcttgacacaagaataattgtcttgaataattcttctactaaagttacaatctagggtgccattcctatgttttttgttttaaattgagcatcatgaaacattgaataaccatcagttttcatataaaaatgtcaaaaggatgctatatatagtcctaattaaaataaagacttgtcttaattaattaaatgataaatattttcattgaagagtgtcatattgtttgttgtgtgcatagttgaaaataaaatcttctggggtgtgagtcatacatagtttggggttttattggaaaatagattaaaatacaaaaaaaaaaggtgtaaaagtgaaatcaattggggttggtgtcttcatatccaagtaactggttatagtttttcttgggaaatttgagcatagacagtaagcttttctaagaaacttagaacaaaatatcctccagaaccatcaacgccattgcagcacctatagaagcacccttgaaatacctatggaaacacacttatcttttttttttttttctttccttttgcaacatctttatgtttgaatagttgaaattttcaatttgatggtgcaatgaaaatttaatttttagacaaccatgatgcttcatgatgttttagaaatggtacgatgaaaacttgatttttaagagaaaaaagtgatgtttaactatgcttaacgaaagtgctatagacatttaatttttgcgatgaaaacgatgtaagatgatggtttaaataagttgcatgaaatttgatagaaaaactttagcgaaacataaatttttactcaataaattttacttatttttaatttattattttcgagattttataggtgtagaaagtgtgaaatgcaaaatttgaagtgtaacaacaaatttaagtctgacaaatcgaaggttatactaaaacattgagctaaaaataatc

SEQ ID NO: 186742 - DNA, 5407 bp, Cannabis indica
atttattatcatgggagcttgaagaagcagattgcagttgctagatcaagtacaaagcattatatgttatcagacacataaagaagcatttttcaaatttacaatgttaatacagttacatgaaaaataacaaactcccaagtatgaaaaatttataaaactttcattcaagttgtatgagctcctcccatgcataatgcagacctttcaatcttaacaagttcttttactacctgaatcattgatggtctttcttcttcaaacccaattttacaaaagctttaaattcttcttccttctcttcataaatataattaggatcaacatatatatcctaatgtcccaatcactatatcttgaagatgtgttactccttcaggtatgattatagataaaccaaaatcagaaaacttgggaacataatctttatcaaaaagatatgtgaaggctttatgcccctgtttattataggcctagagaatccattataatagtcttgaaccatttaaattcatgtctactatatgagtagcaaccggatttaaagtgatttgtagctctaatgacttgttcagtgaaaaagggttacatttccatttatctttgcaacaaattatcctatcttccagcaatcttgctccatgctttaaaatatgtctctttctttccttcttcagtaagactatttgattttattgaagatactaattgaaatttcctaaaaggagatctgatttcagaattttctatctcatttcaaaataaattatacagagtctacaacaatttactatttaattagaacatattagaatcatatgtatagtgcatgctttatagtatatacctttaggacttgggaatgagctatgtagcctttcatacatgtgatggaaccaacctcttgaccctccttccatgtagacgattcaaacctatcttaatttgtatatatggttgaatagtcagaaacctttaagtacagagttcttttgtaagaactaaattggagaatgaactagctttaacaaagttgtgaagaaacatatatacacaagtcaaaccttactcaaactctctctcttataatataatgacaataatattgactatgcataagttataaagaagtaaacataagacaaatgctttaaatcagtcattatggcaaaactattggtccttttgtagtttttattttaattggattggattagattatcataaatagtacagatttatttcaaaacaatccaatactgttctcaataaagatcaaaagtttcaatttgtttcataagtggttgaacatgtgggcatggagagtgttaaatttcttaaactagtttctatttcgtaatccataatcagtgtcattttttttgcaagtattcctgaaatgtgaaaggttgtttcaatttatcatttgggcaaataatgtatctattctttatgtgaagctttaaagtattgataatcccatttccttagctttttaaaaagatctcataataccaaaataccttttaacaattttacaaaataaaattgaacttaaatacatagaaccaaaaacaatatatttaccacatatgaaaaaatataagacaatttttttttcctattctctacattggtaaacttatgaaaaatttacctaatgtgttgattatatgcattaaaaattaacgagcatcaagcaaagtaatgcttatatcatttgtggaagatgattcaggtttactggatgaagtgtctcctttaattgaacccatctgcatgaaataggcaggtgctttgggctcaggcaacttgttttggctattcaacataaaaatgactgatgacatgtttggtctgtccccagaaatttgttgcacgcataagaggccaatgtggatacatcgtaacattttatctacatcaatgtcatttgagttgattaagtacttatcacccaaatctataagcctgctttcttttagtaatgtccatgcctggtagtacagaatccatgagatcagtcattagttcattctattataattgagtaataatattagtgatatacttattattacttacatatccgatgagggtgagaccattattttctttggggaaacctctatttttctttccacttacaatctctaataccaatataccaaagctgaaaacatctgattttactgagaatagtccatcagaaatatattcaggagccatgtaaccactgcataaaaattattttggttagaaacctggaacgacagcactttgctcacaagtggatctgatacaggttataatttagaataagatgaatgaggttccatctcaaaaccaattggcagtgggagaagtaacccattcatcttatatatcacaatttatttccacatatgagcaatgtgagactaactttgataaaaacagtacaaataaattaatttaatttagaaacaaagacataaaagagttaaccaaatgcaccaaattactcactaggttcctataactttgcttgtcttgtcttcaatctggtctcctccaaaaattctagccaagccaaaatctgaaatcttgggattcatatcatcgtcaagtaaaacattactcgctttaagatctctatgtataattctcaacctagaatcttggtgaagatatagaaggcctctagcaattccacaaataatttggaagcgtgttgaccagtctagtcgagtttcttgcttttggtctgttattttggtttaaaataagcaactgatgataattaatcacaatagaggattgattgaagtgttgatatatagaaagttcttaccaaaaatgaaaaagtcaagacttttgttggacatatattcataaatcaacatgttctcttctccctcaatgcaacaacctaaaagccttacgagatttcgatgttgaagctttgcaattaactttacttcatttttgaactcatttacgccttgtcccgaacttaatgatagcctcttaacagcaatttgttgtccatcctctagcataccctgagtgtgatggttactttagttgttgtgatgtgaattaattggttgaatgaactaactacatgctaaatcataaggcaagtaacaattaatcaaaggtgttttacttaaaacttaagaaggaaagcttactctataaacaggaccaaaaccaccttctccaagtttattgctaaaagagaagaaatcagttgcagtattaatggtagacaatttgaacaatggaagctccatgtcttcctcctcttctcctctactcttatttgtaagtgtttctcttctttctctcctatctttcaaaacataacatgcaacaactgagtaataaccaaatcagaaactaacatttattaattagagtaacattaaacattacctttcaagtattgcctcctgtagatgcaacaagcaataagtatgaaaatgcaacaaacacctccaacagctgcaacaatcactgctgttctttccaccttatattgtccttctctttcttcatttaatattttgtattagatttataagagataacattatatatatattcatatgatcatagcatagtaatagtcacatacctatttctgattcgggcaaacgaaaatacagatcttgtgtacctcctggcatttgtctaatatcaattaaatcaccaaaccagataatacagccactgccttctcctctaatatctatgttggaataagccatacaagaacaattttccaagcatttcttcctacactcattcaagctataaatctcattgttgacccatgaatgtacagtatcaggcaatttaaccccagcaagcttcacaaacccatctttatatttatcttgacatatcaatggagtctttctttcacaaccttgagaccaatccataatactccactgttgctcagacttgggtttgaaaccctttaagcattggcaattattaaagtcactcactatacaattggtattaggaccacaagcattgtagtggtcacatttatcagaaggaatagtaaagaaactcctccatgtcttttcagtttgaatccatgtgaagtggttccaagttgcagtggtttgattcatcactgctctcaccatggttgatctattcttgatattcatggtgaaataggcttctttatcgttgtgtacaacagagtaagtgaaaagcatattaggccctaaagcaggggcaccactaaatgttacaccattccatggcccagatcgaaacaccactttggtaccttctctatatatagattctagtagtaactgattcttactaacttcaattctccaaatgaaatctcctggacaagggtcatcccaattcttccatgccgatacactcctgtctagaccattaccactgttcaagtatggtcccactttcatacttgataacaaagtatctgaaggataatcaaagctttgccataaaaatgtgtcttcatcagtcacaacaagatttcctgattctaataactctacctttggtttcttggcttgttttgatgatgatgatgatgatgaccaaaccacgactttactattgttgttgttgaaaagcactagatttccggtgttgtttatgagtaaaaaaccagttgaaccgttgatggggttgcatctatttgcaacccaaacgacagttcgagctgggtcgtttttgtaccaaattcccaaataacgattgttgttggaatttcgattaggactaaaaaatcccagctcaaaggttccttctttggaaaccaaagtagtgccatcgtttaaagactgttgtaatgaatgtccaccagtaaggaagagtgaagagaggagaatggtgtgggcgatgatataagtaaagaaggccatttttagatttaattacgttgtattttgtttctgtatttccaattgatctagtgttgtttttctgagctgaggttcgtacgaggaggacatggttcatggttgtgtggttattatttgatcacattaaatgacacagctgtttgtgttagtattgacttcaaattaaatgcaaagcagggtactttctcccactctttccacccgtgaaacactttttgattaatactcgtgcgtggagagaaatactaaaggccatgctgcctgttaacatccttttttggtgtaatattattatttgtgtaatttaatatcgggttctcttattttaatttagaagaatcactttacatactatttttaaacttttatttttatttttatagtttgggttgtttcgataattactcgttgcgatttatattgctatgctaattgtgatgtgggttgctaagtgaagttctgtaaaaatacaaaaataaaaaaccaatttgtat

SEQ ID NO: 186743 - DNA, 4239 bp, Cannabis indica
agaagaacagagtaagaaactccacatatgcaactcatgattaatctgcagcatttttcatcaaagccatttgccacaagcactctctttatgaagggccattccatcttgtcatatgccttgtgcatatctaatttgatcgccatcaaaccccctctgcatgtcttgtgtcgaattttgtggatgatttcttgagtaaggatggaggactctgcaatccaccttcccgggatgaaagccgactgggccggagatatgagctcttccatgaaaggtctgagacgattagatatgattttggccacgatcttataagtgaagttacataaactgatggggcgaaagttttcaattctatccggattggcaattttggggattaaacaaatgtgagtataattcaactttggattgatagacccagtgttgaatatctcttgaatcccagaacacacactatttcccacttgctcccaataatgttgaaagaaaacccctgagaatccgtcgggtccaggagcctttagcggattaaaacaaagactgtctgcttattcttcgatggaaggagtacacgacaatagtctattagcttcatcatcaattttcttcacaaaaagggagtcaagctctggaggaatcgatggtgaccccgtggaaaaaagattgacaaaataattattgataatttgttggatgtgatacttatcctcccaaattcgcccttgttggtccttcaaattccagatatgatttctccgttttcgaatcatagtggccgcatgaaagaaacgggaacttctatctccgagtttcagccaaatttctctaaaacgttgtcgccattgactctcttgttggctccaggcaaatttaaggagttcatgtgtttcggcttcctccttacacctgaggtcattaatgtcttggttctgaagccatctcaatttaccttccaatttccgaatggtctcctcaccatcttctaaagtagtctttttccaaacttgtaaccttctccttgtaatgtccacatttcgaattaattgaaagactccagggtctgattgatgccagacttgattcaccaaatctccataagatttatgtgaggtccaagcttcatagaatctgaaaggagtgaattctttccttctgtacatagcagtgtcgaggaggataggtgcatggtcaaaatccgtaattgggagattaagaactcctgcattcggaaaagtcaccacccattcgggtgaacctattgcccgatcaagtctttctctgactagacctccagaaaatttgttgttgtgccaagtaaagtcgcctcctttgtatcgcagatcaatgcctccagttgaaaataagaactcattaatccaactatagtttgtgcctctcgacttgcgccgccccaatttctccaacggatcactaatgcaatttaggtccccaatgagaacccatggttcatcacagcttttaattatggtatcaagattaccccagaacacctcttttagataactatatggagttccataagctgcaaaaatgttccaagggcctaaagattgctgatcatgaacaatagcttggaacatatcatctccaatccatttaacttgaagattaatgtccctattccaaatcaaacaaaagccacctgcgatactaatagcaggaatacaagcatactctgtaaagccaagacttctagccacctccaccattcgatccttttgaactttggtttccatgagaaagatacactccggcctgtatcttctcacccagccccgaagggcttgaactgtcgagtcctttgcaagtccccgacagatccacgataacatcctcattgatcggttgggggcttgatgagggccgcctcctcgcccgtatgaaaatcctgagcaaaatcaatcctaacctccaccagttgttccatatctatggccaaattcttggcaatactagaatcctggggaattgttgccgagtcttcctcatctttccttttttcagttgtcgcccttacggacctcctccgcctcttgctttcttttttcttggatgaacttgccgctccaccactccccatcttgaaagaggaagatggttctggggagaatcccttagtcgatggaatcaattcttcgaaatcacgaaccgtttcaggagttctctgaacatatggtatgagcgtaagtcctgccttccttttcctagcttgtggacaatggtggatcagattggatacatctttagggtcatggaaaataacaggagtgggctcaaatttttccacttgggctggccccataagttcttctgtaagcccaatttcacttgcataagtgggccaaggaaatggggttgactccggatgcttatgggcctggcgagacacgcaaacttgggcatgtgtggcttccaccatttgttcataagtgggccccattcgggccataatcgttgttattattccattatcacgttcagaaggaattggcgggatgagatttttcattatctcactttctcgattaatagggagcttacccgattgatgattatgttgtcccccaggtgaaactgacttcgtcctcctacaccatttagagagtctctcttccataggtaatgatctggatctttcagtctgacctcgctgggtttgattgggcgttgagtttacgatcttcaatattttcctaaactgagtccctgaagtactcctttgggtcctgaccgctttctttttggttgagggaccgggttaactggagcctccaagtcaggggagttattaaccagtggttctttgcctttgactgagtttgctttcgccggagagacagacttcctcggagccgaggcgaggtttgctggattgaaccattgcagttgattacgtgtattgaaacagctgaagaaagctgtctctgccttcatccatggaccataggctgggacagctttcccttcaggtggaaaggcatactccatgcttctcacacaaaattttttatcatggccaaggtaaccacaattgtagcagagtttcggcagcttgtagtagcgaaattggatccattccttccttcctctgtaaatgtccaggtaaaaacccggggtaaggcgatgacgggtatcaagttcaacttgaaattttaagaaccatcgcctgacaattgttttcctgtctgccatatcgtaacccttttatcttcccgctttggccgcaatggtcggggtattgaccgcattaaggtagggggtgggaagccccaaagcttgaacccagaaaactgctttgaaagtatctacgtgactccagtgaccctcctctggccattcgtggataagtaaaagctttccattaataagccaaggtctattctcaagaaccagtacacaatcctcttccaggtcgaagaagattccccacacacctggtctaaaggttttaaatctccagttgcccttaagtttacctttagtcttccaaatttgagtaagaatttccttgagtctagatctagagactcctttgccttcgaaaaaatttgccaccacaccagttcttgtgacctcctcattaagttctatgtctggctccagttccagtgtcatagactcaaaaaattccctgcgtaaactttccacatcgtctgtcccctgttcaccagagggaatgggttcattaataccagaattatttataccagtatcagagttgtgcatatcgacatcattaatgactccatcttccctgcttctcgctccgccagttgaattaccaagcccaagtggctcattaatgtctcccatagtagttacagctacagtaccaacccaaagaggggtcttaaaggcagacaaaaatacacacaggccccacttgaacagagaaaatagaaccagaaaaaaaggaacgtgatagaaagctaaagaaccacgaccctgaataagatggattagaactgtttctaatcttcagatgacaaaggtggaaccaccagaacaaatacgtaaagttggattcccaaccttctcatactagagagagaatttttccataaaacttataagagagtcatcttttttaatggttaattagttagttgaaatatagttaatttcgttgtctgtttgatgagctcttcccttctttttaggaatatgttagatcacaccattcttgtattgctctctcttctaattctatataaa

SEQ ID NO: 186744 - DNA, 1417 bp, Cannabis indica
tatagttccactgatgttggcctcataacccttttcactaatggaaaaattgagataaggtaatagtcagtttttaaggaacaattatattactgaggttcatatttctatgattgcaagtgaaaaagtgtgtatattgagcctaaacatatgtttgtaaaatttaaggtcattgccagagttaagcctactaaaggagagttggataagaggtttcacatattccagtccaaaaccaaactcactctccaacattacagtatgctcatcattagaaggagatattgttatggtaagaattgtgatatatagctctttcattagtagttgagtttcaacattaacttcttttcttttctcaatgtgcagatgaatggtgatcaggaaatattcgtcgtctcggttttaagtcacaagaaaatattcaggtgaaccttatctacaaatctcaacttcagtttcaaatgcatttaaagcctctaactttctctttgcttaattttagacttttggagacttttagccaagtctaccaaaaagatctagtggtttcgcaaggacttgtatcagcaggacaaatcatccccaaggaaaagaagaaggtacaagattttacaatggtatacaagcatacttgacataacattggttgtgagactaagacttctcactatctatatatctggtttgattgcagagtatatttagctctgtcattaaagatattactggcagtaaatcaaaacctgcccccgatatcatcgaaacagaagatgctagacaaagctttaaagagcttgaaacaatcttttcaacagataatgtacaaggtgatgctcagcatagagataacatagctgtggatgaagatgaggttgagttggacataggtaaatttggttaccttaactctagctatatatgttcttcttgagatagtaaatataatttgatgttcttgtctatgaagatgacatcgatatcgagggagaaaagcctaaggaacataatattatggctgctttgaataaacaaaacctggctaacaaatttcaagctttaaaaggtcagtgtggtatatagctcaatggtgttaatacctaactctgaagaacttgcatcatgaaaattgtccaacttacaggtaaacttaagcatatgaaaaccaagaatgagaaaaaccctaccaaggaagaacaccaagatgataagcttggtacagttgatcaaatcaagaagaaatatgggttttctaaagctggtgtaagtataaattcaatatttaatgcttcatcttctcatatcttaaggatctaaaaaggtcatatttttgaggttgagaaatggggcacaaaatcatccatagttagaacaggcacagaagtcactgcagctataatcccataacaatatgtaa

SEQ ID NO: 186745 - DNA, 1210 bp, Cannabis indica
agattttttgtagtgtctttccatattaccagtatcttcaatttccaccacattcttgcctttttggatatctccaccattactcccctggatgtcatcacctaaaatcaagggtcccccattacgtccaaaaatcatggaatcaatttccatgatctttgcttcatcaactccttgggcatcagcccctgtccgacgaatgccaccgccagcaaccggtttaggatcttcatttttagttttgagccattgtgctccaattaagtaattccttttctgaagctgcgcctttattccaataccgtaaggtttaacaatttgatctaggtcttgctcaaatcgttttggacaaaatcattctgaatgcctaatgatgccacaaacaaagcaaaatggcccgaatccaatcgccattctccttacacaacttcatcctccttttcaatggtttctcgatatctatggttgcttgaacccgtaagtaatcatgccaaataccattgaagtttttaggatcagttttaacaaaggttcccacatatcctcctgcacttcacaccaccttctccatcatgaacccagatacaagatcatggacttgaacccacacatcgagtttatgaagatgtaccatcctaagattttcccctctcttcagcctatgaaaggtcaactgagacttattaaaagtccatgggctaccatcgattacattttgaatatcaatttcatgataaaattgaaacaaatatcgattcgtatccaattccttaatatagactccctttcccggctgccatagagaagccatcaaatgtctcatggcatgaaagtcaatacttcttcctgtcaaaaactttcctataaggcaccatctatcatcaaacaccaactcctcaccctcaacctccccttcaatcaatattccctcttcctcatcttcaatttgtatctgtgcatacttttcatctaactcattaaccagtcgactacttaaagccatgactcaactgaaaccttaaacaccaactggacaagaaccaacgaacaaagaacaacaatggacaaaacaaactttctcacaacatgtcaaaagacaagacttttttgtttttcaatttaaaaaataagaaaataaaaataatgttctgtaaagtttaaatcccttccatctcttaatttcttccatctaaccaaacatatatagtgt

SEQ ID NO: 186746 - DNA, 1038 bp, Cannabis indica
tcacaaaaactaatttacatttcagatcaaagctcacaaaaactaatttacatttctacctaatcatttggaaaaaaatcattattattaccctaaaacttaaaaacaatgtattgcactgcaaaaaataacattatttcaagatatatattatcaccaacaacacaaagtttgaaaataattggccttttattactatgtatacaagttcgaaatatgaggagccaagagggactgccacgacttacaatgaacatgccacgtgtcaccttaaaccaacacgtgtattcacttcttctgattttttcctctgtttccaaaatcaaaagcttatatactatatccatatcagtaattattacatcacttgaacaagttcaaaaacaactcctaaaaatgtcaatcaaacctttgattaaacacctctcattgaccttactcatcatcttcttcttctttcttctgactttgcatgtaggctcagccaggggaagagattttggttgtgaagatgaagatttctcaggttgtagtggtggtggttttgctcctttggtgaagaaagggcataggaaggtattagttgaaaatgaatatggtcaaatctcagccattgaaatctgtgatgggattaaaggaccttacaatatccacttctttactttggagcctaattccttgcttcttccagctcttctccatgctcagatggtgttttatgttcacacaggttcttcttttgtcatactattctcttatatatttatgtaaatatatgtatgaaaatggaaaagaaaagagtaaataaattgtgggttttgtttttaggaagtggaagtttgagttgggttaatgaagaagagaaaagaagtgtgaatttgaagagaggagacatattcagacttgaccctggttctgtattttatgtacaaagtgacttagagactaaacgtgaaagcctaaggatttatgccatctttcccaattcagatgatgaggactcaattgtatgaactctctctctctctctctctctct

SEQ ID NO: 186747 - DNA, 3063 bp, Cannabis indica
gttctgagtggctctatccctgctgaaattggacaattatcagaaatgcagtacctgtaatttcttagcaattatacactttttctttgtttaatactaaaatcaggagcattgttattaggcacctaaagcctttaggtgtacaacaccaacaccatactcttataaatggttagcgatttttatattgtttatttaatcaaaatgtataggatccgatagtgaattgcacaaacagcggtatgccacctcttgtggtgttcagcaccttaaggtctcccttggtatttctctaaaaccagacattcttattcttaaatttgtgattgaacaggagccttggcataaacaatctgacagggccggtgcccccggagctaggcaatttaacaaagatggtttctctgtaagcccatgcctgcaatgttttcagatgcagtttctatgcctctaatttttcacttctttttcaaagtttggaactttgttgatgttctttttatgcaacagaagttttagttcaaatggttttgtgggagaattacctacacaacttggaaaattgacctccctagagcagttgtaagttgtaattattgaaatagtgtggtctctctctgtttctgaatttgcctttatttatttatttatttttcataattcaggtacattgatagcagtggagttacaggaccaattccacaagaatttgcaaacttaaaatcccttagaattctgtactcatctgactgactttttcttatacacatctctatgtgtgtcatactcataggtgaattcttttcctgtttcagttgggcatctgataatctattcaccggaaaactcccacaattcttggggactctcactgaattcatagacctgtaatttttatcactatttccctttaacttttatgaattattttaagattatacttttcttaactagtactgctcatcttctatcagacgaatcgaaggaacatctctcgaaggcccgattcctagcagttttagcgctctaactaaacttgagaccctgtaaaatcttctatttatgattcattatctttgttgcattttttcatgtttatgttgtaagtttgaaatttcttactctcttattacatgtgctactttgtgtaggagaattggtgatctaagccttgaagattcttctcttaatttcttggaaaatcaaactagtttgtccattctgtatgctgcttcctatctaacctcaaaaagaacaacgacttgacttgaatctattgtgagatttcaatttagttgatattcttattattgatcagcttttgacaattgcaggactttgagaaattgtcgattgtctggcgaaattccacaacaaattggtaggctggtagagttgcagcaactgtaagtgggcttgttatcttaaattttatgtcatctaaaaaggatattttctgtaattgagtgttccatttcattaatttgttctattcattcccatagggacttaagctttaacaagttgactggctcaataccaaactcattcaaagacttaacaatgttaacttatctgtgagtagattttctcattctcatatggttacttttatcatgattgatcatggttatctgaagacatgaattcattcattttattcattatagatatcttggaaacaacaacatgaggggagagttacctgaaaatatcattactccaaagcttttagcattgtaagaaacaccttcagttacatcttttaatcattctgcagaattccttagctttaatatgaatatttctcatgacaacaacagagatgtttctttcaacaatataactggaaatgttcctccaaactatgctaaaacaggattttcgatgtaagttctaaaaacttttgctactacatgagacggttatagtaaccttagcagcggtttccttgaactagccattttttttttctttctcaattcaggaatgtcctcggaacctcaatcaatgcaaacactttacttgacaggtgaaaataaaaaccttacaatatctatcattttacagctctacaagatagaacttactttaatccctagttttcctttctctagttttaatgccctttatgattcttcaatctaaaaagaaagaaaataacaaggcttatatatagtatttggaatttacgtatctgattctaatcatttcaatggtcatggagataggaaatcacttgaccttctgctctgcctccaacaagagagtaaatgtgctaatcaagcaccaacatgtaagtaaaaagtttttaaggcttattgtttatcagttttatgagagtgattgttgttgcttttgtgcatacaaatatatatatacataagtatgcatcaagttttcatggggacaccgttgcatcattgttaatactatagcatagttttttgcctcaaaaattaagttttcataagagcatcggtttttgcaccatgagaccattgcaagagtattgcaatgctctaaaaaaattaaattttttctgacactgttgtagaagcatcacgtttggcctcaaaaatcaagttttcatgggaaccatcacagttttgtttgaaattctgcaaaatttcagctctaaaaagaaacgcgaacaaaatcaataaaatgttgtacccaagtgttgaaatccataaactaataaaacattaatatgataggtgtaagttttggattggattggattttcttaggtgtaaaatgtctaaagtttaattccataagatttgtgacttaaaaaacaactttatttgtgattatcaccagaacaaaatttctctttgtagcatcattctctgttaaaagtggtgggacagaagtagtatctgcatcaggcaccaagtatgcagctgattctgaacaactaggagcagcatcattgtacacaaattctaagctcaactgggcagtaagcaataccgggaacttcttgttcagtccaaaagggcctcaatatatagcaagtacaaattcccaaatcacaaaaactttggactctgaact

SEQ ID NO: 186748 - DNA, 7214 bp, Cannabis indica
gtttagatgtttgtttttctattactttcatgttgttttcgaatttgttttatagaatactagtaaaataagtaaaaaaaaaaaatgtatatttaaatataaaagtattaaaaatttttatacaaaatagtactttgtgtaaattttctacaaaaaaaatattaaattatctaaagtaatattaattttgaaattttaaataaaatcaatcataaataaagtatattatatatatatattctttttaatggaaaatcaataatttgagaataatgctacatactaattccataataatatgcatcttgttaccttatcataaacctcacttcactacacacaaaaaaaaaaaaaaaacaattttttaagaaaaaaaaaaaattcctctcaactgacataggtgtgtgtccatacgttacaaattggaccaaaccaaaagatttgagaatacgaaaacgactaaagtatctcattctcaccactatggttcttttcattgatatatcctaatcgtttcgcaactaattatgttctctttcctaacttactaagcacaagtttttttcatttatatattttgaagaaaaagaaaaagagagttcagcttaataaaagagtcttgatttataaccaccaaagcgttgagtctagtgctggtaccctttgctttgtaccaataggtcaagggttcaaactaaactcaaggccaaaaacttcaaaataaattttaatattaaaatattaaattctaaattttaatattttgtttttccgcagagttaaatactaaattttaatcaaagcatcatcttctctacctacagtaatcgatagtaagtggggcaattaaagtttttggaattttgacgaccagcaaacacattttagcatcgtgtgtcatcgttggaggtggttaattaccgacaaagaaccttgaaccccaactagcgcctcgacaacgacaccaaaggccattgaccaagaatagaaacttcaactcccccctagtgaactagatatcgcggcaacactaggaagttgagcagagtttaagagctacgacacaaaagacgcatagatgcttcaacatataggtttgacgtatcctaaggtaatattctaaaatatttttgcactaaaacaacgcacgtagctgtactctcgtgtagcagttaacgcttggtggatcgtatatagtgaaccaaacacgcatgcaacatacgcgcatatgttctacaaaacatgcgtgcaacatataaaaaatagaccaaacacgcgtgcaacatacgacaagtcttgttttatatacatagacctgatcaatttaactaaactgacagaatgcatcttctctaatctaaagattgcatgctaatctagctttggtatcaaagtgaaatataataaaagcaagcttgaagatgatgtgatgtattcttttccagactccaattcttcgcatggcatgaaacaagtacatatgaaattgtctcaacttaaattattcaaatgacaaaaggacttaggctgtccccaaaattatagtaaattccaaatatcttaaattcaatctaatcattggatcacccctttttcttttccacgtttttctctacaaagaatgtacattaaaaacccaacacaaaacaatgagcaaaaaaaaggagagcatatgcattgaagatagccaaataatgaaaagtataagacaaaacaaagggagaaaaaaaaacaaaggtgcagaaccaacatcaatgtcacatgctaccagctctgcccggtgtggttttagtagcaggagacttaaacttggatatgtcaacaagatcaccaaataatttatcctctggcttgttaggcttgctaggtggaacataagatgaggtagaaacctggtacgagtttctcattccattatcatccctaacagatagaccatacattcgctgttcaagatattgtgtcccttgttgttgctgaccgtagccaccataaccagccatctgctgaccatagccaccaccataaccaaccatctgctgaccatagccaccaccaaaaccagctgacatcatctggcccgcttgcattggctgaggatgcatgcccatgtatggccctccatggcctggctgaggttgaaaacccaactgattgtttggtccaacctggctattgattgctgacaaatggttacctgtaatcggctggatatacataccaactacctgatcattccccattggttgaggtcctaggggaagggagccaccctgtggatgtgaggcaactacttgactaacttgtggttgttgggggtattgtgcacttgcgactccatcagcagtagactgagcttcccagggtggtggtgggaatgctccaccgccttgattacctgtccaaccatgcaaaatattaaaccatataagactaatccaatatattttttttataagaaaaacaagtcacatggtaaatcatcacaattgtctagtcatcaacagtccggcacaccaccagcatttagttctgagatattgaagttccactacagaaagagtgatgtgccattctgtaatttttatttgctacactatgattgttagtattatattttactatgaataggataaattaacaaatgcaccgtagactggtgaaggcggctgctgctgctgctgctgctgctgctgctgctgctgagcaatctgaccattccaggcaggaccaccactttgtgtgtagagtgattggtcgtactgagaagttgccatattttggaccattccattgggatataatccaccttgtggtggtgcaaaattttgctggtgttgggctggagagctggtttgtccttggggattagcaggctgtgtatctgcagaatttgtggtggtgttattgtcagagaacatgtcgaacagaacaagagcattctgctgagatactggagtactttgttgttgtccccccacaggaacaagagccagagaagcctctgcctttggtgaactaaaatcatctccacttagcaggtccattttaggatcaaccattgttgttggagctggaccattagttgcaggagcaggaagagctagttgattcagtggattagcccctgcaccagcacttgaggtggatctgcaaaagatcaagtccgaagcgagatcattaatttcatatggcatacaagagctacatatttgtatatatttactatataagtatatatttcttcagctaggcaaaatatcaggagacagaattctaacagtgcagtgcctacagctctcaaaaccaccacacactcatgattgctgagatcaaattccagaaagatggcaggaaatatgggcatagccgcataggtagatttaaaattacaaaattaaacttaagttgcaaattgcttctacattcatatattagccacttaagtaattacactatgcagtcaagtagaatttttcattaactagttacctcctatcaggctgtttgctgctatctccagtgtcaactagagggctatcaacatctacaagtgcaccagaagattcagatttaggttttattattagaccaggtgttcctgaagaaatggcttcatgcttggctagtacacgctgcaaatcatcattcagtgctagtccttgacataaaagtgattcatccctgaaatagaaaatcaaacacaatttaaagaaaccatggtgagtgtagaaaacataaatgtttaaaatggtccatgcagccctttccaaaaaagcaaagaggttcagtgaaaacaaaatcttaataaacaactacattgttaaacaaatgataaaatgatatacaaacaaatacacacgtgtatcgtgcttgtttaataataccaaataaaaagccaatatgaactggtgtgaaattccatcatctcaagccacttaacaacaataacagcacacgtaagaactctcaaaacttctacaacatgaattgacaacagctatattcttgcttataaacagggagagaaacacaataacacatatatattagtgtcatactgctattagcaaacagttaaagagattagatgatgcatcttgtcttgatgctcttataaaaattacaattaaaatatcttaaaaacatgattaatggagcaaagatgattgtatacttacgaggtggagttaacaaggtgcacaactctctgcttatacgtccggcactgttctaccaaatcaacaataacctcttgcctaaggccctgaaattcataagaaacaaaagattgcaaaaagtaggattaagtaattaaatataaatttccagttagtacgaaaagttgtttgacaaattgcagacactgaattacaagctagagaattataaagtgcttgtagcagacaaggtttaatacacacataaaaattctagtcagataagtacctctttattctctggatcaattgcactaagcatttctgtaagaacatccattatgccacgtgcattctgaatttctgacaagctaacaaaagcaattctatttaaccaataaattcatgataacatcaaccctttaaaagaataacgtgattgaccaaacattcaattttcccttgattattatacatacagacaatatctcaaaataaagctcaagaaccttgcctatacggacagaaattagcagataaatcatctggttgtttaaaattctaggatgcagtataagcttgtcaccaactgactactttctaatattagagtaacagattaatgcagtgtcttgccatgcagttgtaaggtataataaatatttcaaaaccatttattcataatgactaagagcaagtgccatcaagaagattaacgtagattttccctcaattcatatagcaatataaggatccatgtatgcacctcaaggtaggaaactcagactctgcagatggcgcagctgtggctgtatcttgatgaacgtcagaattccgcagattctgaggatatgaagacaatggttgggtttgtggaggggtaaagaccggtgcagctctctcagatctctgtggaaatactgctccagcacgctgaaggataatagaaaacagtaataaaattatatattgtaaaagtgagacaaaggtactcaaaaaaaaaagttctcgtgtcaatgaaacttcttatttagttgcaatggcaatagatccttgcaatgaactttaaaaaaaacataccaataattcctggtatgcagcatagtattgtggatatcttgctcttgctcctccaaaggcttcttgccaagtatcaaccaagattaatatcttctctttgacatgtaagtcaggctacaggccacataaaaataaaattaaaaaataaccatgaaaaatgtgcagaagaactaagtgcaaaatataggaccaaccaaaccattgaataaacatcaataccttcttctttactattttcaccatctcatgaagcacatctttctccgccacatgcatatggacaatgtccccacaattctttataatggtctccaaaagctaaaatatagcaatcatacaaaacagaaccattcagttctatgtgagataaactcgtataaaaaggacagatgaaactacacatatacaataatcaaaattaaacatatattcaagagtatgtccatctataatggtctcatagtacacggacctttcatcagtttaagacaatcaaaataagtgtttcagttcgcattcataattcataatacgacatacttctaaaactgaactacacacttaatttaaagactggaaaaagcaactatctatgagagatctgagaattttcctaagctagtcaaaactagtttctttcttcttcttaaaagaacggagatgtactgaagaaaacccaagaacgatgcaaaacgccaaaactcataaaagaataaaataaaatggggatattaacaataggaataggattacaaaaccatcagcttaactataagcaatcaacaagtaaatcattcaatcttgaacacaatctctcaagtgagcaaaactgtgagtgaaagagaagttaaaaccaaaattttagcaattaataagaaactgaagcacttgatattccggaagacatattataagagctccaagcaagttaccgtgagagcaagaagttgaactttcgggtttctacttccaatgcgtttctttatacctttaacaacatctttagcttgcctggtaatgatacttcagagttagaattccaaagttaccaaaaataaataaatatatcccataaaaaagataataataacaaagaaatatagaaacacacagttaaaccacaaaaacagaactaaatcttaaaacccagattcacacatgcattttattcattctggattctcctctcttattctatagttagagtgccaatcatccatcctggttcctcatccactaccttttttcttcatggtctaaactaggcattttcgaactcccaccacacaccactctacaaaaggaccacttcagtactgctccagtaccatagagcagcaaccttgagcccaggaaacctaatgaaatccaaatttatgatagcaagcttcgaattttccacacatcattaaagtagagtatagaatagttatcaaattaactcattcctaggtcttttcttacaatcaaaacaataacgagctaaaacaaggagaacccattaccataacagcctcaaatatctaaatctagacaatactttactcatcaaacatcataaaaaacgaaaataacggtagacacaatttcagctacaactctctctcaattctcaacaagctcgaaacccaatactccacaaaaattacgtgcatcaaatttttgactcacaattgaaccacttcaataaagcaaataataataaaaataagaaaaaggaaaggatccatggggacacgtacccaggatcgtgattgagcatatcgcaaatttcaatgttcatggcccaatcaggaccgatgagcatgtcgctcgtggcgcgttccaccatagaattcaccatctccgttcacccccaacaaacaaaacgcaccgatccgaataacaagtcctattaaaccaaatcgactcactttctccttaagatcgcgtatgattccggcaactcacacaaatatttcggcctctctctct

SEQ ID NO: 186749 - DNA, 4798 bp, Cannabis indica
tgtgtgtatagataaaatgtatagtgattttgtttagtgaaaaaggggcttatgatttcttttatgtttgattgaaaggatacccaagtgagaacaacaacccccaaactgggaagaagtcttggtctactaagaagaaaggagatcgaggcttcatcgagggatggtgagttttcgaaattctcattcaacttcgaaaagacctgcaatttaaccgaaacaaacttgagattaccaggagtttcttgttctgatttttactttttgctcgtgcagtcttttcgcgctctgctgctgttggctctgtgaagaatgcttctaactccattaagtcgatcgccatatttcttctaccttttcttgcttacccttcagtgatgggtatggttttcttcatagttttaatttacagtttatgaatatgtattgtaataacatgtaatctgtcatggtagttacttacataatcattttcagtactttgtatcctatgttagcaatttttctctgatcaaaatctccaacaacaagtcaaactcaacctcaatcaaatgcaagaaacacggtaatggagaagcacgacacgagtctcctgagtttttctttttataaaactaagatcctcgcctaaccctacaatgtttggggaccagaaagctataacaattggtatgtaggtacctacgaggaactcgaaatcacgagtctcctgattaggacctacatccaatctcatcaaacctttggtttgtgtcaaccctatgaagtaatggaaaagaaaccgaaacatttaaccgatcaagtgcatacaaaacacaaaaggtatagagattgaggactaaggtataaagaatgtggttaaaagttaaaacatactataattgaaaagatctaatttccccaattttccttatttttatcaacatttataagtgtaacaacacaccatatgcataatgcacttaatatccaaacaaaagatcttgtaatgtacaaccaaattattgaaccaaaatgcttgtttcaagtgtgacaaaattgggcaagctaaaaaatcgcttgtatcgggtctgacagacaaaaaaatggaaggtaataatttataacaaatgaaatactaaccctttgcaaggctgtttcttaaacggtatcagacattgggaaaaacttatcgatcttgttgttggagaggatcttgttcgggtccaattcttttcgtgctttattgtatgcatcgacgggaaatctctttctaagcctttcctgtagagctgctagctcgtccttgtcttttggaacctggggaaagtataaaagggtgaatgaattaaatgagacgaacactaaaacataagtacaattatcgtcggctaataatttaagtacaccaattaagtacttttggttgtaaaaattgttaaccaaacataatagtgcagtccatatgaaatagagtatggatcacacaaatttcgattcgtaagatacctcaatctttgcccagtgttcataagcagaatatcgaccccacaatttcgattgagtcagatgtctgtagtggaaaaactcttctgtgatttcttttctctggcgagcatccgtggtaggaagatacatgattatgccaacctgaaagagataaggcaacaattcagattagaactttagcatgtgaatttaatatctccagcttttctgtatttcgttttcatgctacactgatcagaaagagatacttatactcagatcaagactctaaactcttaacatcgatccatttttgtctaaagtttaagttcaaagtagttatacttcacgctagaaagatgtctcgaaccaacatattttactagccaccaaaaagaaccaggagttcaaaggagaaatagttacccaggaaaatatttcatcatcagatgagcttgaagctggactcatggggctcttgctgcaagctgaccaccgttgctcaattggagaaggcgcaggaactttttccttctctatcagcttcttaagatcttcaatgtattgaaggtctttcatgttcggtttacttaaggtaccaacaggaaaacaagtctcagaaacccactgttggccaccacaatcaaacccgagaatttcatcactccatcctactctatatccctctgactttctccagaactcagcctcagcttgattaacttgtataacatggtctttgttcagaggatctaaagcgagcagtttatctctcaactctgtaaatgtaagatcgtttatatcttgttcaacgtttccttcagatggagccgtaatgtctctcgctctgcattgcacatgagtaaaagctgttatagtatcggttaaatacattgttaaaacaagacgacaaacaaaccatacctgtacttcctcagactctccttgtagagatcccgaacatgctgtaaggcctcatccgaagtatatttggggttaaatttcggggcacctttccattttgacacaggattgcatgtcacaaccacaaccgcatctgtatatggaatatacaggtactttacgtgtttattctcagacaacaatttcctgtaaaaaaagagaggaattttagttgtgttgtgcaaattgattaagggggccaagacatgattacttgataatggttcagaaaagagtaattacttgtgatttttcttgatatcttccattgttgagataaaagtgtgctccacaagctccagtctctcaacacattgaatagtcacctcagcaacaactccaaggcccccgagaccacaacgagcaagataaaagagctctggatctttttcttttgataattctattgtccccttagcaggagtgaccagtttcatgctgacaatctgttcatcgataggaggcaatcttgcaccggtcccatgtgcaccaacctacaacgaaaaacgtgaaattaaaggtggattctaaaacaacaaaccgagttgagtgaacttgaagttgaacaccacttgagtaagtcattctacttaggaatcagatattgacatgttgtatcaactttattgtttcaaggcattgaagttagttaatcatgcacattcatgaactgcctatgtgatatttcaagagacagacaataacattaagcgaaaacacgaatggaaacccctagaaccataaataataacaccaacactacagagtgatacattcatacagttttcatgacaaagcaccacagaaattcatcttcttgaactaagggtaccttcggttgggaggaatgaaaacacacgaataagaatagggaaataaaatttaaaatatataagaaaaatagataaattttttcatcttgtactggaacagtctttccatctattttaaaatggaacagtcattctactaaaataataaaaaaatcattcaatactttaaaatacaaccaacgaaacaatggaataaaaaccaattcttttccattccatttcacttcattactcctaactaaatgcaacccaaagctatgttccaatgacaatgtatcgaatcgatgagtacaaattcaaccagaattcgctaatccaaagtacaaatattaaataatcaacaatgatctatgcaattaccattaccattatgcaatcacaacaaagtcaatactaacaaatattagttttcgagacttgttagaattgtaagatgcattaaggtgtgattaaggtgcatgatatattttattttcacacattaacaacatgagactaattctaacataaacacaaattcctaacaaattttcaaccagcatttactattagtatcttctacttaaggtcaaactgagtcaataactaaagtcaacactaaggacccaaagtaccaaatcgtgctcccgaacttttacatgtactatccacatcagtttcattaaatcaacaatctcaatagttacgagaaaacatatcaaagttcgaataacaaaaattctaattagccataaataacaataataataataacaaagagaagccataaacctgtatgatgccaccaatttgctgttccctaatagaagcaaaattctgaagagtaatgccataatccttaatcccatcaaccaattcctgaacccttatcccagcttgaactctaaccctcttcttctccttatccacctccaaaaccttatccataagagccaaattcaccatcccagctctagaaagcccgatcccattaggggacaacccagacccaacaggccgaatccgagtcttcttctcattagcttctttcacaaccctctcaagctcaccaatattctcgggttggtgaaaaacccgggtctgaacctcatgggtcccgctccaattcgaaaccgtatgaagatcttcaggcaaaggagcgtaacgaaagatctgagctttcttgtgttttgcattttcggggaatgggaatgagtagtatgtggatacgccgcagaagattactaaagctccatagccaaggtacttgcgaagctcagcttgggacgacgacgacgatgatgatggcggtggtggtggtgaagtagacaagtgtcttgtaatattgggtttgctgccatggcgggggaagagggaatggagtgaacgcttagctatgagagctctgagcatttttgagtttgtttgaggaaagagaagagtgtgtttgtgtttttgggtatggccacgttcggtggttgtttttcagtgtttaaatattcagtcaaagactcagtagtgtaactgtctagcttggtggaaggtaggggaaagag

SEQ ID NO: 186750 - DNA, 966 bp, Cannabis indica
tgtcagaatattttttttttcacggcaatgttcgttatgcttacaacatcatctttgtaaatttttgacatttttttgaataatttacaataccaaaaatacgtttgaagttttttgaacacgcgtggtaaactggaatatcaagaactctattttcggtattgtaaactattcgtaatttttcaaaaatttacaagaatgatactgtaactataacaaataccgctataaattattttttaaaaaaatattttggcatgtaatttcagacataaaaattgactaaaaggttgtaattaacactcctcgtacggctattatagtttttttaaacccgctaatggttaattgtaatgaatatatgtatatatatattgttaaacacaagaatagaaattcatatttaattattgtttcacattcaaatacatgtatgtacagtttagttatgaatttctaaaagtcctttgtcaatgtcaaattagtaaaaaaaaaagttttattgtgcgacgttacttggttggataaattatgaagctaaagcaaaggtttctagtttctgattagaagacttgcaagcctttgaccgcaagagccttgaaatattatgcaactttagacaattaataaacttatattattatatggtagagtttcaaagattatacaacaaaacccactaatctccatgtaattaaattaacaagtgaagaaagaaactatgagtgggtgcaccaaatacccatttgtggttggactaagctgtcctataatctcaagtgttactgttgacttaaaacctaattttctaaatacattattactaattataatttctttaagtcaaaataatgaattaattattattccctcttaaggctctatcctagtataagtatcaactctactatgggtctaaacatactcatcagcaccatacttgattatacaaagttaaggaattag

SEQ ID NO: 186751 - DNA, 5853 bp, Cannabis indica
ggtgttacagtcaccgcctcaaagtcctccttgagcttggctgtggacgacatgtccttaatctcttgccttaaatcttcaatgagcttgtatgcaggaactatttgcttgtttactttgcctaactaaaaactcttttgctcggcctttttcttagcatcttccaatgccttctttagttcaccgatagttgttgtggcctttagagcagcatatttgggtcgagaataagtgtatgtcaacttcagattaacccacacgggaaaacagagttaaagcatgtacaaagcaaagtctttataaagataatcttaaggaaaaacacttacttgagtgacctctttcagaactcctccgaccagtaatttcactggaatctctttcgcccttgtgagttgctcatttacttctggcatcatgcaatcttgataaaaaatgagcatttctttgcccttcttagtttctgggtgaagtataggtggagtagccaatgaccttggtaacttgggccccttagtgttggcccctttagagtttttggttgaggtagtggaggcctcatactttgcatttttcttagtcagaggaacaactttagggatgacatcaagaatatttgaggagtcagcagccaaactcctcttagtgttgacttgaggagtcttggagcttggaggaatactcttaggcagagtatcgtccacctttggatgttggtgggagagttctagccggatacatcgcatgtcctcttctttatagcatgcaacattttctccaacataactgcataaaaggaaagtatacttgttaaaaatataaacaaacaaggataagtgaaaaataaactaccctacatgtcaacaggagcaccctcttgaacaagtagtgaaggggtattctcatcaaaagagtcctcctcttcatcctcgaccatcatggcctttcctctccctgccacctagaccagaggatgagcaacctccttaagatcattcctaatcatgatgggccgctcaattagcacttggtcaccctggagagccttcttcttctttttctttagagcctcttgctaagttgtaacctcctcagtcgcttgttcaggctcttgaacttcatcagatgggtagagcccgtaccaaatgaaattagcctcaatggccaagaaagaaatattctgagctgactctagcagttggagtattttttgggctcctgatctaagacctgaggtaaagggaggatgataataaggtggaatgtgctagaaactgatgtggttggtacccatgtccttgacaaagtagtagtcctctacaaatcctggacacatccgtgtccgtggtgccgatcagccatttacactcattctgggaaaagtagaaaaacccaaacctattctgcttggggctagactttagatcaaataaatagttagtgttgtgggtaggtggctgactccatccttaggaagcataaagcacgtacagtgtgtcaaggtactttatgcccttggcggtgagctgggttggacatatgtcataataattggctatttctttgaaatagggatgcaaagacagcattgcactctgtttggcatgtggccccaaccatgcacaaaatccccctctaggatttgctcctagttgtttggactaggaaagaacgcttccaccttcccaaggagaccttcttcatagagattagtcaatctcttgaaggttaccacggatgatggcgagacccaccgagcacccttcggaccttaattatttaaaggttgggcctttatgtattcttcctcaatgtaatcttggcctgccaccaagacatcttcctcctcaaagacaaactctctgacctctttgtagccaccaaaaggaagtacttaagctctctcatcgtcttcttcttcttctccatggaccttggagggcctgcagtgcaaatctctccatggtcctcaacctcttggacttcaatctcccctcctgtagttacttcatccttgcttggaggcttggcttgctccaccctagctgctgcaaatagccaagcaaagtgaggatcagtttttgaggccttcctcatagtctgcttggtccgtgccatcattctacatttggatggttgctttgttttatatgtatgcctcgcaacagtgatagcaatatcagctacggtagtactcctggcagattgggttgcccgaccctctataagtgtgtctacaacaccaggtcggacactatacgtccaagaagaaaaaagatagcgcctccaacctttctttagttcccaaataaagcaaccatactcttctccacgtatttactcagggtattggtggtgcttcaccaggggcttcggggactctatacggtcactgctcgctttcaaatcctcaaaactagaatttaaaagattttcactagatgaagatgaatttgtatggagtcaaggatgatctttgcataagaactgaagtagatcctggttgatatggtgtttacctccctagaactcactagggttcatctacaaaaagatgagagacaagagatgagagttggacaaggggaaaggagaaaaacatgtgcaatatgctgaccatgccgactaatgataaaaaagaaggaatttcattctaaaatagaattcccaaacctaaaagttcgaaatcacgaataatatctagaaatttttcagaaacccatgaatgggtgaatataaaaatttttaggctaaaagtgatataaaattagagaatcagaaggtcgaaatatatgttagtcaaagttaaaagccctaatatcatctagtctatgatcagtcaagaaaaacttaagaacatagaaatctcgtagcaagaagttcagaaaataatgcatgtactcaacagatattgcataaaaaagaggggaagacaacttactcattgtttgaagctttctaaactttcttggagggtattagcaatggagtttccaacatattttctttgaagatttgagaataaaaaggagagattctttgctttgatttttttagagtaaaaatggctaaaagaatcccctaaaagcttttaacccctttaataagtgtttaaaaagagcaattaattaatttaaaatttgaatattttggtttttccccctaaatcagatgttagtactcattgaaaatggtacagatgtcacacatggggttgtcactcaaccgtcactgtgtgattcgaggtatagctttcaagaagtattaaatgccccaaacaccaaagagtcgttcgatcaagtcacgttgaatcaaagatgataaccagacacgcgtcaactatctgatagcttcctggctgaataagtccacgtgcgaccaagaagatctcgcacgaacttggggagaaaaagttatccaaatttctacactgacatggcatccatctaggtgacacgtgtaacatatttcataacctgggcgaatgattctactcctagtaggtcgtacatttactttccactatgataatatcactgtaattgtgaataaatatatgttaggaatttaatagaacttatatattaaacctataatcatgtacaaaacatgtgaataaagcatatgacaaagtcaagatatgatttttgatctttattgaaagtaaataagattacaataaaattgagttttatttagagcataaaatcccaacatttgaagccataggtcttgtaaaaacaaatctggtatcctgcctagttcaactccaaggctttaatggagatacacttgttctaatgagaaaaatatagttatcggttacacagaatggagttgtttctggaagcaacatagtatcgactttcaaatattgtacttttgtggtgatagattgcccaacagcctacaatgtcatttttatccaaatttatgcactatgacatggcatccatctaggtgacatgtgtaacatatttcacaacatgagtagatgattctactcctagtaggtcgtacaaatagttatgatgatcaaagtcacacatagatggtagaatgtctggacagatcatgagtagacatccaaccagctccactaggcaggtagctcgcatgcaccaaccaaggggtgcaaattaacaatttctgagatgtatctcgtatatttcaaagcttgcaagtcacaacacaatccttacatttgtgggatgaattcgtatctttagagaataaatgtaatcaatctaaatttctcatttcttcattgtaattatagaaataaactagtttcccattttatttattattaattagggaaactaatttcatgtaattaatccctataaatagtggtctcatctcactattcaaggacacaaaaaaatcagagagagaacactcaagagagaaaatcaatctaagagtaaattgctcagagatcattataagagcttttaagagagatcaaagcattcttactcaatcctctcacaagtcaatacaatgaaaaagggagtaggctaaccaactataaggggttgaacatctataaaatttggtgttttctttactttatattatttactttctgttatttaattattataaatctctttaattagactctttatcaatgactaaaagcgaggtcaacaatcatcttaggacgacctattttagttgactttagggctgtgacgttgattcaccacttatgcttaaagttcccaagtgatatcgaaatcattggacaatcagagggaaccagaagagtgcaagaagttgttacaatgtctcgaccaaaactgttttgatggtctgagaaagaaatcatgaaaaacctggaacatccacccagaaagcactgggggttgtccgggaagaagatgagctagatccatgtgtaggtgtaaagagacaattaaacctgtggaggagatagaagaagtgtgcatcagtgatgaagatttcactaaagtcatcaaagtgggaaataatcttcctccagctgttagagaaaaaattttctctatagtaaaagaaataatgatgtattagtctggagccattctgacatgattggaatcaacccacatgtgatttgtcatgctctaaacacagacccaactatggaattagtttgtcagaagtgaagaccatgagatccaattcgagcagaagtagtgaagatggaagtagacaagttgactaacatagagtttgtctaggaagctttatatctagtatggctagctaacccagtattggtcacaaagcctaatggaacttggagaatgtaatagatttcatagatgtaaataaggcttgcactaaagactgctttccacttccacgaataaattagatggttgacgcaacttcatggtatgaacttttgagctttatggatgcatactccggctataattagatcaaaatgtatgtggttgaccaggaacacactagcgtccaaattgacaaaggaatttattactacatggtcatgccatttggattaaaaaatatcagagcaacatatcaatgccttgtcaacaagatgtccaaagaagttctgtgaaagaatatggaaggctatgttgatgacatgttggtgaagtcaaagaccttcgtgagccataatgaagatttagaataaactttctctatcacccaaaagtatggaatgcaattaaacccaaataaaagcactttcagagtttccccaggaaattttctaggtttcattgtcagttctagaggaatcgaagcaaacatggaaaggtacaacttcatattatgctaccactttagtgtgagaagtgccgcttttgtacctggcagtgtcagatc

SEQ ID NO: 186752 - DNA, 1855 bp, Cannabis indica
tttgtttagctaaagggaaaacataacaaggttccttattgtgcaaatcattagtattacaaccaagagtatctttaagtaaatctaggcgattatgggaaggatgaccaagccgcttgtgccatatttcagcagtaaccgataggattcgagggacttcatgtgtagtatcaagaacgtagaggtcattgactacactacctcttccaatcgtcatcatgctggcactgtcctgcataatgaatctgtcagcagtaaatttaaaagtaatgggagcattgttagttagataactaaccgatataatattgtatttgaaattaggtgcatacaagacattgtttagaacaatattattaccaaggttcactgttccactttgattaaccataagagagttgttatttggtaagataagtttagttgtagagaccttacttatacattggaaaagtttgatatttgagcatatgtgcctagttgctcctgtatcaataatccaagaatcacatagtggaatctttgaaacgttggataagacaatacctgagttgccaaccgaagtactaggttcatttacgctgttactggtttgttgagaagccagcagattcagcaattgttggtactgtatggcagaaagctgaggaagaaaagcatgcgattctggtgtgttgctgctgttttcttcatttccagtctctacttgattagtatttgcatcttttgtcttgttttgtcgattaaaaccaggtggatacccatgtatcttgtagcacttttcgattgtgtgcccaaggatgttgtagtgtgtgcaaaaaggcctattcctcttctgttgattcgatcttggcgcttgattgtcacttttctggtttcctttcttgtctccttgaaaagcaaaggccatggcttgattagtgttgttcgaattactgcattagtgcctctttgatgttcttcttgagtcacaagatgagataccctgttgacttcgggtaacggatccatgagcaggatacttcctcgtacttgagaatacgagtctgaaagtcccattaagaaggacataatgtactctatatggtaatgatcttgtagccttttgacaccaccgcaagtacagccattgcaggtgcaagatggtctgtagttagtgagttcttcccaaattgtcttgagtttagtaaagtacatactaattgtttgattttcttgcctaagattcataagatccttccttagattgtagatatgtggaccatttttctgatgaaatctaacctttaagtcattccaaatgttagaagcacattcatcatataatatgcttgaagaaatatcttttgatacagaattcaaaatccatgaaataacgatgttattatttctataccaagcattatagagattatgatcagaaacaggaggtttagggatcgaaccatcgagaaaaccaatcttgttctttaccgatattgcgagctgcatcgccctacaccaggagacatagttgtcctgacctgtgaggggttgtgacactaaagcactacctggattgtctccatggtgaaggaagtaagggctaccaggaccttcgaggggattcttgactgtttggggctgaacagcttgattgagttatccagaaacatttccaagatcgctgatgatagtgggattctcaggttgaatttcgcctgttgccattgcaagatcacagagggcaacgaagaagagaaggtgaagattcaaccgaaaagaaagacgcggaagtacacagccttgccggagaagaaggcgcagaaggctggagaagaaagatcggacgtgaaagcttatctttctcgctctg

SEQ ID NO: 186753 - DNA, 4772 bp, Cannabis indica
aagatgtttttggaggataatttaattgttcctcaagagacaaggaaatagtttattgtggctttctctaaacaagtcttacaatacattagacagcttcttacctaacattctcattaggaaaattagaatcacgtttcccaacattgtaatgttggtctgaacccaattcccatagtgcaggttttccttgttgtggttggaagtgacccaaaaatctgaaaaatcaaacattaagatggctttcacttcctctgtcatttgtcaataaaccttgcaacagattgccaaagaatcatatgcaatagactgacagtaacaatgcaagtattgcctggttaattaattggaggacaaattcaacttacacatttatagcatcttgtttatcacgatcaaagtaggcattattacaataccgttgtagagttctaatgagttcttgcgactgtgctgcgggcttccattgacctcttctctcagaaaatatctgtttgtttggacataatgtggaatttacataaatttttgtatgggatgaaagatatgacaaagaacaaactacataaaaataacttagccagcagttgggtaggtaggtaggggtgatttggctaatccaactcctatctattttcactttcataacacaagcaaagcaattaagtaaaaaattaccttattgtgtgctgcagaaccaccatattggaatgcaagtgtgtctcccatgatctcataaattgtcattagctcatcagccaaaggctcaccaagattaatttttggagattctgtaaatcccaaagtaaatagctgagttccaagacaaactaaaccatagacatattgggcaacattagtacgatctagacagtcgatgcaattggtcctcaaaacccctttctgattcaataagggtttgacattgtggcttctattggaatcaccaggacatctagtattgcaaagttctatttccacgttatcggcactctcatttcgaatggataagttctctgaagagaagttatcggttttattgatcctaaatcacattttagtgtaacaattataagaataagaacatcaagcaaaaaagacgaaattatgccttttaagatatacaggttctaatacggtaaggtggatcaaccacaaacgtttagaaccaagaaaacacaaagagataagtaataagctggtgacctttggatataacttactcaatatctggagattccaggggccttgaatttggggctacttgacaatagaagatcccagttaagcttaaagcatatgcagacatgtttgctagttgcctcagaacattagttgctttgctgcaaagacaaaatccaattcaatcacactaaacttgcagaaatttctactcattatgtgaaaagcaaaaaaaaaaaaaaagacgcattacctcttagaatgtctatgcaaatcccactgaaaaaacatgagacgattctcccttggcagacttgtatttatatgccttacagcatctgcaaattctgcacgaagaatggtctctctaggcttcgtctcgcgtgtctattattagttatacaattgtaacaaaaacaagagaatttttttttactaattaggggttggcatattcataggaaagaagagaaagtaccatccattgctcagtattttaatggttcttcaagtaatgagaaaaaatttaccttaatcaaatttaaaatgatgattggatttccatatctcttgactagattctcaaaatgaagtcttgtagcctcataatttacgtcctttttgtatactgaggggaacccaaagagaaaaaaaatcagaaaaaaagtatggagaaaaaactgctaaaaaggggattttgcaattcatacatataatgtcaggttttatgtttattcgtgatgtttcctgtgaccagaaaagtggaattgagccccgaatctgtaccacagaactaatttgagtcgggcaatcttcagtagcatttgcaattacaatctgttctgtctcaacgtcattggcgactctacccttctcatttacacctcgtttcaagtatctgcacagggaagtggaaacaatcattgaaagcattctacaaaatgtgtatatgcagtactgatttgaaaattttctacgaaagaaattgaaacaaaactgagatcgaagacaggcagtacaatttccatgtaagattaagccagctatcccaatcaaccatttacttgtgtgtgtatgtgtgtgtgtgtgttttagggggaaatgcattcaaacctggtgccagcataatggcgtgagcgtctagcaatgagaattaatttgaagatccgatcagaaatagagagctcaacctagatggaatgaaaaagaaagaaaaacttcagtaaaattccaaactgagaaaacatactgaagatttcagcagctttccctcatttatttcaaattccaaaattctcacacaaacaatccaactaaaatcaatattcagattattatttcatagagagtaacctgttatcaaattttcttaaacacatacctgtttaaagaaaccatacactaaggcaactgtccataaagtattattaagattatttcggattccacgagtcaagtactcattccaaacaaacatcgattcataaagaaactgtcctgctttacagtcattcaaattcctttgaagactatgcatgacattgtatgagtagctgtaatagaaatcttttgtgagatccactgtggatagcagcttcttgtatctaagccaacaagaaaaagaaaaaggacaaatatatattagtaaaaaaagaatcaatcaatccaataaaaaaatggagatgaataactataagcattaaatataaatgaacaaaaaaaattataaaaacaaaaccaatagaatatagttagtgttttcccccagcaaaaccctgtcgataccttgtctcattcaaggtgttatttttttacatcataacagctctgtccctgtcaatattgcaggaaaacaccagaactatacaaacaataataacaatgaaggattaagatttggaagatgtactaagtgtttcatctataggcggaaaactaatgtaccagagtaacttgagctggttatgattctgagaacccaactcatcatcacattcacattgcagaagtctcaacaaatacagtacaaagttacttgtgtactactgaaatgatataaattataaaaccaaaccaattaatgtacccccaaacaatgaaattcaaaccaaaaagaaataaccatatatactagaatactgttatatgtacaattaaagaatgtctgtctagttctcgatgctactctcttattttctctttaaaagtactatgtacatattacatttacaagcgtaatggactagagacctgttctcatccttagagtaaggcaagtttgaccgcactgtagaatttggtactggaatcattttgcttttggaaattccatatattgtatgaccacaaattgttccaagctttcttcgttttgtgataacaagcatgtaataaggtcccagaaatctaacaaagcctagaaccaaaggataacttatttagttccatatcaaagagaaaaaaaaagatgtaaaattatggaaaatacagtaaattgtaccaattattccataacatattgctataagcttaagtccaccgacagctttgtttccttcatgtaaccgtctcagaagatcatggcaatcatgttctgagtaagtagtggaatcttcgaaaattgtaagctcagttggctctaaccggtcaatttttaatactctccaatgtgttctgctcttgtctcttccaatcatataaaagttctgttgaaatatgaatgatttgttagtgctgcatcataagtttcttaataacaatcatttaagatagatgaacaagaatgaccaaaatataaaatatttgagctaaaaaaatccttaaataacacatcaaaaattggaaaaacgcattatgtctgatacccaacggaacaaaaatcaagatattgcttcaatcaaagtcaattcaaaaccattcacgctaagttaaaaaaaaaacccttactctaatcaaaaactactcaacaatcatcttattattattattattattattattattattattattagtagtattagtagtaaaagtctaatttattattttattatataaatatttaaaaaaattaaatattataagaaaaaaattatcgtaatttataatataataaataatatttataaatatattaatatgtataaaattatttaaataaattatataacaaattacatacctattttagtaattatatatttaacaactatttaattatttagctcaccaaacacttatatataattttttcaactcacagctgttttaaaattatatttaccaaacactcagtagctttttctcacaatacagctatagctgtttttttccacagcacagctgtgccaaacttagccatagattgtgagaaacattaattgaaattcttgtgtatttggtaaaggtagaaaatagttatctcgtatttaacactaataggaaccattttgtagactgtataagagtgatattttattaaataataaagaacaccatacaactttgtattaatgtcccacaaactcttgactcttatagttgagtacgtcactctgactgtttttagaaatgataaatgattctgtaaa

SEQ ID NO: 186754 - DNA, 1881 bp, Cannabis indica
ttgttattttggtaaactccatgtttcttgaatcattcttaattgttaatgttggtataatcaaaggaacgattgtcaagacttgaagctgcacttgccactaagaaaggtaagatcttaaggacttgattcttttctgtataacaagttaagaaataagtttgtacttaatacttattgtagcaaaattgattcagatgctggaaatgaagaacttttaaaggtgataagtgaacttcagtctaagcttgaatctacaaatgcagaactagtttcagaaagcgaaaaggtgtagtgaaaagtttgtgtatttccattttgttctttgcttatttcattttggagtgaggattagaatgttaaaatgattctgtctctgtcgtttttcaggctcgaaaacttgctgttgaaaatgctaagctccaatatcgaattcaacatcttgtttgggctgttgagaaggctgatcatcatgaattggaacaaaccaagtgagttgtagtgattgttaatgttatgttttgcatcaaatttattgcaatttgtttgaaataatagacttataggttcccaatgatttatggatattggataatgtggttaacttgattaaagtatttgatcatgaaaaggaaaaaaactggtagacatattattctctctcacaaatttaatattaactttgatttaagagaagggaaatctttatatcaaacataaaaaatattgatttctgcttgagtaattcagtagtcaatgaagttagcattttctaggccaagccaagttttttctttcttttttagcttagaagtcttttttgtgctaaaattaagttcttatttgactagccaagagtaggatggaaattgagtagctaatgagcggggaatgcacccccaaccccatccccattcccgctcccatcccagccccttgccctgcttccaccgggttcagagtaggaaaattcccattgggtatgaaaacccattgggtacccatgaagattaaaaaaatgataataataaaataatgtaatgtatgtaatttaaaatgaaaataaatagtttttcaattttaaataaatattatgtctaaccgatattatttatatttcatattttataaattgtcaaaaacaaataaatcagaaacataactaaccacatatattgatgctaagtttgtaaagtaataagttaataacaacttaaaagaagatatgaaaaattaaaattgatatgtaaaacacaatattaaaaagtatttattataataataataagaaagatcaataatcaacattgtagtcaataactttaatataactttaatatgaaaactatatattgggatcagatatgggataagtagtgttaatgccctgacttgctccgaacctgttttgggtatacaaaattgtctcccaccccgtcccataacctatcaaagcggatatttcccgtctcattcaggatgggtatccatgggtacccaaccgcatgggtcaaatttctatcactagccaagggtagtagtattagtatagttgtattagaggtggttttcttttaattaagtaatgttttaaaactattatggggtaactttagtacaaaaagtggattgctttggctgctatatgacaaaagctaataactattttaaacagtttttttttatccaattattttggtctcaggtgatgtgtggtcatggcagaggggaaattatttgagatattggctggaagtggaaatacttgatggttcaaccaactttgctgcatcaattgttgcacatattttatctctattattaggtcattgtgatttttaacatacattttgcacagtttcaattcaactatgagttttg

SEQ ID NO: 186755 - DNA, 3007 bp, Cannabis indica
aaaattaacatatatcttctctctatttacagtatatgtcacgaacgttttctaatcacagtaatctaaactccctttgccctatggtgaccgtgtaatggagagttcaaaccacttctatggtactgtctcaccccattttccgagtaaaattttggagagtttggtgaccttatacgattcctgttatgaccatggtgaagtggatggttattatgatggtgaccttgcccattatccttttttacttctttattctcttcattttctttagtaccatcttcatttttactctcagctggaactgtgtatacaaaaggcgctgacacgtcatcgaaatcggtcagtggttccagagtttggaccactgtgctcatcgtgggccgatgtttgggccgatgactcagacattggtaagccaatgctgcagcttttcttgctccagtttcggagtataagccttccagtcttgggtccattactctgctaagctttctgggttccatcaacatgggcctggcccaatctactaaattatgctctctattcggcctgcttttgtccaaggattttcttcctgatattagctccaacagtactacgccgaagctataaacatcgctcattgctgttaagtgacctgaaaacaataataataccaatgttaaaacatgtctaagtaattttgctttttttttgaatgaaaaaaatgtgaattggttttctttatataatatgatttagcttacctgtcatgatatattcaggagcagcataaccctgggtgcccataactcgagttgacacgtgggtgtcatctccttcgggaccatcttttgcgagcccaaaatcagagagctttggagtgtaatcctggaaagaccaaaaaggaaaaagaaaacaatattaatattgaatcaactagcatattgtaatatgataataaaagaaaatgtgtataagaaattaatttaaacatcataaaaataataaaaacttaccgagtctagtaggatgtttgaagccttaaagtcacgatatatgactgatttttcagcttcgtgtaggaaagcaagacccttgcagctccaagggctatttcatccgcgttgaccatggtagagaaacagtatatcctgtaaatatcaaccaaaaaataacatgttagattaattcattgtgataaatacaagggtgttttttttttttaatgagaatgttttctaacaaaatctaagaaaagttggcaaagcaaaacatacttctgaatagttgattctctaagcttcctcttggcatgtactcatagacgagtagtctatgctcatcttcgtagcaatacccaataagcttcacaaggtgtggatgcctcaattgaccaagaagaatcacctcagtctgtttaatcaggaaatgaaaaagaaaatcagaaatcaaatcaatcatagataaacatatacatattttttaattaaccattcaataaaattattgtattttaatcatgggtggttatacttaccaaccactccttatggccttgagttccatccaagtccaaattcttaactgctaccgattgggccttcaaaccaggcctaatcttatcgtcgaggaatcctttgtggaccgggccgaacccaccttcaccaatgaaattactagacgagaaactttgggttatgacctttaactcggcaaatgtgaacgcgtacagattagaaccggcaagagatatggagagatcttccgaaagtgtcgagctgggattactcaaatccgacatagaaagtctctgaaacgacgacgttttcgttacagtttttttaggcttcgtgggggcgcaatcggccgtgtaacaactcgtgactaaagatctccatgtgcttttcttgactgccatttttaaacaacaatctttttattgtttctttggtctcttcttcttcttcacttctaagatacaacctttttggtctttgatcttctataaaatgggattggaaaaaaatatatgaattccaaactagacaaatgggaaaaagggttccaacccttttttttctattgggagagagccgattgatgtttttgtacttatgttaatcattctttgcagttctctctcctttatatagcatggtttttctttcgactcgtttttgaattatattatggattttggggtattattttatgttttgatgatgggtaacgcgtaataagtccacatagttggttcctagaaaaatgacatgcctaccctccttgactttttaatggctttaaggttaaattaaattaataaaaatctctgtcttttacctattggaacgtattatttgaaggcataataattgtatttcacgattcatggctttctattcctttcctccacaataagccttcaagcccgaaattgaactcttccaagaagcgatttgactctatattttaatttcaaataagtaactaaattacaaagaattccagctatattacgctgtgaaggaaatcatcacatagtaaacacaagagagatgcaactttatccatgccatgtatgtatgtacgtgaaggccttttcttgcccggatttatgtctgtcctctagtatgataatgacaccataaatcacatcatttagaaaaaataatgataaaattagttgtacaactacaaagcatttcacgtttatcaattttcttttctttcttttttgtttttttaaagaagaaaagaataataataaaataaaaagttgtgtaataagatattgcagtaatatttttgctgtaagctataccaaaaagattacaaaaaaaagaaggctacaatctcaatcctccggtcaaaggttaaaatgttaggaattaaaaaggaaaagttggtatatctgcaatataaattttaacttctagaacataacatatacgactgatcaactctaaaattcaaaattaacataattaatcctttaggtacattattatccttaaacaaactg

SEQ ID NO: 186756 - DNA, 2710 bp, Cannabis indica
tactatatttaaaatttttaccactatatcaaccaaaaaaaaaaaccataaattttttcatactaaaaaagtccaattaaattttttagcccaagaccccccaattggcttgagacctatggcttctattcgggcctctctcctctctcctattcgaaataaaaaaggagagagaaaaacaaggtaagaaatttccataattaaggtctcgaacataacactatactaatgtggcacattataagtgattaataattttcatatgttatttattaaaccaaaatagataataactgatattaaattacactaatggtgataattaatctcttatggtgcatgactcttagcatttatcgtaattattacatgcaaaaatgtaaagattagacacgtgaggggcaccaccgcaaaatattatattgttagtttcatatatttaaaagatattaaacattattggtgcctaataacaatgtttatatcaatgcttatctatttaagtatctctaatgtgaattgtaaaattgcaaaatagactctataaataatctatttttactaattattctacattagaaaaaggataacgatgttgcatacacgagtcaattgaatatttttatctgattctggtacaacttggccttattattcatctattccaaaaagcttagccagattcaatcgttggcaaagctaaggcatttatcaagccaaagagaaaaaacacagaatcatcattttcaagtgactcaacattataagaatctgcaaaaatttgtgtgatttccaattgtatttgttgctgtagaatgatcagactcttctctccttgtaaaggaagtatgacatgaatgtggttttttgttttctttctcttgtgtgttaacttttttgttctacacacatatatttatatatacacaagtgaaatcacatactgtaactaaatcccagagagaaatcactctcttcattggagctgattttacgaagaagactttgtatcccatcaacccatctctgcttatgagtcttgcttttgcatttgaactccataagaccttgaccagttttgagcccaaaactaacttcttctgaactatcccttactcttttgtatggccatgccgatttctcatcacagactccataaacaatgcctattcatagggtatatttaaattgattgttaacatgttactcttatgcatttaagaagaaaatacacaggttacaaggcaaggagtattgaaaatgcttacatttgatgttcttggagaaagctcctccaacatgtttacttcttagtttgattatgacatgagaattctcattgatgtggatagtgacacgcttccattgtaaacctcctgtgaattgaaaagagtaatttgttttatgtaaaggggaccaaattcttttgtatcaaaagagttaaaaaatgttttgagtgtacctttgggtagaacttgtaacaaatctcctacaaacagagaactttcatcctccattggactacaagaaacagcttgtggcttattttcagtcattcctttttcgaaaggacttattgcagcattctttctcgactcttttggcaatcttgctctcagagcagcttcaccccgtaaagctttaaaacaaaacaaaagaacagtttagattaagtattgaaaggctgcagatgtattggccttacagcttggaatgcagtattatgatgaaacagcacataccagttgcagcagctgctgtaagagtcacgagatcacctggactttgaatgtccactgctgatctaacaactgaagccacacggtcataatcagctccagccgcctcagccatttcaatgcaatgcgaagccaaaagttctgttgctgatgccaatgccaccctcattttcgatccatggaaaccagagttttcctctgcagccactgcagccaaggctgcagcaagtccagcaatagatagggcagaatgtactcttgcattttctatccgagctttgtctttcttcttcagtatgctagggctagtctccttagtttggaaccattttccaattgactccatgctctttgtgtaagcagactttccacccttgcctggctgcaaatacaaacagattcacttagaataaggatatgaaactattatgcacatcaaaaaaagttgacaaagaataaggatatcttactattggtggaagacctgattccctgattgtatcaggattcttgtcaatagaaaattgcttctgtttctgagcaagagccttggtaatttccgaggccgaaatactccatgaccttgataagaactccataggttcatggggtgtttttggctgagttattgtaggcatagatgaagctgtttgcagatcctcattttcctccaaactcattaacccttgtaaggaagtagtcctcaaaactgaagaataacttccactcatttcttagtattgtgttctttcacagacagactcttccttcaattgttctatttcaaccaaaataaatagatggattgattcaaatgttctgtaactcaagtatgctcttttataaagaacaaggtcgaccaataagctttgacttttcctgtgacaacaattgacagcaaaagttagaatactaaaattgaggactcaacagtcaacagctttattcaaccaaacaaataaatattctag

SEQ ID NO: 186757 - DNA, 3918 bp, Cannabis indica
ttttttgtgaaatgagtgacacaatagatgataattgatatatagatacaaattatttacttttcacattttataccataatagctaaaaaactaaaaataaaaatattaattcttataaaaaagaaaaaatcttttattctaacattcattgatgtgaaaatagtaaaaattatataatttatatttatttgtgaactactaccctttatatcactcattttacaaataattgaatatagtatgatggaaggactaaattaatattaaagttacattttaatgaatattattaagaagacgtatattttaaagtccacaacctaatagtgtaaaaagttttaaaggtacaattgttaattattcaaaaataaattgtgataatatacttttggtacttataaaagatgctctttatgtggaaatagaatcaaagcttatgtggacttttttgcttgcctatattagacaaagttacataatttaattaatcaacaaatattattggtgaggtcaaacaagcaacaaaatagattgcttcaatggagtagtttttagagacatttgaacttctatcacttcaatatcaatttcatctaaaagaagccgaacttgtattatacaaagaagttagacagatcacaatctacttcccctattacctattgctcctaacataggaactcataagttttttttgtgccaagagaccaaatcaacgaaattgttctccaagttggaataacatcgaaattgatcatgcttagtacatttctctatacatgtcgttgaagaaaaatggaaaaagacactcataaaggctctattctatatacacacaatcccatttaacataagagaaattaatccatacaatactaattaaagaagctcctcaacaagtttgccaaaattaaacataccattactacattggacagcattaacaacatctcgaaaagaagagacactgcaaggaacaacaagcccattcctttgctgaaaaccaaactcctcataggccttctctaatagcatcttgaagagagggtgagatagaaaggttgtgggaaccacaaacctttgcctctcttctccaacataaacagccaaaaacccagttgggatttcatcttcttcttcttcttcttcaaattctctaagcaaactctcatgatactctgatgataatgaaaatggtgatgatgatgatgatgatgatgatgacgacccctctttctcaccacctcctctccccatgattttcactttctttgctagttttttgaaactcactatcttcttccccaacattattctttctttctttctatactttcatatagatgttttttgaaatggagagatagaaaggtctaaggagaaagttgttctttcatgagttttttggattaatgagaaaacagagtggagaagggtttaaatttggaatgtttgagtggggagaatgtctcaacaatggtcatcctttgactttgttttacttgattttataatgaataaaataagagaaatgcttagagcggcactaattgtattattattcatggaagtaagtataatattgttataagatattaacgtgcctaatattattataaagtagcgtcttataattagttagtaattttttataatttttattaaaataaaataagtgatgctcgatattaaattacactagtagtgatatttcatttaaatgtttacatattataactatgtataatttgggactcgaattcagaacctcaaatacacacgcactctctcctatgaccgcttaaactaatcttaagtagtttctcaattaagtatttgagtctacaattatcatggctaattttacaaagttataaaaagttttactgtagcatgtttaagtcttaaaaaattgaatttgtttttcaattttcacgaggaaaaaaaaaataaataatcttgaaattggagttgaagaatatttataaataatatttgaatactcaaatttcattatgtttattgttagcttaaaatttaaaatcatatttttatttttattgctactagttattttatgaggtttctttcccacactttgaagttttgaaaatgatgaagtgtactaatttcaaaccaatcatttcccaatgtgtattaattcttatcttaatattagaataaataatgtcgaattggactaactacaaaacaatgaccaaggttttgatcatcctccacatttactgcctaataatatatatatattttttttaatgaggcttattattatttttgaaaaaggcttatcacccagttataagatagatatattagaaataagccagttattaaaaaggattgaaaatggtaaggatgaatgatcattataatagtaaacatttaattaattttgaatatttatcaagaatgatggcaccccactaactataaatatttgtgtatattaaacacttaaactcctatggaatcattttctgattgaatcaaataccaaccaccaaaataggattatagctaataaaaataacaccaaccactcaaaccattaataatgcttaatttctttaattcaatttttaagaatccaatcacttcaaagaaacagatatagatgttgtttggttttataatttaaaaattattttcagtttttaaaaattaatatggattgtttggtaaataattttaaaaactgtttctttaaaattaaaaaacagaaaatatcaaaatattgtatctatttttttaaaaaaaaaaaaattgtctaacatattatatttaatatttttactcacatatccggacccgaaccccgaccccgaccccgaccccgactcaaacccggacccgatccttggacccttaccctgacccaaatcccgaacccaaaccccaactcggaccctagacccagaccctaacccggacctagacctggacctgggcccggacctggggttaagtctgaggtcctgtgctgggtttggggtcagggtcaggatccgaggttcggggttcaagactaggttcatgtccgttgtttggggtttgggtcttagtccgggatccgagttggggtccaaggtccatggtctggggtccaggtccagggtccggggttcgagtcagggtctggggtccaggttcgagtcctggtccggggtttaggtccaagcccaggttggggtctgggttcgggtctaagttcgagtttgggtatggggaagcatgggttctaaaaataattcttaataagttctttatatgtcctgattaatataataaattactttacacacggctaaacgaacaaaactaaaataaagttacagatttaatggtgcttagacactctaatagcaatgctcacagatatgctaaaagacaacagtagtacttagcacattctaaggtgtcataacactatttgtataattaactattgagtcttatataatttaatataataacttttaaaacattaattaatatcactaacaaattgcaaagcgtgatttgttagctctaaaaaacaaacactacatgtactatcatatattgtattgttgaaatgaaaaaaataatattagatgagattgagagggatgtaataataattattgttcaaatttcaaaataaatttattattttatatatatatataaaaaaaaaacaaattactacaacataacataaatagaattatttgtatatttattttattttatttttttttaaatatttgaaaacaaagatataattaattagtagagaaaatttaaaaaattgcatttatcttttttatataaattgttattttagatgaaacacatagtgctccgcccatgctcttatattaagttcattttaaataaaacaaacaaacaaaca

SEQ ID NO: 186758 - DNA, 2936 bp, Cannabis indica
tttttttttagtaaaaatacatagtttttttcttcaaaattatatttatttgatgttactgccgttaactcaatcttaaattatgcaacataattggatagggagtaagcgcacaagtgtttttcctaacacccgctgctgtactagtgttcatattaagaattttgttaccaatacttgttttcttgtgatttaacgagtattcattataggagttgatgttcccttttctagctgcttctaaatgcattattgctttttattcttcctcaatttgtgtttgatgtcaatttccttttgtgaactttcaggagggacccagacaaacactaccagaccaaatcgagctggggaagcaaggacacctaatgttgctggtctgggagggcttggtctccccaatatggagcagatgctctctggcggcatgccagacactactcaaatgaatcagcttttgcaaaacccagctatatctcagatgatgcaaagcttgctttccaatcctcaatatatgaatcaggtatgagcattatagatttttttttccttcatatttctttgttgttttttcatccttgtattcaaattgttctttaaattgtagatgctgaaccttaatccacaactgcgtggcatggttgatgtgaaccctcaacttagagagatgatgcagaatccagaaatactgcgccagctaacaaaccctgagacaatgcaggtatatcgctatttggaagctgaagaactgtatccatgaaactgatttgtatattgtgtatctaaaattgtgtgtgctccctaaatattcatgcatgcatgcctccttgaggccacaaaacttgcttctttgtatgtttacatattgtaggaattgaagcatgcttgcctttgtgtctgtcttttctttctgattctgcagagttgatagtattttaatttgtagaaccactgtggttggcttattttcttttcttctttttctgattgtgtattgtagcaaatgctcactctacagcagtcacttctttctcagctcaatcgacaacaatcaacccagtaagttcaaatgcatttttctttcctggtagctgataattgaactgttatttgttatgcatttcatgaaattcaatttgtttatacagtatttatatctgttgcttctttatctgataatatgcagcataagttttctggataatttatgaagacgaatgtgtcactgtggttggcttattttcttagagtgaatgaattgacttgctgtctgatgtgtgtctggatacagcatattgaagctttatatagtaaatatttaaagtgtttccgttctctttggcaccatgttgactgattaagtttcttaatcaaaactaattcactctaagaagttgaagcattaggtttcctcccgatcccaccgcccaccttctttttctggatgaagcaattatggtgttttcttatgagtaactgtgtatttaattaagtgcacttggagtttctaattttctaatttctgtttttaaattagtgttgaccatcatttgttgataaattctttaatatcatttctcatcgtgttgtgtgtaccctctcagggattcaggtcagactggtgcaactacaggtattcaaaacttaaattaagttgattttttttttcgttacagccttcaatttcaactttgactgatattgttgaatgtattaggaacacctaataacaatggactggaactactgatgaacatgtttggtggtcttggagctggcagctttgcagcaccaaccaatccagatggttagaacttcccaatttatctctaatttttccctcatttcttcaatggaaaattacttagtacttaccttgggtaaaattataatctttgtttgtagttccacctgaagagctttatgcaactcaactatcacagcttcaagaaatgggtttctttgacactcaagagaacatcagggcattgcgtgccacgtctgggaatgtccatgcagctgtggagcggcttttaggaaatcccgggcagtagacataacccgatttgatttgtgtctctttctttagttggacatttcttgtggacatgtaaaacacagacacgatttggactttaggttcttgcaaatgatgcgagagaaatttacgaggagcagctgtagatttcattttgggcgtgtgaataagcaagtacacaccatgatagagctgtgaacttgtggatatataagcatatatgcgtcaacattacaggacttctctcttctcccaccctcactctatatatcgctctcgcatatgtacattttaattacattcttaattttttttttcttttttaagtattgttttggtaaaatgttatctgcttattcaatgagaaatacgaaaaagaaaaaagaaaaacattactgtttcggtccatctgcgtttccatttatagtagtcgagtattgtttcatagctataggaattgtatgattggttggttgctggaaatttcaggtctctagggctacgtttggtaggaaccacaaatatagactaaatcttttttagctttgttacctacatattgattcatcccaaacgtagcctaaatgaaaagggattcaactacatcaatcttgcttatcaccacaatacgtgtggccattgcgtattagtttatgacttagtgagaattttaatttcttattcatttggttaattatttcacatgaagtgaaataaataaaaaattatatttaatttcttatttatttggctaattatgtattttctaaaatataatgtgagaaatttgtattttttttctaatgttatgtttaactaacttcttattttatacacataaacatctattaaaccatcacttaaagctatcttagaagggaaatttgattaaatatgc

SEQ ID NO: 186759 - DNA, 3001 bp, Cannabis indica
atggattagtaagcattgcaattattaaatattgaatcttatataatttaaaatattactgtagtggtgttcaatattttctacaagtgacatcttacaattaattagcgatattttattaaaattatttttttaaattatataggactcatacttaattataccagtaacagtattgagatcgagaaaaatattaaacataagtagtattttttagcaattctctataatttaatataatagctgttaagaatatcgttgactaattataaagcataatctaagttgtttgatactattaataatcaatagtaatacagtttgttttttttttaattttgtttggtgaagtaacaagtgacttttttttaatcttgaaactgaaattaatcataggataatatgaaattatggagttataatatttcttaagtacaattagtagttttgttcttttcttattgataattattttatttataaaaaaagtcaaataaatagttagttaagagaatgtactcaatccatgattcctttttaaaaacagtaaaataaaaatgttacaataattatgtgttatatatatatatataattagtataaataatgagatttaaatgaggagggtgacttataatattgtgagataataaagagaattgagtgaagttaagatttgaaagtgaccttaactcacatacattatcatctcacccaacaaattcattgctaattattcaatggggtaatggcaatggatagaatagtgaaccaaattaaacatcaatagttatttagttaatttttctttttctaaacaatagttagttagatagataaataatcatttttttccaacaaaatagaaaattaaacatattaacctcaatatcatatacatgttaattttttaagcataaaaaataagccttttttttcaagttttaatatgcattttgttcactcaataatcgttggattgatagtaaatttaaacgaatgattcttaatcattagacgctagagtatatcaaattaactttgatcataaatattgcaatacaaatgacacttcttcatgttttaatctgcattttgttcactcaataatcgttgaattgatagtttaaatgaacgatagaagttaaagtacattaaattaactttcatcacaaatattgcaatacaaatggcactttttcaagttttaatatgcattttgttcacccaagttggatcgattctaaaccaagctagagttcatgaaattaactgtattcaaatgcattccgttctttaacatttaggaaaaaatccattgtcaatattgtaatatcaatggacttgatttgaggttagcttagctaataatacttattgttgaatcaatcaatgaaatgaatgcatgaatggatggtaaacaaaacaatcttttcactttttgtgtaaggtaagaagatgactaccaaccaatcttttctctcaaccttttacttcaacttcaagctctcttaactctaatttacattacattatataaatataagtattaggtgagacttagccatttgaagaggttgcaaaaacaaaatgaatgcattatttcatctcccataagacttagtacttaaccctaaagaatatgagagaaaatgacttctaaactcttgtgtactaatgcttactcaatccattccttaactatatatgtaatcatcataatgggaaacttatattgtatatttatatacatattaatgttggtaagttaagctataggcctaggctaagtacatacatataaatacacacatatatgaagggaggaaatgagatgaataattgaagagagtaaagtaaaacgtgacatgcatggattggtacacatgaataataacaacaataataatagaaagccatgtgcatatggatactctcatagtgaattggtctaattggtttaatggggtttttggggaccacattacacacattcttctaactattccataaaaataaaaatccatatcaatagtagaagtattattgttattattagtagtagtagtgatgttgtcacttctaattaatatacaactacaattaagtttaaatttgtaccatgctaactaaaatggaaaagcacaagagcatctattataatggttctattctatgttctttctctctctcaagggcatagatgtaattttacccaaaaacatttctctctatagtacgaggatgagatgagatgagataggaccaatactagagcaagcaaagaatcaccacaacacaactcatatcctttccttacattatcattcattcattattatatgtatttaagtatgtatatatgtatgcatgcaaagtgtagaagtagtccttaatttgataagaaatattgttattaatgtatttcaatatcagattccatatattttaatttaataactaatataataaataactaacaaattataaaacgctacatcaatatagtgctgggtaccaataacaatcctctaatttgattcctaaccaaacccagttgtcattttgtcaaagtgtcaactgtcaaagcatttcaacaaaaacaaacaaacaagtgagaagaaaaaacatgaaaaagggtttcttaataatagtaatagttagtatttatgtataaataattaacaaattaaaacacacatttttgcaataatggagaaaagaagagaagggtattgttatttactactaataagtaatgtaatgtaatgttaataagcaaatgagttagatgtgatgagtcactcatttatgatttatcacatgcaaacaaagccacacatgttcccctcacatgttatgtttttattcattattataattattatgatattggtattgctttattttctttctttaccatataccatgaatcaattaataaccacataaagatgacaaaaatatcttcttatgcaacacagtaaaaaagaaaaaaaga

SEQ ID NO: 186760 - DNA, 4361 bp, Cannabis indica
agagaattaataatattttagaaaatgaataaaataataagaaaacaaaacaaacttttttttttaaaaaaaaaattagcactttttgttattcaaaatatcaatagaatcaaataactttgttaaaaaaatagattgaatagctattgaaaaaaaaaaaaaaaagatgtatatataccaaaaatactagctattatttaaatcttattaatgttttgaattagtaattttttttaaaaaaaaatgaatacacaataaactaataaatatataaaaatcttactgcatgtatatataaatttcttaaaaaattgtatgtgttttatttttttttcttaaaaaaaactgtatgtttctaatcaaataaatattccttttaaaaaaaattacataaactataaaaaattattataacctttagttttagagagagaattaacatttattaagaaagagaattaatgctgacaattaatgattattttaatatacaaaagaaaacaaacggagttaacagcatcttggtttgttcaatgtctatttggcattttaaatgatgtggccaaatataactagtggggacaggagtggaacagggaaaaatgggacagaaagatttttttcccactcaaatgggtaataattgtataaaactatatacatatacacgtaatcaattataaatatagaatattaaaattgtcttaatttttgagtaaaaacgaaaaacaatttgatatgaaacagttttacatctggagatgtagcaaactcaaccccatgatgatgatgatgatcaaggcatcactacacaaatattttgtaaattaataagtagaattttaattaaagtattatttatataagaaaaataaaatacaaataataaactcccgcgccaaaacaggccacttcaatctttatcgtcctcctccatggattgtttaccttctcttattcttgcttccgatcagcaacgaaaagtaaaacaaaatcctgaataagaaaccccatgctacagtcacccacaagcaactccacttactcagatcagtaaccccttgctgatctaaaatgtcaaccccagtggtcaaacatgttgactgtgttatcctcatcccaagagtctgactcaaactatccaacaatttcactttcatggcgtccgggacctttcccagtgggctattatcaaaaatctggactcctctaacgaaacacttgacaggatcctcaaactcgttttgcaaaactgcttcgtaaggatacttaaccaaagagagataatggaaccaaatccagtagggtgggattcggtctcggtttatgaagaagccactgaagaggagaaagtaagctaagatggctacgacaatggtgtagcctaacatcacgtgaggaaccacaccagaaaggaaggtgacgaaagagcttccggcccaaaggaagccaagattataaaaagtaaaagaagaagccggcaagcccaccgtcaaggcccacggcccaaaaggtggttgccgagaaagctaaggagagaaagactaagctcgggagggctacgatcgagtgtgagaggacgtaggacgatctacggtaggcattataagctgtttctctatgaagatgtaacgttcttggagaaagacgggtaaagcatcggcgcacgtgtaaaatgtggtggacatggcgaaggcgaagaagcctaaacgttcttggatacctttaggggaattgtcgagctgccagaacatggtggcgagtatgaatccggttaccataactgcacctaaacggatcccgaaaagttctggcattcgccgcgagttcataatcgaccgccttgataatactgccatctcagtccacaccgggttcgcgaaggttgggaccattgagttcgaacttgggtctacagtgacactgtttgttgttgctcctgataccaatttcccccttgaaatgctcgcgcttatggcttcttttaaagatagcggttgtaatttgtcgtctgttacggccggatcggatgtacggatcaagtttttctttgattcccatgacttgttgaactcgactaaggcttttgttcctcctggtgatccctcgagttcgcggattaggtctagagcgaactctgtccgattttcattttccggaatggggtttccgaactcggcgaagtaaccgggaaggtttgttggggaaccgctgtagactgtttggcctcgggagaggaagatcaaacggtcgaggaggccgaggattctgtaactcggctggtgtacagacatgatgactaggcttccgctttgggcgattcgttggaggaccttcacaaccatgtaagcactggtggaatcaagaccagaggttggttcgtcgaggaagaggaggatggggtcgtgaattatgtcaattccgatcgatacacgacggcgttcaccgccggagactccacggtgaccttcgtctccaattactgtcttggctgcatttctgagacctaattgatcgatcaaggcctgaacacgcatcttcttctttgatttggagagtgttcgtgggagacgaaactcggcggcgaacatgagagtttcttccactgtcaacatcgggaaaaggagatcatcttgcatgacgtaagctgaaatcactttcaggagacgagactccaaaatctctctgtttaacgtaactgtccctttcaagcttcctttggctattcgattagctaaggcatcgatcagagttgatttaccggagccactagccccgagaactgcgagtatctcgccgtcacgagcttcacccgagatattattgagaagagtcttggttttcgtgaacagagtatccccagcaacagaatcagccggcgccccaagaagatccctccgacgagaaaagacagaggaaaagctcaactttcttggaaccttaacacagtaagtgagattattgaagttaagaacgaacggcaacgaacgaggttccatactgacatcacctagctcaagcacctggtgaactggagtctcaccaccatcgccggtggcttccttccgtacatctccgactcgcttgagaagctggcccaaggtcggtgattcagtggagccacctcggttgtggtggctgttgttgagttccatggtgaaataggcgtctctcgccggcgatatactattatcggccacgatccgagacattaattagtgggaaattggagaggttaacaagggtgtgattgaattgagtaattatatgtatattatatgtacatattatctgtgtatttatcctcaatttaatgttattttaatctattataacaaatagtatatttaagaatggtacgtagctaaataatgtattaagtggttacaagagatttgttgggttttatatcttattatgcccattcttatagaagaaaagaaaattaaataaaaaatatataaacaaccaacagttttgtgctacttttttagaaaggttttttggtggttattgcagataggctaccgagacttaccaaattgcaagctaactcatacctaaaaaaaatgggagctatgaagtgtgaaactcaccaaaagtcaaaatatatagaggtatatgaagtgttcagtaaatatatatattcttctttttttatttattaaggtagcgtattaattaaaataaatatacttctgatggtaataaattaaattgatgtaatattaaatagtatttttggtatgttggttgaatacaattaatatgttggttgaattgtgatttgtttatggatagtcggagtggtaaaaaggcagcagttttgactttgaaataatagtgagtcacaacaactatcactccttgattgcatataatatacatatttatttatatactttaacaaaaaagaatggtataaatcatgcctaaataaaggaggttgttattaataatgaaaatgagttagatagccatgtaaataactgttctcaaccatatatctcaaaacttggtaagcatggtgcttaaaaccagctagaaatttattagaatcattactaacttaagaattagaaatataatgtttattttaaatcaaagttttgtggtaaatggtaataatatacacttattattctcccttcctagtcacgtacgtacagacatgcatatataacttagtgggaccgctttctcgtttatcttttcgattctcttaaaaattgtagatgtagtagtatccacattactattctattatttctacctaaatatatatatggaatttcatgtgtaatttgtttggtaaataattaagtttaatttcgatggcaagcagtaataacacttaattt

SEQ ID NO: 186761 - DNA, 4028 bp, Cannabis indica
gtaaattataacttgatgtatcatatcatttataaaacaaagataatttactatattaaaatgccaaattcaaccagtagcaaacatgagggtttacaattttgtcaaatcaatttgcgtccaagcttatggagtcacaatacaagatgaaattgtaattgttgaggattcaataacgacttaccagtagggaatgtttctcataatcagatttttatcaaatttgtcagtcatattagcataattaacattggatggtatgagtgatttttgattgtagttcaaggagctttcaatctggagtttaccgacagtcacgaggcaaattgaggatttctttgcttttcactatattatgtgactagtatgaaactatgaatccatatagtatagttttacctctctctacctctaagatgagaagtacataatcacaaggcacagctagcttctcagaactcagaagaaagctaatgcagattaataaaccgacatttcatagaaagctttggtaaattcacagatgcatttcataaaaaggtggcattactttgtgtaggtcttttagaggagtgtctcacaaatgaaaacataaaataataagaaaaaatggggctaatcattggacttctcaagtatattttgtataacatcagcaaggatattggcaacaatctctggggagaaccttctaatcatgtcttcccttgcttttttgcctcttgccttggcttcatccatgttgttcatcacatgcctcatcaaaacacgaagctcactaacagaaggttctgcccaaaggtggcctgtaaaaggcccctcagttacttcattcattctatcaaatgccaatggatagctattttcttctgtcaaaaactcagttggcccggaccaattggtagctattactggcaaggacattgccatggcttccacaatgggtcttccccacccttctcctcttgatggaagaacaaaggcgtcggctgccttgtatagccgaggcaaatcagtttgagctatgtggttgtctatgacatatataggagcccaaccagtaactggttttgttatatcagagttctcaacaaagtccactatcttattcccaaaatctccatcagagtgatatggatttgttaaaagatacaaactaacaccatcagcgccagaaaactcctccaaatatgacttcaacaacacatcccatcctttcctatactcccacttaaagacactcaaaagaacaaactttgaattcaaactattggttcttgctcctaaaaccaaatgccctgtagaatctagatttaaaggcttatacgcaagtggatcaaagaacttcacatcaataggttgaacaatcttcacaactttagatggatcaaccccactttctataaatgttgatacatgaaattccgtaggcacccaaacataatccattttgttacatctattgacatgttcagcgttcaccctgtcagtctcaaacatggtcctaccaatcacagccttgaaattttggtaagcacctggtgggcacggcatagtttcaaacaatggagggtaccaagcaccaggctcactatgacaaatcacaatagttttactcatagtacattcagtttggtgaagctcaactgccaagtttttggtagaaactggtaaaccctcccaaaaatccaatgattctagatcaccatgatgctcaatggccaatctaaaaagtgggctttttacattttcatgaagggccaagatatatgaccaactttctgaactgtacccaccacctgaaaggaaaggagccatccataggacacagtaaggaggcttagaaatgggttttggagtttgggtttttctgggcttttgagttggagcaagaaactccagaaaagcttggaaaatattggagtgtgatgagaatttatgtctgaggagttgaattttgtagtagtcggttttggtaaaagtgaaggagattgctacgaagagtataaggattgaaaccaaaagataagtctttgaattgggattttgatgtcgctctggtctgttaatgggttgaagattttcctgcgaatccatggcgagagagtgcgtagcggaacagagggacggagatcatttcataattattattaatttattaagcttacttttacattcagcaagaaaaagaagaaacaaagaaagaaagttatacatcttttgttgggcttggacaaataatgggcattaagcccaaacgaaacagttgaagccctcacgtttctgtgctgctacgttaatgaaaaggagctctattattgtttttttttctttgcaactcctccaaaactaacaatctctttatgaaatttcatcaccttcctctttttgttcaatgtggcaatatgactttggcacattgaacaaactaatacttttcaggatgattagttctgttaattttgaagaacttgagaaactcttcttaattgtatcgcggttattgtcacatgaaaaactctttccatgcatgcacccatagtaatctactttttaagagatatttccatgatgcatacacccatagtacttacttaacttatccagttctgaggagaaatcatgcaactgtgctgaaattctgtgctcagtgagtcagtgttaacgtaaagaatggagtcaacgtgaaagtaaaaatgcagcaatggtggagtttttatttctggacaaaatgtttgcctatgagccatgataatcttaagaacaattacacgcaactcagttgttctagtgtgttttgggatagtggggactggggagtatttgtccatgagataagatgattttacccagctctacatcttcctcttcttcatgacattgaaagaatgtcttagaaacttgaagataagtcttatcaaggattacaagtatcttgcagaacttgtttgtggagtttaagaggaattgttttcttcatacttgtgcgcaaattgaatcagaatgagattttcatttgttcaagtcaattatgctgtaatcctttttaaacttctttggaccacattttactctcgttgttaagtctgcttagatttatttatttatatatattttttttgcaacaaattacattattattgtttctatgcagcactagtaaatactttaaacaaattatttattttacaacacttcaaaaacagattctccatgtgttcataccaacactcactagattacaattcaaacatgttacaagttcatataaaacttaccaagatacgtaatccaggtttattcaagttgagtttgtgatctcttttattaactatacttacattttgggttcgacagtgttgaagaaaatgaaaatttcatttcccagaagtgaggatgaacgagtgtgcactccagcataccagggtaagccactacagtttggaccagtatcggcttaggctggcttcaattgatccatgtggttcatctgttggtaagtaaacatcgtcttcgaactgcacaaaacaaaccatgaatcaatcaaagcattcataaataatatgcaagatatgatcacagcagttatgctcttccatgaaaccaaacaatctggtttttatgcattgttgaaacataatcctatataattaccacgacttattggcaaattaaagaaaagaatctcattgatggggtagtttagatagtatacagaagaatttcaatcaaaataaagttttctctagcatttacaagagaattgaaaggcgaaggaccttaaaaactagagcatcaccatctcattttgttaaacttgaacaaaattctccacagccttgatccttaaattcagccaaagaaatataattttcaataacgttcaataattcctcttatgaacttcttccaacttctctccttctttgacttggtaaaaaacaatgtaataatgtcatgcctagttaatttttgttctgtactgctaattgaattaaaatggtattatcaaagtttaaaactaaaac

SEQ ID NO: 186762 - DNA, 1974 bp, Cannabis indica
atggagggcgtgaggcttcgtctagtgttcgacgaccgtcaactgctaaccaagtcacagaagaatgagggactaaaacgaagctggattctcctccagccaaaccaccacaccatctccgacctttctgattatatcctccatgtttttgacctcgatgaagcttgtccaaatggcctcgttctttcggtaagcttcttgttcttttgattttcatttctagaactgttctcactcccaaaatgaactactctgtaacgaataatgacgatcggaataggatgcaagctttaagggttaaagccctagagttcggtcggtttaggttacatgcaagcatttcctctttttttccttcattaacaaagcactatagtaatttctgtctgtagtgaaactctacttgtatcaatgatgagtggctactattatgcaaattttatgttaatgtaaatgcaattttttctttttgggtggcaattttatgtaaatgtattgattgttcaatattatgtgaaaaaatcataagactgccacaatttcctggctttttttaacttgggagtttgttattggttcttgtagattgaaggctttgcattaccaccgtttgagtctacatgtattttgaaggaagaagatgttattaggtaagtgtgttcctacttcatactctttaaatgttgctttagctatattgctatattagtttagtagagactgataattttattccatagtataaaaaagaaacggggtttgtctactgatatccaaagagttcgtgatggagagaagtctctagtggtagaagaagtaatggtgaagcaacccttgcgtacgggcggcatgaagcttttagctaatgaggagtttgaaagggagagtggaggttaccgcagtgaagctgaagaagatgaacctgacatgttggaagataaattacctgtagatgataccccaaagaagaaagcagtctccaagaaaaggaaagcttcaaagaaacttaagaggtcaaagtatgtaagacaacttgttagttattatgtgtcttaataatcttctcttacaatttatatgatatgtgtgtgcggtggtggattaaacattttatacttcattctgatttgcttttcctttcttagagtaaggatttacagtcaattatataagcatgttttctgttttatgttagcaaagtgtttgcttcacctactcaagttataattcaatttttcagtactaaaaaaaggaaaaaaagaaagaagacgttatattcatttgtgtttttcagtgacagaaggagagacataaacttgtgaatgtagaagatgttccaagtgatgtgcagcctgaggagaatgaaagttctcagcaagatagtcttccggagaagagtcctgtcaagaaagacaagtcatctgatatggacagtgaatctgatgattcaagtacccaaaaaattgatgaaaaggctgatagcatcatggaatttactccaagcaaaccaaggtagttttcagtattttttactataagatgataaacgaaatcttatatattctataggtatttttgcattgctgttattgtcacttttactaatattaaatgagacatgggggaatgaattcaggtgttaatgcttttctgggatttcttggcacagatgtttattagtttagtattttgtgattccgactgtgtataccttacaagttcttcacatctttcgcaattgctcacttgtcccatttcttttgatttctatttcgtagttcctgtcaggctcagccactagagaatggcaagcaaagtgtggcttcctctcatacactgaatggagttcaaaaggtcattagctaccacagtggtttgattttcattttattagtctatattggattgcagtggtaaattttatagcatctcagcctaaagtcatttgcatgtgtagagcgacattagcacaag

SEQ ID NO: 186763 - DNA, 1561 bp, Cannabis indica
agtgatatttcttgtagtgtacaaataaaatgccgtaaattttacattaagttaatccaaaaattaattaatcacaagggtttactatgaacaaaagaagagttgggtttatcagacccctcaagctcagtgggaataatatccatatatatatatatatatatattttatataacctcatataattcaggttaaaaaacataaaactattttaatgaaaagaagaaaaaatgtacgtacaacctataaaatttgttcataactagtaataattatagtgcttgcttggtattgatgggaaagttttcgtcttctattgagagtatttgggtacacgtttagtagaagaaaaagacccatctttttcttttcacacttcttctataaataataaatatatttattattattattattattattattattattattattattagcttttacttatcactttcatacccatgacattgaactttcccaacacttttatgtaattaaccttctgtgtattattgatcatcatgatctgagcaaaacaaaacaacaaagttcagtccaatattttttcttggaactttacaacatagctttatataagatttaagtactggctttgtcaattttacattaaagagtaataaactacatatatacataattgttttgagtagagaaaccatagtgtattttcttcttaatttaattagtgggttttgatgagttgtatggcttaaaaaatttgtcatatttgttggtgcataccacttaggcttcaaatgttggtgtcccaatgtacaactatagtgaatatatatatgtacaataataatattaatattggtatatataccatagtaactaccaaagacaaattactttattagggttttgtatataggggatggatatatgatgtgttaaatggaaaaagttatagttcaaactaggctaactattttgattaattaagtccataatttttttattttgacaaatattaactttagagttatcatttagaatttgtttggaacatcttataattaggtcgtattgtattgtattatattgaattggattatattatatttttatgaaaaattatatgtagtattaacttttatatatgaacacctaaatatataattaatattttaatataaattaacatattatataaaaatatgatatataattcaaatcaatataataaaatacgatattataccacgttccaaacaaaaccttaataatactgactatactatatattcaattacactatatatttaaaatctctaatgtatatttggtgatttaatctaacgattagaacgcatagtatatatcaaatggaacctaaaatacattccacattacaaagcttatagtacaagaaaagaatgtatatattccgtttttttttttttctaaataaaataaaaatacattcctaaaacataaataggatataaaacttaattactacacactagaatccaaaacttagggttaacgtatcaaatttctatggtagcaatactgatgacatatt

SEQ ID NO: 186764 - DNA, 2146 bp, Cannabis indica
tgtgtgtgtgtgtgtgtttacagatatcaaagcatatgttgtttcaagataaattaccctgcagccatgtcagcagccttactcacacttgaatcatgtaagtctttaatctcatcactacttccatcagccccagtctcttttttcttgcctttgtccaactcagcaaaacttccatccatttcagtacctaaactgaaaatctcctgaacctctttaagcttttcatcataaacagacttctgttcggatgatagtttgccttttcttcggttgaataacaatgcatagtggctggacaatgccccaagttcctgaaggtatggtttaaaaaatatttactaaatctaatcttatggctacaacgtaaacttcaaagataaggaagcaacctctaattgttctggacctccatatatgtagaagcatctgtcaaatgtcacttcttcaaataattgattgtcatcagcttttcggtcagcacctttagaattcttttcaacatctatacctgcctctgagataagcaaatccatagtttccttgccaacaagctcgagaacttgaattccctttgaggtaaaagcttttccagtctgcatcacaaaaagagaataagtactgatgccaagtgccaacaatactgaacaagacaggtgataaagagtcatgtgaacctctaatatggatggggcaacagggccaccctgttgaatagattctgcaaggtttgcagcagaatgctcaagcctagggggatgcaacaaaaaaccaaaaaaaaaattatcatcataaactgaacaagcagaagagaaagaggtgcaaaaaccagccatatagaaagtcagatttacatacacaaaaaggaattcacattaactaaacactccatttagagatccagattaactgcccaaaatgtatgaaatgatgtagtaatctcccaacaaaaaaaataggtgcggagtcaaaaagtatactatacaatagagttacaaaccagacgttgagtttcaaaaacaagtaaaaaaaacttaattgaccaaaatattattgcattcacaaacttcaaacaggggagcttcatttagtaaccatctcatatacatttatacatatatatatatataacaacttcgaacatacttattgaccaaagttgtgccccctttcaatgcactaccgaatgcctgccatgctcccgaagccaaattctccatggaactatcaatagccttcaaactctgcaaatatgaatatttaaaccataacatgctcagtaaaacaagaaaaaaaagaaaaagatatcaagtcaactgtacagcaattcaggggaaaaataactcaatagaatagaatcttcactagaagtatctcaacaacaattctaatgatgatacagtgtaagactaagctatcccaaaaacaataactgtaaacttgcctgactaaagattgaatcttcactagctttctcgagtttgtccagagcagacttccgaatcttagcactctcatcttcagattcttcactctcacctttagcttcagattcttcggccccttcctcctctttagaagactctgactcctcaccagcatcttgcatttctgtgaggctcttggccgccgtctgggcagcagcagcagcctgcatccacaaaacactgctcaaaagagacatccaaccagcgtgactttgaaacttaaattacaatatacgatatgagctggtttggacccattacgtatggaaatatacattttgtattaaaaagaaaattgaatgcaatggaagctggaatttttctaaataaacatctaaatcttcattgaaataggcaggtgcttaaattacaaaaccatgcctttggatgtaaatttttagcccataatcaaattctatgtaacgaaaatttctcaactaaccataagataaaccactagtactcgttagtttgaaagtaaaactccttcctaatgccttcaacgacccaaccagatttagcattgcaagaaatataattataattacccccaaaaaatctcgaaaacaaatatagaaagatatcaatattacttcggatcaggaaattagatctgataaaaccctccacggttccaccaaaaaaaaaaaacgaggaca

SEQ ID NO: 186765 - DNA, 3115 bp, Cannabis indica
agtagcgtaacgtgcatgtgtcatggatgttgacattcatccaaatgcatgctgacaagaatgtcgttgaatggggatcaaaggataaggcgtgcaagagacaaacgtaccaccacgccacctgcaagctttgagagtaaggaggtatgagtagtggagggagtgcattagcaagatttgtggaactgactaaaggtacactgcagccattacctctgcaaccgtggaccacctctgcaccaggaaccacctttgcattcggggaccacctttgcatatggggaccacctgacaccagagaacgatacaaggtgcacgatcatctcatgcacatgcgacatgcatcctaaaagcgacacactgcccctttgggaccaccttgtattttaggccatagagcctataaatatccctttttaaggtgtgagaaggggttggaacatcattcttgtaacttgactttgaaagtaatagaaattttatcattttctcttcattttaaaatagcaatttgaattcatatttcatctttcttttcatcttagatctaagcttgaagcatagtttaattttccgaccaacaagttagttgacgagttcttactgtcaacaacaattatcattgttgatcattattgtttatgttaatttgtattattatttattatatattggaacataattttttgggactttttcatttttacattttaaaatagttttttctttttacggaattctatataaaaacccctattgcaactaacggagtaacctaaattacaactaaaaattgtataataatctacatagaaactacggtagaaacaaaaaaaaaaaattaagaaattagtatgtgccatgtggagtaaattctcattcttatgttatttagtaattttgctgtgctaaatttatagtattttttttaccgagagatggtttaacatagggaatgattatgtagaatgttaaattaaatttatttttcattcttccatcgtctataggggaaggggatttggcggtgtactttgcctctacttcttctctagggttacaggtgcttgctccgaccttcatctcttttctatatggtaaagtggcttcgattctatcaaatttctagtgtttttgcgtgttaatcgctggttgctcacaaaatgaagcgaaactcagggttgttttttccttctttttgagatccccaattgatgctgataaggttcccagtgagatgcgcttcactgattttcattttttcttttggaattttcgtggcttatttgaagagggttatggattagggttttacagtctgctccaatctgaatattgagttatcatttccagggaagctttgttaaagaagtgttttaggtgagaaaatggattatgtgctctccgtgtgattatctttacggctactgacagaagtgtattaaaaggatttgaagtattactgatcggttaatcttgaagaacctaagcgatatttggccattttttctatttatggcgctgaggaaggttttgagttcgaatgtgtgtagcaaaatcaatatattattgtgggaggagtttcaatggaggtcttacaataccgcaaagaagaatttagtggatatccgacccatgatacagaagagaatcgaaagccgggctaaggattacccgatccggggaatgattccagtggcagaggaggtcctcaactccaggagggtccttattcagggtgtctctgctcttctcaaagtgatcccaattgtttcctgcaagtatttaacacaaccttattatgctcaacgttttcaatctaaatggacccatttgttttccttttattctctatttgattgaatattacttgttttagatttttattttcttttcttactaatttcacacatcatcatattgcacatttgatcacatacttagataccacattttgtatattcttgattgaacttgtctaaaactcctcttgcaaattatattggcttgtgtttgcttattttgaagatgttatggaaatgaaagcttgaatatgttccagttttcatatgaaacaagtcctgagttctaatttttactttgttaattgaacgctggcaggttttgtcctgaggtctatattggtgaggtaggccacttaatccagacctgctgtggtcctaaacgttttggcaaaaaacaagttcatgaatggatagttggtggtctgaaagatattctcgttacagtagaggcatttcacttacaacacatgttccagagtattgttaaacacagtgaaaggttcgaccttgaacgtgttcctgcagttgttgagttatgctggcaagcaggagccgacccaaatcatcaatgctcactgaccaacactcctgattcaaatggtaactcttgtgttgcagatgctgatggagttgagtatatgtctattcaagaactgaaatcaatagctaaaactactttgcatgcatgggaaactcttagagaaggtgtacagaggttgttgttggtctatccagctaaagtctgcaaacattgttctgaagtacatattgggccatctggtcatttggctaggaattgtggagtgtttaagtatgaaagttggcgaggaacacatatctggaagaaagcagaagtaaatgatttagtgcctccaaaaattgtgtggcggcgaaggcctcaggatcctcctgtgcttttaaatgaaggcagcgatttttatggacatgccccggctgttgttgatctatgcacaaagactggtataattgcgcctacaaagtataattgtatgatgaagattcaaggtttatctagacctatgcaattcaaagattgaagagaacaaatcagatgaagatcgaaaattttctcctttatatcaagttggagcctgattcatttgcttcaaatggcttatatttgttctggtatgtctgtgctggcggctctcttacataacatttatttgtaccttcatttttttgtacacctccggctttcatttcttttccaatcatacataacatagaagtaccaatcttaaaattaaatcatagagttagaacgatgaactgaagtttgtgtagtc

SEQ ID NO: 186766 - DNA, 1434 bp, Cannabis indica
agatgtacgacgagataggaatgtgtttaaagaagatgaaactcaatgattgtccacccgatcacattacttataatttgcttatgaaagagttctcacgagccgggttgctcaagaaaatggagagtgtgtatcacactatggtttcgaagaaaatgtatttgcagccttcaactttgatcaaaatgctagaggcttatgcgaaattcgggatcttggacaagatggataagttctacacaagagtgttgatattgaaaatccctttaggggaagatttgatcaggaaactagctgagatttatattaacaattacatgttttctaaattagagaccttagggattgatctctcttcaacatttggtgaaactgaacttctttggtgtcttcgtcttctttcttacgcttgtttgttaagtcgaaagggtatggattcggttattcaggagatgtcagatgcaaagttcccatggaatgtaactactgtgaacatcatcatgttaactcagttgaagatgaaggatttcacacacttgagaatttcactttctcagttaacttatacagtgaagccagatattattagcattggcattctttatgatgcaattagtatgggttttgatggaactcgagttttcgagacatggagaacgatgggatttctttctggagccgtcgaaatgaatactgatccagttgttcttactgcatttggaaaagggcattttcttaaaagctgtgaaactgtctacgcttctcttgaacccgaatttagagaagaaaagacatggacataccataatctcatcgatttggtgtccaaatcacaaaggaaggtaaccagttagctgcttcttttctcatgggcaataacaggtgcgcggttgatgaatggttaatcgaattttgagcacatttcggtgttgtgctttaagattcactcgtgctgccatgacatgtaagaggaaagtgaattcgattgggcgaaatactgttagcaaaaacatgtttttatttgttttttcaggaacaaaatgcagttgttgttgattagcttggggaggaaaatagagaagaaaaagaagctagtcatcatctgaatctgtaagataaagctcttttaaaaagaatatatacatatatatatagtactatcaaattgtatgtaagagaaatcacttgacaatcacttacttcaatatgttaaattagatttgtatgaggtctgaattagattttactaatcacagattaatgtatcatagtgttgagatgacatagactttaacaccatctaagcttgtatgtctaaactaaaataacaccaaatagagactccaaccgaacaacgaaaaactttttttattttttatccgaacactcttatagagagagcttacagtagtagaagcttagtcaaacaaagac

SEQ ID NO: 186767 - DNA, 4885 bp, Cannabis indica
actttatataaaatagatatatcaatggaataaacgttgattttctaaacatatgcagttggtttaaatgtcgtgttagaactgaccctaatttcctttaccatagtagtgccctcatcaatggattagaagtagtagtatgttggtaaggagaagtttattgttggtgaaggtaataagctctccatttcttatcttggtaatggaagcctacttaatgaaacttgacatcccttgttattgaatgaaatgttgcttgttcataagattactaagaatttacttattgtttttaaacttaacagaataacaatgtgctaatagcattttactctgactattgtgctgtaaaggagaaggatacaaggaaagttcttcgtcaagggatgtttaagaaagggctctataaactcaaagctccacacaccaagttggcctttcattctcacaatcaaacaaagtcaaatagatctccatttggtgttactgtgaagtccaaatctcatgtaaatcaatccaaaattgatagtttttctatttcaaaagttatgtttgccatacgagattaggccattcaaattttcttaatcgtgttttcatgttaaattgttaaataatgaagcaaattatctacgtgatacttaccaatatggtaaatcatacccattgcccttaaatcttctacaaacaaagcagaaaatattttagatcttgtgtatagtgtcttatgtattgaaattattttattaagatcttattttatggattttttttaaataaagtaaataaatatggaaaaaatggtataagggaactagttatcctaaactcatattttcatactttttaacattttcttttataagtttttccctaaaataatttttttgaaaaagaaaatcatatttttgcaaactttacccaaaaaaaacataaaaatgaaaatcaaaagaaaaaggtgttatacgaagcccggtctaattagtctatgttgggctttcaaatattagaaatggaccatgatggtacggtccgaattttgaacaggaactaatgggccgggccgggcagcttatatttactgaaaacccaattggcctcgtcgtggtcgtgtgatagggaatcagacacagtacaccagttggcgactgtgagcgggaggaagaatggggacgagagaggtctacgaggagaagctcagaagaggaaatctccatcacgatcccaccattaatccaggtcttggtgctcctcgttgcccccgatgtctatccacgctggttcctagccctgtgagaatcaaattaatagttttctttctaatgcacttgaattcatcgatgaattgctatttcaatgtggagggttttgtttattgaattttctgaatttcgtttgggtattgttgttattgacctgttcaggataaaggtgagtgggccattacttctgttctacacgatgccactgctgtggtgagtctcaatttttgttttttctaatttatttttcaattacttgtttgattataattcgttagagtaggaactttcaattttttcaaggtaacatttaatggagattgtcttttttagcgtgttgaattacaagctagaacatgtacttcgttggtctttagttcttagtcgttactgtgttcattagttctaggtgctactcttaggtaagatgttattgatttaagatagttgtaaaatatttccgaaaataggactaaaaataattgcaaatatgtagaaaacaattcccaattaaaaagctaggtcaccttgcaatccacataaagttctttaaatccagaatgagtttcattctgtgacaggctgccaatatgtagacagtaacactaataaagtctaaagatggaccaacttcagtgatgttgttattggctgtcaaacctaaataattgctgtaaattgggtctctttgtggagtgaatccccatgtaaaaagctatgttgactgtatcaagcgagcactaaatagtttattgtatattatttgaaataggctggttcaggcattggcggtatgcttggtgcaatccatggaattaacacaggtattcttagtgttctttcgtcttcaaaaagtatgtgtttattagtagaattgctaacttgacatgattgcagggattccatacctgcagaatcgtgtgaagggaccaaagtggcttcctttcttagttggggtaccttcaagctttctctctttgtcaattttttatttgaatttgcgctgcaatttttttccctatagtgtctactgtctagtctattatctggttttatttaattttcttgtttgatgtttagctacctccactgctaatgttctcgggtgcaagtgctgcatttggaggtatgcccttctctctctctctctctgctgattcactgctttatatgggtctacactaatatcaatagtatatcatgttgctaggtattttgtatttatatgtgttaaatatagatttgacatgtgtagggacatctgacatattttatagagtagttatgttgacttccatctgacaagggttggtgttcaacaggcttttttgccttgtagaatcgataattttcttccttcatcaatggcttgatttgcaattatttactctacctctctaggtgaagctgtggctgaacaaatgccgcacattattatcatgtgctcgagtgtgttcttttcctttttttttggtttctatctgatctgtgaaaaagcttcgtagatgtccatattggttgtgtgtaggttgtacacattgatttgcttcacataattttgctgagtaatatgtttacttgtaggttatgctcttcctagttttgctcaactcactgttacttcctactatgctgcctcaagtgcctcacattatgggatttcactgcttacacgatatgttgaagagttccatacttctcgtggtcagcaagaaagtcgctgataatttcttgtacatggacatattatataggacctacactgcactttaacttccatttttgtaagtagtattacatatgagcaatatttcagacaattctgaatggttttttgttttgtttttttaaatatataaattgaaattaactatttagatgactgtttgaatagtcggcgaagtgaaaggtcaatgaccatatttatacttttttttgtcaaatgttttcattgaaaaacaaaaaaaaaaaatgggtagatgtgagtgtaccttttaatagagggcctcatgtcatcactattcactgctgtcatttgaataagttgtgctttagtaatggcacaatttacttgacaagaaaaataaaggggacaataaattaaaaaaaacagaatatgaaatggacagttcatgaagacaagcaaatgaggtcaacttcattggtgttcacaatttttaagcttatattaaatcacaagttatatttaatagctcgtcaagcaacttaatgtatgtgtctttttctactttcttgcttttctcaagttcctctgatatatatgagtattcatcaccaagcacttgcaaattttgattgaatatttgatttgattacgtggtaaatgtattattatgttagatgtattgcttaaagaaagttgtcacgccacccaaagtcactcagctttcacatactttattctctccctcttttgttatgaacattgaaagttccaacttcatagtaacacacagtacacatgaatccatgctctgttattattttagggaaggcctgcaactcagctaaagttgttcagtcatctctagcatactattgtactttgcatgatttgtcactcaatttcgagtacaagacaaggcacttggagatactatagtgttacttgtaaacaaacaatataataaaataaatcactttgtagagtgtagatatgtgaaacctgatttgtttgtggtatcagatgagtgactatctttacttgctttatgctttcttaatttctctctcttttgctcagcagtggatgcagaattatgtatcttttgttttgcagaattaatgtttaaattttatttgatatactcaactgtgtataaacaagttatacaagacaatgttgaaacatattgttataggatatgagaggattgtaaatgatttatgtataggagagtaatagagactactgaggcatctaagtcattagtataactataaagtagtactaataagaagtaatgaataagagattgattgagagagaggataggcagccaaacagaacctacagatccgaccacatggtctataacatctgtttagcatttattacaaaatgctaagctactccataccataccaggccaccactacgtaccacctccactagtcttatatggaaacaataatagtaatataactatataaaatgaaaaatccaaagtcactcattgtattctcttatttttacaaagtaacagaagtgtaataataataataatatataatagtaatattatggtgtgggccgatgtttcttaaattccgctgcctcgtatttctctttgtgttaataagccatgtctgttgtcccaactcactactgggatggaagagaatgtggtcctcacctcaactctctctcatgggttttttactctctttttcttcactatcattccttttatcatatcttccttctcctcctcttagattttgcatttacttgtggaccatctttatagttggctgaccttaattcactctttcatactaataacgtctatcaatgggaggaatgcattgtattttgcttaattaatgtttaaagttaaaaatgtaatttaattaaattgtctgatcttactttttttttt

SEQ ID NO: 186768 - DNA, 2045 bp, Cannabis indica
caacacaacaacaggaaagttccactgaatgatcacacaaaacagaccactaccccaaccaaaaacaaatgttcattagaaacatacccttcattgagaacgctgagaaagaaaaaaaaaggaaattgggttttttagctgtttcctaatttttcgtttttttttggggggggtttgggggagattgtgtaatagctttggagttcattggtgaggttaagcaagaaatggcattgtgttgttcctcgacggaaagaaagcaaagccgaatggtcaagcaaagccatagagaccgggccctcctaatatgcggcagttatacacgtcattccctttctaagttggaggaaaagcgtgcacacagtgacacagacacgagtcacacgacactctcattccatacttttagactttttcttttttctttttttttcttaaaaattatatttttttaatatatataataaaatttctaataaagtttattaaaatacggtctaatttgttataacaaaatcaaatccctgtcaattataaataagctataaactgtaagtcatctattaaaagaaaataattatatattaataaaatatataatatataattttattttatttaaaattaataattttattttaaattgtaatacatatataaatattatatttacttaaaaattattttattatgatatattagtaatgattatttattgttattattattatattaatatttaattgtaattctatttagttataatcttttaattaaaatataatttatttgatctaactatatttatatattaattaaataattaattttatttaatcaaatttatttttcaagtttagagggccaagcccagagtcaatattgcgggtaggagtgtcattcaattggttgtattatttattgtattttaaataattacattaaattcattagcatgcacacgacttacttaaaaagtggttgattctttctcattaattatatattaaccaattatgctttcataattaataattaacaaccacaacaataataacaagtaaaacaagactaagatcacatatatggaaattcaaaattttcttgaaatcaattgagaagcaaatacttcattaaaaaaaataataaaataaaattgagaagcaaatacttcaaaaaaaaaaccaggcccctaaaactatcctatccatcccgagaataaacgaatatgatgctacaaatattaaaaccatatttcatatatcaaatatagataaaatacacaaacacatgaaggcatgaggttacatcgatggttcatgactaaagcgttggctaaaagttttgaagtggaatgttgattagcacaaaattaataatgccataacctcaacaaaagaacactttaatattagaagacaggaataatgacgtttagatagggctaactgctgagaaatgtatacgtaccaaatattggagagatctatctcttaagccttttaacaagcccatcatcttattgttgtcataatatggaaggaaaaatataatgatttataagaaatgtagctgagaataaaaaataatctctctctagtgatgattcattttataataaaatttttactcttgtattgttgttgatgaattcataatcttctcaattccaatgtactcaatttcgtgtgcatttcatttcatttcactttcttttctttttctttttttttcctggaaaagttgagagatagaaagtgggaaaagaaaaaagaaagaaacttaagaagagagaaagagagagattggagaaaaatgagtgaaaagaaacgaaataatggtgtttaattaaagatgtgtaatcgtttatttcgtcaatctaatggccatgcttagtttttttttttttcttaggaatgaaggaaaaccatgaattcctatctataaaaggcagtgtcaaaacaaaaaggtatataggcaaatatgtactaattaataataataatactctaaatatagaacagctttaacgagtcattttatga

SEQ ID NO: 186769 - DNA, 4062 bp, Cannabis indica
ttttctttttttaaatttgagttgatgtcccttacctcctgtttgacacggttatatgaagctgatgaatataaaaagaatggatcttgtaggattcccaagaaattctttgttctgcttctcatgttccttgaatagctaacatgaaattgattagccagcatttttgttttcttgtttcataataggtcaaccctggaaatgcacctctagttgtaggacagctcttagatgatgaatgccccgaggactttattaaaggcctgattttatcagttcgttctcttcttcctgttgagcctttggtggaggaatgcgagaagaggtacacatttatttatatatatataaatcttggtattttaatttgcattctctcttctgacatattatatgcttttggctcacaggaatcgtcttcgcttgctcactcaattcttggagcatcttgtgagtgagggaagccaagatgtacatgttcacaatgctctgggtaaaatcattattgacagcaacaataacccagaacattttctcacaaccaatccatattatgattctcgtgtcgttggtaaatattgtgagaaaagggatcccactcttgctgttgttgcttaccgtagagggcaatgtgatgatgaacttataaatgtaacaaatagaaattccttgttcaaacttcaagccaggtttgtgtactcatgtttactgttaagtgttgcacgtcaaattttttcaataacctattgtgatgctattggctttatatgtcaggtatgtggtggaaagaatggatggtgatctatgggagaaagttcttactcctgaaaatgaatatagaagacagcttattgatcaagttgtatctacagctctgcctgagagcaatagtcccgagcaagtttcagcagctgttaaagcctttatgactgctgaccttccccacgagttgattgaacttcttgaaaagattgtacttcaaaactctgcttttagtgggaatttcaatcttcaaaatctgttaattcttactgccattaaggctgatccatcaagagttatggattacataaataggctagacaactttgatggacctgcagttggagaggtggctgttgaagctcaactatatgaagaagcagtcgccatcttcaagaagttcaatttgaatgttcaggctgtgaatgtcctattggataacattcgaagcatcgaacgagctgtagagtttgcattccgtgttgaagaagatgctgtttggagtcaggtagccaaggcccaattgcgggagggtctggtgagtgatgctatcgagtcattcatccgtgcagatgatgcaactcagttcttggatgtcatacgtgctgctgagaatgaaaatgtgtaccctgacttggtgcggtatcttctgatggttagacagaaaaccaaagagccaaaggttgacggcgaacttatttatgcatatgctaaaattgatcggttggctgagattgaagagttcattcttatgccaaatgttgctaatctccaaaatgttggagatcgattgtatgatgaagctttgtacgaagcagctaaaatcatatatgcatttatctctaactgggctaagctggctgtcactcttgtcaagctacagcaatttcaaaatgcagttgatgcagctcgaaaagctaacagtactaaaacatggaaggaagtttgttttgcttgtgttgatgctgaggaatttcgtttggcacagatctgtggtctcaatatcatcattcaggtaatctcgctgctactttgatttgtgtcattttttgttggaacatgttgaatataaatttcagcaccactttcgcttcttaaggttttgtagtcttgtgtactagttattaaggatctgttcagcgtaggtaagaaaaaatgaatctttacttttttagtttttatttgtctactctgttttgaaggagctttttaaattgcaaaatttattaatagatttatttttacaatttgaaagttctcattaaactgtgtcaaatttgtttaaaatatttttttataatgagatatcatttcaaaggacttgactcaaaaaagttgataaactatatataatgactacaagattaaaatttcatcataaaatataatttttaattgtaaaagggaaaaaaataactatgtatttgacgatcataatcttttttttttctctgaatttcataaaatataattttaatataaaagaaaaggaaataagataactatgtacaatatttgaggatcataaccttttcttttctttcttagaattaggacaaggcttattataggaagttaatgaaatagaaagtattaaaatatcatcaagattcaaaacatcctatttttaatacactcctagggaagcaggttgatgcatatttctttgggaagatcttctgaccatttaaaaagtaatacttttaggctctcaaaattttgaagtcgggagaagatctcataatgtatattgaataaagaagaaccttgatgaattttcttttgtaatttgtaaagattcttctgctaattttttttactttgatgtgctttaaatgtttaggtggatgatttggaagaagtcagtgagtattaccagaacaggggacgctttgatgagttaatatctcttatggagagtggactgggattggaacgtgcacatatgggcatatttactgagctaggagttctatatgcaagataccgtccggaaaagctgatggaacacattaaactgttctccacccgacttaacattcccaagcttatacgagcttgtgatgaacagcaacattggaaggaactgacttacttatatatccagtatgatgaatttgacaatgctgcgaccactgttatgaaccactctccagaagcttgggaccacatgcaattcaaagatgtgattgtcaaagttgctagtgttgagctctactataaggctgtacatttctacttacaagaacatccagatattatcaatgatcttttgaacgtgattgcccttcgtgtagaccatgcccgagtagtggacataatgcgaaaggtatgcctttttctcgtttgcctctttattctgatgttataagtgtcaattgattatcccttcatccatttgatttcaggctggtcatctccgtcttgtgaagccatacatggtcgctgttcagagtaccaatgtttctgctgttaatgaagctttgaatgaaatatatatagaggaggaagactatgatagattacgggaatcaattgatttgcatgatagctttgaccagataggtcttgcacaaaaggtttggttcaaatatcattagctaaggtagttttgtgatttgttggattttaccatttttatctattaattgatgcagattgagaaacatgagcttcttgagatgagacgtgttgctgcttatatctataagaaagcgggaagatggaagcagtctattgcattatcaaaagaaagacaatctatacaaagatgctatggaaacctgctcacagtctggcgatcgtgaactttcagaagacttacttgtatatttcattgagaaggtctgacttaatctaaacaaaagaaacataaaatgaaatagttttagttcttagtcatttgcttcactatatttttcttataattttgtttggttggatggggctgggttgtaagctcttataatacatagcatgtctaagaatggtcaggcctgtagtttgccacaaggtcaaaaggtccaagtttgagtctctcttggttacctacattgcaattgtcatagttttttgtttgtcaattatattgttaggtgagtggtctagttttttttttttaaaaacataattttgattttctcatctctgatttttaccttgactattaatttcggtttttttgttttgtttctgtttgtttgttttttggaaataactattaaatattggccaaatacaaagatagacacacaaacacacatcttaggattcaaaagcctcccatacacacaaacacac

SEQ ID NO: 186770 - DNA, 1527 bp, Cannabis indica
aaataaatgcttatcaattgcagtttaggtgccactcctgtgatggaactgatgattgcctctggaaaagcagtaccaaagttgcaactggagcatggactggctgttgatagagtgtatacaggatcatttatgacttctcttgatatggcaggtctgatttagaaaaaaagaaaaaggaaaaagaaatagcttattgataaaaaaaataagatgttctcagtcgtatcctttatcaggtttctcgatttcgatcatgaaagcggatcaagatattttgcagcttttggatgctccaactaaagcgccggcttggcctgttggtgttgatggtctgtatcttttgatatatatttatcttgtgcctctagaaaatagaagtcaaagtgcttttttttagctctttagacgttcttgcaggtagccacccaccagccaagattcctgttccagtgcctccatcccgttcaacaaagagtgaggaggtatgttcatataaaagaataattctcagattttttcaactcacagatttaagtggcagatacatgaggtgctttaaacataatttggctcaatattttgaattattgaagctatgttttatataatcataattcaaagttgagcaataaattcaaaccatttagtttatatggtccatttcatcacttttcttcgccgtctgaaatttacaattgcccaactcttctgattttcaatggatgtcaactattaccatgtttcaactggagtctgatggtccaaattaattatttagtttttgtgttatttgctagggatttgcattggtatttgttatccttatgtatcataaattacaagggctgtgttaattctaatcttgtcacttttctattattaaaacctttgcgtttattgtttgttctttcatcgttataatgaattgtcttatcttatatatagattactgctatccctgataactttagctacaagattaaagcctgacttttatatatgtttgcctctttttctagtcattaggtcggccgctgcaactgaatgaagaagggcagcttcttgaggtggctattgaagcagccgcaaatgcagtaatcaagatcgtggatagtttgaatgagtgggatagtaaagcaggtgatggtgactgtgggtcaacagtgagtgctatctctttgtctctgttgtcttatgccgttgattgttgggagtgtggaatgttgcacttgttatattttaattgtactttcttatgcagatgtataaaggtgcagctgcaatattggaggacttgggaacgtgagtctaatttttctttcttcttcttaaaattataggaaatattagaatgtaagaatgatactacattagaacctctatctaagaatacacttaagagattataactaaataaatatactagaaaaaaaaattaaaacaccaaaaagtatcaaatgtaacaacaataacactaagcaatccttagtactatgtcatcataaaattatttttaaataaata

SEQ ID NO: 186771 - DNA, 1303 bp, Cannabis indica
caatgtgggactaactcttaatgattaactcatttattaattattccaatttattcaacagaagcataaacattttagcaaattccagtaaaacgaaagcacaaatacttgttagacagaactgttggttttccatctcttgcagcctactaactagatgaactgtgcagaataaagtgccaacgtaaccattacattatagcttagaaaaaggcaaaagtggttaagaagatgattagcaataaataggcagacacggttaacacaacatataacatcagcaactacaaacctcgttgagctcatccactttttgcttccttaagacactcaaaaagtcgagcaaaatttgcatgtttctctcagcttcctcttgttccattttcctctttttatcagctaggagtgccaagagaacttcaagctccttgatagacacttcacaaccctgtctaaccatcaaaacactatgaaaatgagaatcgacattgacatgttaggccataattaacagcaaaatcacgagtcgtcaatgcgaccgagcacctgttgtaacgactgacgaaaatgctccactggggatgctgtcttcgatatttgactagcacaagttttcttaagtagctacaaaaatgaaaaaacagtaacaaataagctgtcgtttcattatcaagcaaagaagttcattttatgttccaagaaacagaaagattgatttcaattcaaagaatttagggcagtcatctcaattccattttttttaatcaaaataaaacaaagatcaattataacagtctagacgaaaatagaaaagcgtggaaaaaaaaattaaaaagggcaaaaactatggcagaagtgaaccttgtcgagcaagaaattggggaagagctgcttcgtggtgaggtatagagcgcaacaagggcaatcgttcttgttacgaaggtgagtgatgatacacatgtaacaaaagctatgtccacaagccgtaagaaatgcgtccttaatcatctgcatacaaatcggacaaagaaaatccttatcgagttccgccggaactccagcggcgttcccgcccgtctcggctcggggatccagcgaagcggcgccggagatcgacatggaaggaagctccgacttcaccgccgggaccagcgccccagttgaactctcctccatcattagtctaattacgctctctcccttctgcttctctgtctaaagtaggattggaggtggagctttagttctctctcaaaatcaaactctgttctattctctctgcgagtgtctggtgttgagggag

SEQ ID NO: 186772 - DNA, 4738 bp, Cannabis indica
aggtacaactttccattaaatagacaaatccaatacattgagagccaatacaatagtgttaagtggcatatacaggcaaaatcaaaaagagagaatattctctcaataatgattgcacaataacgacttcgccagttgtaggtgttaagctcccctgctctaaggtgcaccaaacagagtgtgcactcaccatgcatacacactcatggtttctaacaccacccccaaacaaaggggtgattctttgtcccgagttttccaaggagaaaccaaaaacgagtgtgtgagagactttttgttaagcagtatggtacttgatctgaggagggtatgaaacgaatgtcaagttctttcttcattatcttgtcatgaacaaagtgtatatcaatctcaatgtactttgttctagcgtgataggtaggattggaagctagtgcattagcactctcattatcacaccaaatgacaggaacacttggtaacttgactttcaattctgtaagcagtgactgaacctaggttattccagcagaaacatgagccaatgctctatattgtgactccgtacttaaccgtgagacaactgcttgcttttttgatgaccaagcaatcagtgtatttccaaggtacacacaataaccatcaacaaatcttttatcatcagggcaacatgcccaatctacattagaatacccttcaagtgacagtctttcactgtgtcgaatgtgcagcctatgatgaagagtttcctataaataatctttttgctccactccagtgacttgtagtgggagtttgaagaaactaactcaatttgttcacagcaaaggcaatatcaggccttccgtgacacaaatactgaagagctgctatcagacttctgtaggcagagggattggttagccactctccatcatttttcaacaaagatttgcccgaaaccattggtgttgggtatgatttcaggtttaccatgtcatatttcttcaacaagtcggtgatatattttgcctgagttaggtacattcctgttttatctcgatgcacttttatgctaaggaagaagtggagctatccaaggtctttcagagcaaaaattttgttcagttcttggacaaacttgttcaattttgtagggttattattagtcacaataatgtcatctacataaattagaacaagcatgaccactttaactgttgagtaaatgaacagggaactgttagctttagaatttttgaacttccaatcattgagggtgtgcttcaatctatcaaaccaggcacgagatgcctgtttcaatccgtacagtgacttgttcagcttgcagacatgatctgacttgtctttatcttcaaaacctggtggctataccatataaacatcttcttctaattttccattaaggaaagcattgttgatatctaattgtttgacttcccaatttctagatacaacaaggattaagaaaatttgaattgtggttgacttgattactggactataagtctcactaaagttaatactaggcctctaatgaaacccttttgcaacaagcttagccttgaaccttttaagagttccatcattccattcttttgattcaagtgcttcttcaatacagcttggttcagccagatttggattccatttttcttgaccaaggtaaacttttggtttaaaaatgccagccttggcacgagtcaccgtgggatgagttggtactagctgttgtagtgttggttctttagcctcttgctcttgtatttcatgttcagtattaggtacatctaaagtgtcaagataatcagtgtgtgtgtgctgctaatatcaacatgttcactaacctcaagtgtgttattggttggtgttgcttcaagggaactttgtgagtgagaaattgtaccaacaagaagtggatcagcaggaggtgaagtgtttgtgttggcagcaccaaagaagtgcatgtttggcaactgtgaccattgtgaattgtgaataacagtttgttgttcatgggcataggtgtttaggaagccatgtttgaaggaaaatcctttttattgaatacaacattcctagagatgtacactcttcctgtggaacttaagcacttgtagtctttatgtgactcactgtagccaaggttcacacactttagtgagtggcattggaacttgtgtgtttgataaggtcttatgcaaggaaagcaagttgcacctaacacttttaagaagaaataatttgattttgtgttaagcaacacttcaaagggagatttttggtttaaaacagatgtatgtaagtacacgactgttttaaaggcatcaacccaatacctaagtggcatgtgagccttagccaagagcgttaatcccatctcaactatatgtctatgcttcctctcagctctaccattttgagtgtaggtgtgaggacaagggtgagtgaaattaatgccatgttctagggtaatgtcactgaaatattggtactcacatccccaatctatcctaatggttttgatggttctttcaaatcaattttcaataagtgctttaaagtgtgaggcagtaagtgcatccaatttggatttaagagtatatatccaaacatatctgctaaagtcatcaataaaatggatataaaatctatagtttgtattggatattataggagctggaccccaaatttctgtatgcaccaggttaagcactttagaagcacaatttgatgagttcttgaaaggaagagcatgggatttcccatattgataggcatcacagaaatgaaagttttcactgattgatggattaatattaacaatttctaagacttgtttcaacaccttactagaagggtgtccaagtcttctatgccacatattactaacagaaactaattgctcattaacaacagatcgaactacattttttttttgtgtaaaacagaaacactagtaaacaaactacactggttttgattgctttcaatagaatgaaaagggtagtgggagttggactttgatgctggtggtggaagcggtacaacccatttttaagtgtcccttgaagcaacaccttctttgttgccttgtctttcacaaaacaagaattggagtgaaattcaatgaacataacattattatcaatagttaatttagatacactgactaaattcttggcgatttttggaacaagcaataactcttttaaaactaaatcactagcagagttagtttgtaatttgctacttccaatatgagaaatagtcacttgactaccatctccaacaattaggtgatccttaccaccatactcaaccttctagttgcattgctagatgaggaagtgacatggttattggctccactatcaacataccattgatcacaatccacaatttcatgcgaggctataaaggcattaatgtgacctcctccaccttgctagccttactgggtttttggatcatgattcatgtaggattcatcatatctgttataactgcagcagagtgaccatacatgccacccacttggcaggttggttttgagttgcttgatcttcttctccctcgaccttgatattctcctctgttatctgatgaactaccacgatttctaaggtaatcaccatgacttcctcttcctcaattaggattgcttgctggttttctaagtaggttatagaagctgcaaggttagtagattgtcctgtgttagctccagaggttccatttcccttgttgtttcctcccataacatgtaacctctcgagtttgcggtcaaaattcagtagcatgtcttgaacttcctgtcaagaaatgttagtttcaatctaaacaacactagcaagatattgggcatccaaaccaaaattaaataaattaagatattgggttattcttttccttgtggtttgaattagagttctggtgtcatccattttggctcgagaatgggttccaaagtatgaatagctggctataagtcaaggcggagtacataagtccgtccttaggactcatccagtttaagggctttattttttttcttttaaaaaatatacaatattttactaatttttgaaaatacgtacatcttcttaaaacaaacccaattactctaaagcatattactaattatgatacactctaaaaaaatgtctccacaataaacagtgagcaattaattataaccttatcaagattttttgtttcttaaaaaaatgcatcactcttcattattacaaccttctttggtattaaattcaacataatactcttgatcattaaaagaaaaaatactcgtatactcaattaatttgtatgatattgacacactataaaactcaatattaaattacacactaataataatataatatttacttgtagggttgggtaatgggtatctaccttattgtaaaaagtgggtaagtacgtaaaattcaaaatatcaatatatataagccttgtttgcaattaggattttagttagaaaaaagtttcatgaagaaaaatagtaaggaaaaataatgaaagaagaaatctttttcacaaatgtataaggagacttataataatccttctaaatttcataacattatactaattaataaatttttataacaagactttccttcattgattcacctttcaaagtggtacatattaaaaacgagctttttcaacaatgttctttaaacgcatattttatctaaaataaagaatgagt

SEQ ID NO: 186773 - DNA, 973 bp, Cannabis indica
taatataatgataccatgtagtgatttatttcattatttgtttaatgtttttgcagaaggttaggttacttgatgaatttcatgttctttagggctgttttcacttgtcactgtttgcaaatgccctgaaacttgttttaggatgaaattcaatttaacctctactttcctctgcagaatgctgcatacctaatcattcgaggcatgaagacattgcatcttcgtgtacagcaacagaattcgacagcatcgaggatggccgaaattttagaggcacatcctaaggtactggatgcaacaatttttggttactttacatgaataatacttaagtcttcttattcgttagtatcacttattgtgaattgatggtatcacgacatctatgacaggtggctcatgtctattatcctggcttgaaaagccatcctgaacatgaacttgccaagaggcaaatgactggttttggtggtgtcgtcagttttgatgtgagcattgctgactaattttcatatatttagctttcttttgtgagtttgataagagctctatacaccctcttatcattggtatattcattctgaatcggtgtattgcttgactatgcagattgatggcgacttacataccaccataaaattcgttgatgcacttaaaattccatacattgccccatcttttggtgggtgtgagagtattgtggatcaaccagcaattatgtcatactggtaaacacccttgaactctggatacattgattttagatagcttttctaatcattgctactgtgaggcctaggcagagtgataaaattgctttgctaaataacagggacctcagtgagtcagaaaggcttaagtatggtatcaaggataacttggtgaggtttagttttggagtcgaagacttcgaagacgtgaagaaggacattctccaggctttggattgtatatgaacacttgaagcctgata

SEQ ID NO: 186774 - DNA, 1537 bp, Cannabis indica
ggagacaactcagacaaggggacaagagacacataaagtttaggagttagatttgtaagaagaagaagaagtagattcaataaggccattttcatgcacgtgatggtaaaataaaactatttttttctttttttgagtaaagtgatgaatagtaaaaaacttcaaccactcaattaatggtttattatggtgatgtcatacacgaccaaacccaacttatctgttaattattagatggtgtatacaatttactaataataatattttaattatatggtttaggattcatttggtattttatattgagcattaaccatagaataacaagcatgtttctctaccattatatatgattttaacatttatggatacttgcattgaacatcaaaccttagaacaagcatgtttcttgaggagggaacattgtacaaatctaatcacatgaaatattttttgttgactcaaacaatacaatttattatgaatattactaatctactaaattggtcaaactttagtatacaatatacaagaaaattttaatttatgataatattgagtttttatgttattttaaaattgcttgctcctcctaataattaatcataaggtgaacatatgaaagtgacaatataccaaaacaaaaaagttagcctaatacatttgatttttcaaatttttttttttttttttttcaaaataaagcttattgagactataattgcaaccatatgcattttgtaccgttggttttttgggcatcaattcttgtacatataaatatcaatgatggttttgattataggtcattttttctattttatgtctgcctagacaaagacaaggtgggacagatccattaaaaacaaagctttaaagccttttggcaccaattttatttcagatcacatatatagaaaggttgaagagacatatatatatatatatattatatacacacatattaaaactaacaacacccaactaaaaatcccagttaatgttgtctgatatgttaaattatagataagtaattcatcaccatatatagtgttactgtatgatttctgaaaaatcttcttcataggattcccaaggttaaaccctacaaaaaaacacaaaaaagggttaatcctaggggttaataattatagtgttaatgaaggtcaaatagcttactacaattttgttactccatgtttacacttttgcccttcttgtttgttaagaatttttttgtatttttcatattttttctttctaagtttttatgcatttttgtaatttttctaataaaattccagtgttaatgaaggttaaataacttgaaaggacttacatgatgagattatgttttgataattaaaaaaagaaaaaaaaaaatagaatacctctcaattaagattaatagtctaatttgtttttaaaaatattaaaagagagatatgaaaataacataataaatatgaaataatctctgtcctaaaatggaatcatatctcaattcaaggtatcattccattttctatatctacaa

SEQ ID NO: 186775 - DNA, 1223 bp, Cannabis indica
gagatgtcaatacttaccaactgccacttttgtaagcccgggaagatcgataaaagcaaaagtaaatagtgtcaaaagtaagtacgaacaaagtagcacttctcaataataaaggactaaaaaaagaaaaaacaagagaaacttccctttcttaccattaggagaaaatatgctgagatgaattggaacgctagagatttgtttgctgcggccagtttctctatctgtctcatcactaatctccttcctcacagcagctacacaaatatgacaatcaatgtcaaataaagaaacatttcataactatatgcatctctctagatcctcacctatccctaaccaaggcaatgtatcagtgcatagggaaggacagacaagtattttacttcacagtaatcagttcctcacaacaactagacagatatggcaagcctttcatgtaaagtaagtaaaatcaataactaaatgtatctagctctcactcaatccacccctaatcaaggagaagcaccatcaaatatgttatattacactaatcagttcctctatgttcagggctgatagtatgataatgaaataataaagtttaccgaaatcagtaaatctttttctcggaaggtggagaaactccgcatattctctgctgccttcggcaattttatgaagctgcaacacaagaggacgccgagtaacaattcctgcacatattttgcatagcataattcccataatgttcaagaagaacaattttcagtgctcaactgaacaaaattgtttcaatgaaaatcctataaattaccagatccacgaggtaaaaagtccttgccaacaacactctccaacactgaagacttcccggaactctgtttaacaacaaagaagcaattattattggtgagaactgatattgttatcactaaattttgtaaagcaaacaaaaaatttcggtataactgcctaattcctccattacaaaatcttagtcatcaacaaatttagctaaaaccaaatatcattattagatttctactcagttttgactagtgagtcaaagcatacattaaattttcctaaccttgtcaaaatagatcacctcaaacatctcaattagtacactaatcaagtatggaattgtattaaatataaagcaatcaagttaaaatcgattaatacaccataaggagcttctttcaatccaaaaaaattgaaaacgacctaaaatc

SEQ ID NO: 186776 - DNA, 3240 bp, Cannabis indica
tttattttattatcgattattggattaaaatctctcttttttttaaaataattatttgcatcaaaaaataatttattagaattcatgaactaatttatgaaaatcacacttataatatgactaattaattataatcaagaaaccattatttaaaaagattaattaaatttgaataataatcaaccactactacatggtatatactatatgaagatttagatgctcaactttgctgactctgtctgagtctgagattagattttcaaccataagaaaattacatattgaagatgtcactatgattaagatgctaaattgtattaatactattattattattcaattcaatggtgattattgaatgataattaagtacacaaaggcttttattttgagcaaaagagtaggtgggatgggttaggagatggatttttttttggttaaaactaaatgacacgagcttcgttttttagcttgtcgattagctcgtcgactgaagagacaataatcccgccctttctctttggaggctcggtcacttgaacaacctcgaagtctggcttgatttcgacgtttaaatcctttggagtgtacttcttgatggttttcgatttggctttcattatgttggggagtgtggcgtacctcggctggttcagcctcaaatcggtgctgcaacaggaaaagaggtgagttatgataggtaaagcgaaaaaagccttgtcaaagatatgatcatggaaccatggattatgacacagactcaaaggttagacaagttgaaatcttcgattcctatacacagtcctagcccaccttagtcctggaccggcctagtacaaaggatcagtcatttgctttgctaggtagttaagacttggataatcgttcgaattctgttattttagttaaaagctgttgaaactgtttcctatggtgtttatactcttattgtaacgaccccgcttcaaagtctctactcggcctagcccacacacttgtggctcgtaaacacaaattcgctatgcttatgtattgtgcatccctagtttgaacccttaacctctaccttaataggttcttaagtgccaaattggtaccaactgatctaaaccgaacagtatttaagcctagttcgattagagccagactcgataaggacttgaaccaaaagtatggtaagcttagaactgtcttacaaaagttagttaggctcagcctattcataacaacaacttattttgtaaacagcgaaagacaaaacacgagagagacgcaatacttacgtgattacggctggtaagtctaaaaacaaagtctcaagaccgccatctacctctctatcgacggtcagtacttgcttctccttatcgagcacaacctactggaaacaagcagttagttcataggaaatatccataaaaacgcagacttgtatgaactcatatacgaatcatcagtcttaacaattacaatttcgtattaacatctcaacatattctcattctaactatcaaagaagccttatcattttcggttttaagctaagtaacaaacatgtcaaaatcatatgattacatcctaaaattcaaacaaaacaggaaactcaatacaagtgcatacattttatcagaaaactaaccttagaagcaaaagtcccttgtggccaatttaggagccctgcaaccatttgtccagtttgattgcaatcatcatcaattgcctaaataaaacccattaaataccaaattagctttctccaacaaagaataagttaatgaacgcagccaaaagaatgaacaaacgataattgatgaataagtactcattagtaaaactgtaatttttttgtcgagttctccatcagtatggaatactgcattagtatcctaaatttgtaacaaaacttagttttcgaatttgttgaacatgtttctatcttagaccgaacgactagaatttaggtctaacatcaaagtttgtaccaacgaaactagacgaaaaattacagttttattaagatcagatacttataccactaacaaaaattatcaaattatgccgattacaattacaaacacaaaactttggaacttatgccgcaacaattataatttttgtccaccgtcagtatggactgcattagtgtcttaaatttgtaatcagacttagttttcaaatttgttgaacatgtttctatctagaccgaatgatttagaatctaggtctaaaatgtgtcctctttaagacactaatgtttgtaccaaataaactacacaaaaaattatagttttattaacatcgtacttatgctactaaaaaaatcatcaaatttatgccggttacagttacaaacacaaaactttgaaatttatactgcaaatatcccaatgaacaaaagaaaaccgaacctgtttgccaagaatgagaagcccaggtttctcaacctcaacaagagccctcaaaagctttgccacagagagtgggaataaagcttcagttgactcaacatgaatacccctatcagctcccatggctaaaccagtcctaagagtgtcaatgcactgagctggacccatgctgacagccaccacctcagaagccaaacctgactctttcattctcaaagcttcttccagtgcaatctcacaaaaggggttcatagacattttcacattctgggtctcaaccccagtctacaaaaaaacaacaaaagattgaaacttaaacgatttgaaagacaattcataattgggttttgattgattgttcgtaccttgttgggtttgactctgattttcacggcatagtcaactacgcgcttaattgccaccattatcttcatcgttgttttctgaaattgaaggagaaaagaaagaatttgagtaagttatttatatagaatggagattaattggctaagttctacaactcaatcagacgtgtacatattaaagtgtacaaatttgttaaaactttcctatttattttttaaaaaactcatctttatccaaatgatcatcttggttttatgaaaaatgccatcttttcttaaagatgggaaatttaacaaaatactacttttcatattaaaattgtccacttttatccaaacaacatgtttagggaaattatatggtcgtatttttgagatcttaattgaggtaaatagcggcataagtacccaaaattaattttattattgtcggggtacatataacttttcttttaataaattca

SEQ ID NO: 186777 - DNA, 2287 bp, Cannabis indica
ttattattattattattacattctttgttcttccttagtaccttgtcatgaaccaaagaactttaaggaagttctgacaaatgtaacttttaatcaaccagaagccataaataacagagcagcaacttcaattcttcttttgatattggatgtgattctttcatatgttagtttttgtcactttctttcattgaaaaggaaattatacatggaatggaaataaacaatctaaataaaagtatttcttctttccttgattatgctatgataaattaacagtttagccaattaacacgtttggaacacaatacctgcctgaaaagctgattgtatagcagtaatatcttacaatatcattaatcatgaacatgagcagccttagtaaaaagagaactcaaagttcagttggtatcttatacacttaacaaaaactatgctctttctcttgaaacaaatttctcatcaagcttcaaaacaatatcatttgtttaaaggaatttgctggatataatctacaatggcaacaaatctagttgtcccattcactttacttctttgagacataagcatagtattgtgccataggaacaacaaaggcaatcaccagtaagcctccgacaacaagggtgaactgtccacgtttttcgtcggtctcttccttgcttttgaaattggattcccttttgttttctttaacctggggacctccaggatctggaagtccatcaattgctgcaacgagtcttttcgcgctactataaatggcttcattgtatttctcttctgtagccaagactgaaaccgaaagcaatatgaactatgaaggaaatgtttagagctaatagtatttcttcagacataaccagatcaaggttaacttcctatgactattttgcttgggagctagctagttttcagaaactaaaacaagtcattatcactagagttttagttccaaaaccaaaaatactgacttgaggaatgaaaagcaaagggttttcatttaccaggaaggttctctgacacagttgcatcaaggatagtatctcctacagcttgaacaaaagcaggaccaccggtcacagctccttctttttgactggtcaccaggacgacaatgcccttgtcgttgccatcttcaatggtgggataccaacgctccaaaacttggtcagcatactcaaaagcatcagctttgctctgaaacacaacgcttgaaatgttcagttttcaaagtttaaggtatttagattttgttttctttttcccagctttgtttttttaattaattggcaatgcaacaaatgcattgttgaggaattatctacagcctgagttaaataacttgtacaaattcttcatttttctcagcaaccaaacaagataacagcattttcccatcatgaaaaaagggattttcagaaagaagaacttacagtgagctttctaacggttatgaaattgatgtgaatattctttctggactccaaatcagacaacaatctcttcaaatctgatttcgtaactcggctaagcactcctgcatcatcaacaacataggattctttcggtggtccatcattaaggatatcaaactcagaagctagagcagtgccacttgacaaaagcaccggagaaaagtttaaagctaaagagagagctagagcagctaacccttgttgggcataagaaaaccagttagcgggtagtgcaaaagatggtttaagcgattgaaaaggttgtttcttgataaggtttgaagtaatgggttttggtaaaaacacaaaatttgatctgggttggagggagggagacggagaagttgttggagaagaagctttgtgattcgagagaggaaagagagactgagatgaaagaatggtttccatggtagagcaaaaacagatttcagcaaagactaaaccatgagaaatagagagagaaaggagagtgagtgagtgtaattttccttttccatatttttttaagaaaaaagtgtcaattttttgtcattttgggtggcttggatttgttttccactaaatctgaatatggataacgtttgctcgtttatcaaccatggaaaaagctatgggaatgcgctcatgtttaagtttctgttggttagtaagtatctattgttaataccttccgagtcattgtaaatttttaacggttaataccaaaactacatattcaagcaaaggacaacggtatttcaatttttttctttttcaactatttagaatttttttattctgatatattttattacaataaaaataaa

SEQ ID NO: 186778 - DNA, 14265 bp, Cannabis indica
tttactaattaatttttcttcatatttcctatttatatttaatatcaaacaacacaaagtagattaataattctctacatcattcttactctctatcattcttaatctagctaatagatacaagtaaaatacatctaataaatagaaccgatgtaatccaatattcaatgagtgttggatcaagtcatataactaaaattatttggatagaatcagtaagaaaaatccaaaatctaatttataattggatctttaggtaggctgaaaaatatttaatttagtccaataaacacccatactacctaggcattcattttcacataaatttatttatatgctagtagagtgaaaggttggtgaggtacatgttaataaatgaaaattgtttcaatataattgtctaattttccgatatatctatcctaactagttattgtgacaagctcttctcaactctactcaaccaacttatattaactactacttaatatgttctcctacatcaatagggccacgtggcactcacccacatgactagcaagaatagcaaagaaaatgtttttatttagctcttctttcataacttcactaatgatcaaataaattctcaccactcacatagtccggacattactaggcttcttgtctaattaacaatagctgtcctttttaaccttttcttcacattcacaacacaacaagtttcatatttagtcatcataaaacaaaagacataactcataagaagaagaagaaaagaatagagtagtgaaggaaaataatgatgaagggtcaatacaacactacaaatacaaaagcctctctctcaccaaatagaacatcactaaagaccctctttgatcttgattccaacaatgaaattgaggaaattctttcaatgatctcttattgtacttccacaaaaactttgattgatccatctgaatttccttctcaacaagagaaaaaaggcaacatgcttagtcaactcctcacaatcctaagaaacaccaaaaagtgtaatcatgttagtcaaattttgttgtcacctctaatggagatgatctcaaccaatctatttagatcactccctccaccatcaaaaccatattcttcattctcatcactcatcaccttagactcagattttcctgatgaagaagatcccatttcgaaactatcaagaatatggtctcatctacaaatagtttatgatattctcatgagattgatcacaaacattgatcctcatactttgagtagttacattaaccatcatttccttgccaatcttctcaaccttttccaatccgaagatccaagggagcgcgaaagcttgaagaacatctaccatagaatctattctagattcactttccaccgttcattcatgagaaaatcaatgaatgatgagttcttgaactatgtgtttgaaatggagaggcattgtgggattggtgagttgcttgagatatggggaagcattatcaatggcttcacagttccactcaaagaagagcacaagttgtttttgatgagagtactaattcctttgcataagactaaaggaatgcagggttaccataggcagttggcttattgtgtgtctcaatttgtgcaaaaggaacctgtgcttggtggggttgtggttagagggattttgaagtattggccactcactaattgtcaaaaacaggttttgcttattggggaattggaggatttggttgagaatattgaccctgatcagtatagaaagttggctctccctttctgtgctcaaatcacaagatgcatcaacagttggaactcacaggtaatttttgtatgaaatccttgaactactttttctaattataatacttttggtatggataaatatgatgaatggtattagcacacttaaaagacctatttcacccattttttattaagtttgaacacatggatcttaatatgtattggtgtgtaataactttcaacaaaaaatttgacaaatcatcatagtaagaatgtgtgaggtttatggtaagatgtatagtttcatctcaaaactaattattgagagtgtaatggtcaatgaatctcttaagattgtgcttttttttcttcaccaattttggacggtttgaacacaaatgattctttttagtttactctcttttttgaattagtattttttttattggatactagttttttctttttcttttttttcatcttttgctagtgttagaatatgatttagacagtatagtaaggtgtacaataagaactacgggattctatctcaaaattaattaataattagtgaagcagtctgtagtattgttaatgtggtgagtttccacacattatcaatgaaacactccttaacaatgtttatttaaataaggctaattagaatttttttcccccgaactttgacatgtaccaaatcatgccccctggacttttttggcagttagaaatactccctgaactattgagattgttgaatttaaggacttttgtccaatgccaaaaaagtttagggggcatgatttggtacatgtcaaagtttggaggaaaaaaaatcctaattaacctttaaataaatatgtgagagtgaaattaagtacaaacaatctatttgttaaatttaagtgatagtagagattcacttgaagataagtgctcgaatatagtcattattttgaaccatataaacttaagacaaatatgttaaaatctatacattaaagataaaacaattttggtgaacttaatgaacatctcatattggatttgattcgatttaggtagctgagagagctctatatgtgtggaacaatgaacactttgtgaaaatggcatcaatggcaattgaagaagtgtttccaatggtagtggaaggaatggagaagaatctcaagtggcattggaataaaaacgttcaactactcacacaagatgtcaaacttatgctgcaagaaatggatccaattttgtactcaaaatgccttgatgagactcaagaaagggaatccaaagctctcttggctgatataaacagaaaggaaaagtgggacagaattgaaatggcagcagataataagactaagactaccactaagtccaactatggttttttgcaccaccagtcacaatcaccttatatttgtgtttaactttaaaagtaattaaattagtgacttaagtataaagtgcattatttcaatgaaatcataccataatatacatgtatatatatatttattatatgtaccactcaactcaactcatgcatacattattattgatggttacccaactagacataaaaaatatcttttgtaatttagagtttctttattcttgcatcatgaatataacaaggatgtttcaataaacttttgtgaggtaaagttgattttagttcttacaagtaaaaaggtaaagtaaaataccttaatctttatattagaaattctttagtaccttattgggatttgtactttatttccattaaattccaaatttccttagcactattgaatattgatgctagttgtaaagatcattgagaaagtacccacaacggcacaacatattaattcaatttcaatcacaatgcttcctctccacaatcagttcttgagaatcatggttaattaaataaaccaagaaaacaaaaagggtggtatgttttatttgtttatttttgtcaaaatcctagtttatttatctctataaattaggatttatttattgatatataacattgggttcccaattatgtgagccaaaaaagtaaaagttggggatctagctgctgcaagaaaaagaaaaagtaatacaaaaggtaaacctaaaaattaatcaattttttttttaaaaaaaaatggcatatgatctacattaaattttgaactaaaatagtgaaatatagtattttcttttggcaataaaatagtgaaatagagtaatgatattttgaaaaataaagtagataagccaattggagagctcttgaaaaaacctgaaatttaggagagaaaaaggaaaactcacttgaaattaaaaacacttgtatccaaacatgataaccttaaagaaaaaaaaaatatatatgatgagattacaaagtaatttattgctcactccccaaacttgctgctggcttttaacacagcaatattgtcaatctcaatctcaaatagactacattccttaaaattgagctatatatggaacattagaatattgaagtaaatcatgtcaaaaccgattgtacaaaatctgtggaaataagacacaaaccctattctctaaaatggttgtaaataattgaaaaaatccaaatctaaatgaaaaatgatgattcccacaattgattgagacatcctctttctgcctatatttaagaaaagaaaaaaaaaataatgatttcaatacctgagtgggctgtttctttaccctcccaactacaagactccaagaacaaaaacactctcaaagctcagaaagccacaccgcctctgtacaccgtacccctgtaccaactctgagctgcttcactctctaccaatataatgttcctttgaaccatgttataacatgtgaagaggtgcaaaccaattcaagcttcgagatagtgtcggtggctaagttttcccccaaaacatactggggaccaaaattgatctttgctcaaaaaggatcatgaccacaatattactggacagtcagtcacaaaatgatcaacaaagtcgatccagacacacaactctgaagagcacagaggaagcagagaaaaacgcatgagaggagagcggtgctaaacttgatattttgatagtctctcctttactggcggctccaaaacagacatacattggtcccatgctccattgaccagcatctgcaaaacaaggaaacacaataataaagtcattgattgtaagcatttgaattactttgttcaacactcatcacgagtgaaagattgacataatcaacaccaaatcggaaaacaagtcttatcagattccaatctatacctgcttatatccgtgtaacacctggcaaacttcattgtggagctcttcacttcttatttcctacacacaaataataacccaaagcattagccctgtgaattaaactaagcacaagtaagataataaaacaaatgttgtgtaattcttacatgccaacttgcaatagcttggcacatagcaacaagtgaatttattgctcctgatggatttgccttaacctgaaaaacaatgtaccccaaaacaagaatattacaaacttgatgactgttttttgataaagggattattgcaatgtgtgtacaaataatctttaacggattagaaattactcatacgcacaccaaaaaaaaggatacacatacaaatacagttacaattacaaataaattatttggttcagcttattaggctagcctacacttgctagaatctactctgcaaatctttcacaaataataggaataataacacacatttatagcagtctctttttaggttcccaagattacttgtatgtttccctcgactactctctaatgcggctggtcaatggtatgatttaatatcattttccaaaatgggtgcacccccatgcatatacttaagccattttgaggtaacaaatttatagttccggattctattttagaccattgtttttccaacttttataactctctagctgtttcccataagtctaactgatatctttaattagataatctaaacccctattcaaacatttgccgagtcaacccttgtagtttacaggcgtaagttacaattgacgaaatctaaaaagaatttccgaaggtgtagaagcataccactgcgcatagacctcggaatgcatcctctttctcaatatcatcacgtatactgccacagagttaattgtttgtgagggattacgcacaaacataaatcaaatatataataggggtttcaaaagaacttacatcgataaagcaatacaccatgattgcatgaaatgctcgatatgtggagacacaatatctggacaaacccatgcaagcctaccgagtgtgattgcacaattctcaataagtgacctattaagcccctgaacagtattaacaattgcaattaggaatgattcatcctctagaagaacatacaatcagaagtattcttcaaaagaaaagtaaaaaagttgcattaatcacctcagcatgtttgagaatggggactaagcatgaaataattgtcattacaactggagaaatttcttgacgcacctgcaaatgaatgttactttagtgatgattatatcaaggaacaattctagctcaatgcaaaagttcatgtactgctcatagccctaattcagaaacataacgtgattcataaggtcagaatgcaattaggcaaaaaatgcaaacatgctatagatagcaaattcaaaaaactcggaaaccatgtgaggttcaacaccaggtacaattgtttgtcaccattgtaaaagacatgaatgtgagataaagacggttttagaatcatagatattgatagaacaggaaagctgagcaagtgttgtgtcaatcaaatttagttcagcacaaaagaacaacggtgaacaaggaaaggttccatgagaccaagaaaaagtgaagacacatatttacaacaaaaaataaagctgtgttttgcctagcagcatagcaggtaggcagctatagtgcaaaaagagtgttcccaaatatcaatattgcatccaaaaggcataccttgactgctaattctccaattgcccaacatgcattattcgcaactgaaacggtctcttttatcttaggagtgctctgaaaatcaacaatgcaagtttaagcagtctcctttataaaaagggatgtccaaattactataaagaatcatgtgctaagtttcacgtaccagttgctttgctgcaacctcgagaaattctggcaaacgaggtctcaaatgaataggacaaacctaataaaatcataaagaacatcaagcagagcaaaaatataaagaagcataaaatacttccacagctcgaatgttctgcttcagagacacagctccaccattgactaaaaaaaacttgcattctgctgaaacgttgaaagataaaatgagatctaacctaacgaagtttgttaatctaattatgttagtaaacttaccctagcaaggtcaccaagtagtgcaaatgcactttgtctgacatcagaagcctcatccatgcatgattgcaacagtaggtcgatcaagttactttttgaaatctggaaataaaaaccatcctttgaaagtgagcaagtacaacctataaactataatcaactcatcttactttatgagacatcgagtgtgtttgataaatattagccatgccttgtaagatacaaataatataatgagcatttcatcaccacaagtaaaaaactgagaaaagagtcactaattgaatatctcacgacagggacgaaaatagttcagagtccctaattgaatatctcatttcacaacagaaacaagaatagttcaagagatatgtatttatattagcattttaaaagctaaagaaaatgttattagaaaggatagtatctcatccaggaggccacagaaaatagtcatatgtattaaacagaaaatgtaatgagcaaagaagactaccaaactctctatcccactgccaagaccttctgcaagtcctgagagaaggtcaaccgagcatacaatgaactctttatcatactgggtcccagctgcaacaggatctgcctgcaatatccatttacagcatgctttaaggatacttgcaagttgaaccaagagttatgtgtaggatttcaacaattttaagaaatatgcatagaacctctgaagctagctcagtgatgaaagagggatggagctaaggtttcatatttttctttttagtgggtgtcaagtgtgcacaggaatgtaaccgctaactagagaaagtgttagcatccaaaatactacaaagatagaaaatcaacaagatctaaaattcaaagcatgttcttgaaagttctcatgggcagatctcccaaagtttctccaacaaaatagcagaagcatagaatattaaaacttcaaaagctttttatagctgaaaactgtgttgacatcaatagcaatcctccgttcgaacccaaatttcaatttattttgtttacattccgatgaacatagaaaaaaataatttaagaacaataaaaaaggattctatggacgtttgaaaatggaatttattgaaaatttgagcaattattatcctcattttttctctagtaatatccgtcataattttttttcctcggcaaaatccacaatccagaaacagtcataagaatttatagcttccaattacaattttttttcccaaataaaagcagctatgcttgaaaagttatgatgtaaagaatgttggcctaggacaatttataagtttgaaagatacttgctatggcaaggataactgctgaatagacatctcagtttgaaaaagatccataacttttggtcgctattacaatggctatagtatcgctaggaaataagtattaaaagtcaaaagagctataatgagaacatttagctggttaaaaccggtggatgggtaaacactctaacaaagtaagtaatcaaatacttagtttttaaaggataaaggatttctacccacctttgccaactgttgagtctgaatgatgtttatgcacctctgaaatactggctctgcgaatgaagaaaatccagcacccaatgcctgaaaaaagaaatgtttcttttactcaaatttatatacaattacaagtcattgccaaactatcatcctgaaaactctcagaacattataaagataatgcaaatttagaaattcatgccaaatagttccccaatagaatatttctttaactgatgaaatacagtccaaaaagtaataaaaggtgtacaagaagaaaaagataagagtgaaaactaacattgtaaacggattccaaacattaaaacaactactatagacactaaaaaacaagagcagcatgcctgtgatatagatgtgaagcattcaagaagtggaaatagatctttgtctgcatttgaaagttgttgccattttgcgatcaagggtggcatcagaatttcaagataagcaggctgtaaagtgcggagacaaacaggagggaaataagttagtaaaaaatgagccttgtggccttccacataaaaaagcaaactctacttggccatggcgatttttagcataatgaagctaccttatttagctccataccaacagcatcagctagagtcccaattgcatcgtatacaattctgaggttccgcctctgagattattgatagagtgtcaaaaaaaccaaaagacagttagaaattccattcatttttcccatgaaagcaagtgttcatttttcttgtaaaactcgtgaaagtttttcaaaagaatatgaatgcaagaataaaaaagcaataattagagatatggttggcgttgcattgcattgcatttcattcgtaatatcataataaagcaaatgatttaaggccaaggaataacctgatattttccataagcacacatgaggtgctgcaaaattatctctaaccttggtaccaattcttcagaagcctcctacaatcgataaagaaacattagagctaaataagctcattttacaattttcataacagcatttggtgaatgattaaacttcatttttatagcaagaacctcttcaagtgtagcaaaggctgaacaagcagcttcctgaactcgcttgttagtgtccagtattcttctaaggaggccaagaagaaccttgtcgaattgctcataacccgtttgatgtcccacaccctgaataaaaaagaaaagtttgtcagctataatctaagtcattaatctctgcaattactgcaaagagctgtgttcattaaccaaataccaacactaactactaatcatttctagattcttaaacatctcatataccagcactaacttctaaccatttatagattcttaataacctgccaaaggaatgtctaaatagaaaaacattacaataatgtaaaattttataatggacaagaaagtaggaaattgacatgaattatacctgaacaatgaatttactgaaacgagaaagagtccaacaagatatactccgtataagaggaaacttgtcatctaataaagggattagaaacgcaacaatctgtagaacgtgaaaaaagttcaatatagtatttgccattatgtatcaacaagagaacagtatgaaataatacattcataacaacataaaatctttgcaaatcatctacaaaagcaaaaaaacttaattggttcaaaagttttactgacttataagcaaaacatcttccgaaacatgaaagaaggattttatagtactagaaaatattataatcatgaatcgtgaaaaaaaatactctttttttagtaacaaacccataaaactctcaaattcagttagtggacccaacattgaaactatggctatctgtctgaacagtttgggaataagaaactataataatgaggtgctcagaatggcctaaagccttacacttcatgggagtaagctaaatgcctgatcatttctattacccctcttaggtttcgaggttaccaaatcaaaacaagttgattaaacattacctccgacaaatgtggataaagtccagtgatgcaaccctcagctatggcaccaagagccaaaacagcagcttccctctctttccatgcttcatccccattgttagacaagttggtctgcaaaaatttaagtggtgaaaacacatttgaaacagatttctttagtgaacagagtaagtaatattattttataaaaagttaaaaacaggtgatttagtctttctctcactaggtgaatcaagtaactttctaacaaccttaagatctagctacacaggtttatcttagttcattttatttgcagcgagaagatggagtgaagaaagaaaaagtcttgggaatcaattttaaccttcgatgctcaataattgtattacctgaactaaaggcatcaatgtaggaagaatctcgtcgccaaacatatttgaaaggatatctaaagcagcagcgctgcatttgcgtaaattccatacattgacaatatcatcatcctattattgaaccaattagtcaaaagataaacttgtcagcaaaagctttcttagtaaattaaaccaacagcaatccaaatattgaaatgtacttatgtgaatatagtggcatatataaaattagaattatcagtaagataaaagatgttagtgtgacatacatcgtcttctgcaccctctgagccatgaaaccgtgacgaatggaaacgaggtttgatatcctgtagtgcaaaagtaaagcagaggtgaaggacttattttatcaagaatttaaatattggagtcaaacctctaattaatattgagtattcaaaaataaaaataaaggttccaacctgttcacgatctggtacagactcatcctcctgcaacaattaatcaatgcctcaaattattaaggaaaactgaattcaattataaagaccaaaataaaaatatagaaaaaccttagcaaagtacctcagcatcaataagtgactcatcatcatcatcataaatcatgttagacaatagcacctacaaatggttaaaatgttatatgacaaaagcaatcaaaactcaaaagctccagtggaaaaatgattgatcaattaaaatcttgtcgatggtattctataccggaattagccggggcaagtactcccttaagttctctgggggtaactgagcttcacaatatgcagacctgttaaggaagcccaataattaagctacttggtaagattgaattcagatcttgttctctagaactcacaacattaccagaattcacaagcttcaagagccacctcttcatcagtgtccttgttaacttgcaacatatactcaattacattctttagatgtggctgcagctcaaaaaaaaacacatcatcaagaacaggacacaataataaattttttttttatagaaggatgcagaaatctcagattcagcacacattttaaagggtaaattattacagcgggttccaaaagacaaggaacagaaaaaggacagcaacatcaaacaaaaagatgtgtgagaggacatgcagaatgattcaaaatgtacagacttatagcaaaattaaaaatttaaaatatctcacctctaagaaagacgggcggacttcaattagctgcacgaatgctgagcaaacctgtttgaaataaagttacataaagcatgggtgagagtataataacaataacaatcatgatagaaatacaatgtagcaactgacaaactctatggattggttacaaagctttttacattttgagccaaaaatggaaatattcaaagaaaataagacaatatgatttactgatgggaaataaaatgcaagaaaaatactaaccaattttcgcacttctgagacagtgtcatttgaaagtacaaacaggccttgaagatattgatccatagatgcatataaggcctgcaagacattagttcacaataattagaagaatccaaagaagcaaataacttttgtgacaagaacaagtttgacaataacttacggctggcatcaacataatgtattgattcactgaacccaaggaaagctttctcagtgaggaatgtggtgactggaaaagctgtataaagaaatgtcatatttattaacccaaggacacagaaaaatataataaaaagtaaaaaatctattataaaagatattttttcacaacagcatagcatgcatatatagtcatatacaagaaaataaaattattaaagtcatatgcaagaaaataaaattttaacagcattaaaaagttatgccaaaccttaaacaatctagggagaaatatgttgataggacgttcagctaaaccaggtatatctgcatcaagctcttgaggaatatcctcacaaatctgcatcaaagcacaccattgatgtatcgaataattttgaattttgattagtggtcttgattgaaatacatttgaactacatgtaccctaatacctattgtgtataggctacattaaattttgtaagagtgcaaaagacctctaacgttacattgtacaatgaaaaccccatatttatgaagagaccaaaaggttaataatcatttgactctggaacaaaagaaataccttggataatgcatccatagcaccttccatatgattaatatcattgctgtctaagcaagtgacaagagcttgcaataactcaggccatccagctactcctcctagttgaacaacagcacttacaattgttccaactgttgacctaatgttcctatctgctgctcccaagcagggtaacagctctgactttatatattgctggtaagcaggaatcatagccttatacgcagaccgaaggttattctttaaaagcaaacctgcagcttgccgaacatccgctgatttaccctgtttaaatcagcacattatgttaattgacaaccaggaaatgatttcaggaatagttaaaagatgctagtacattgaatttcaaacaagccaccagaataagattcaatactatcaagacaaaattatttttatttagagtgctttcaatcaaaaagccataagggtagtctccctctactattctagttcactgttccacacaaaatatcgtgatgaaaatcacatcaagcaacgaagcatacaatgcagttaatagtcacgagtatgttgcaagaatcaacaataaccaatttctccagtttaatattctttggatcgcacaaaagttccactacatcaaccaaagcacgattataagaattcaataaagtacgaatcccagattttccatcagacccaaaaccataaacgaccataaatgccatgtaaaaaaacattccaacaatcaaccagattaaccaatccagaaacagaaacattttaagtcactattctcccttaatgataaaaactcacaatccaagcaaaatcattactctccaatacaaaaaccctcaaattctaaacaaaacacattacccacacaaaaaaaaaaaaaaaaaaaactaagaaaact

SEQ ID NO: 186779 - DNA, 4900 bp, Cannabis indica
tcacactttctttaaggtatactaatggttgtaatgtgcagttcgttcccatatgaactagattatgtgaacttcataatcttggaaattcactctaatttaatttttattaagaatgattttctgtctagaagtgtcacactttctttaaggtatactcatttatgcatagaatctgagtcaccattgatttattatttattacttctaagtttattttatgaataagcaagtttactcaagtggatcaacaagtaaaatgtgaaaaggagcagaaattgcagctgtggttgaataaatttctactttagtttcacactcttttttctttaagatttaaattgtccccaacgaaaagtgactgagatggtattcaccttgagatttagtatataaaagaaacatatttttccatttatattaaaatctaaaatattgagagttataattttacttgagtagtagtggtgtgattcaaacctgctttcgaatttgtatgtttagatcaattgcttgactctgttttcctaggccttattatgctggttgaaggtatatgtggtccaacatatcaacgcctgacatgttgattagaagttagaactgaaattactcagttgcattacccttttagtcaaaaagaaagaaaaagatgcatctccttaattctatgtcctttatgaacaaaagcaaccttaaataagaagccttatggggattttccagcagtgattacttatttaaccatgctagcttcctttattcctgtttcttttggatgattctctttttgtttgcatgagtaatgtcaacagtaaaaccaaaaacaaccatactctgatacacagtcaactattgatgaacttattgggcttgatattagttttcatttgtcgtttgactagaattcagcccagcccattcctttcaaaataaattcagaggtaaccccttttctttttatttatttaaaattaatatatccagcctaaaagaaaaagtaattagaaaagcattactactttttgcttaataactgagtgagagtagctgatgagtagaaaaagagaaaaagggtagtaacatcttacagactcgaagtgacgtagtaaaacttgcttaaacagaaaacttaaactatagtagagaaagctatataaaaaagaactagtgtatagattaagagagacccagtaggctaagagtcccaatgacattatacaaagtcaaaccttaattaactcagtcgaaagagtaccacacattaaaacattaacaaaccaaaccaaaataaacatagataaaacttaaaatacagtacatgcaacaacagaccaacgtagtacaactaactgtaatcaaactctccttcgtaaaccaacacctcaatctgtgcaacatcggaacatgaagaacttctccatgtcgcggccacattctgtgcaaaccacctttggaggaatgtcctgaccgatccctggaagaatgagacgcgtgcagtgctgtggcgtgtggcgcctttgtagttctgcatctaaagctgggatcaaagttatctctcgagcctcaggttcccaggcttggaactcattcatggttaacagagccagttgcccattggctcggaccatctcgttcgagccatgccagagtgacgcccagccctggtcagagccatcgtaactgagcagaaccatgacctctttcaatatggggtcgtcttctatggtcttgccgtaccggaccttggaacagcgcatgctctcgagcctagaccagaagaaccagatggtcgtggaatctggccagatgtggctgagattctcagctaggatcgttgcattgatcttgttaatccgctctttcggtacgttgcttttccccacgtagaccatctctaactcgatgccgagagcccgtgctaccagttttgcttgggtggtgaattgtctgatccattcaatattgtctcctccgtacaagcatatgtatttattactattcatctgaaatttttggataacaacatatttaatcagataatatgtaatttacagtaatttgcatttgattgaatgaaatgaattgggaagcaattttcgttttcttccctttacatgagatgatatgtattaatgtatataggtaatatgctttttgttatcactttcttgcataagaattgaaggagttgaattgggttaactgttttgtgttagagattattcttttagttgtcacataatgtcaattgggcaataatctgattgagtaatgatgtgttttacagataggagataatatgttgtatgcatttgtttattctataatgcatcaaaaaaagaaaaaaactgtacccattgtagtatttctgcttcaatgctatcgatgagtagcttgagtgaccattgctcagtactccaaagtgtatcctctctgtcttgactgaatggcaaggctgaattcccccagatccacatcatatgagtggcatttttggatgtgaccttccctgatggatctaatgctactaagatcattttcttttcgaaattccacttctctctgatgtacttaatcactggaggttgaattacttcagggtcgtctacatagtaccatggcatcattgattgtaactccaaaagtttgtgatcgccttgttgaggccaattcgccatcctgtccaccattgggatccacaccacctcatatggagcatcttttgagttcgtatcatatcgatgatcttgcttcatcctcatctcataaataatgttgagaactgtaagctcttcattagtgatatcaaagtcagatattagcagcaacacatgctttcgccttagtacttcaacagaaacctgtgtttgtcaattccaattattgattcagctttgtgtactattgataggaataccaattcaggttattgcagagagttttaaaacaaattacctttgttttggagtaaccatgcatcagggttggctcatcaccaggggcaagtaatgccttgaggatcttcatgttgtccagatgggtggtgccctcaataaggcgtatgagatttctgtagttttcttcatgttgcaccttgactggattcagtgaaaatttacttgttaagactcaggtgcatatgcaactttgaagaatactaaagatcagagaggtgtgctgtaaacctccttaaaaaattagttgagtttcaaagagttgtaacaagtttatcatattttgtggtgctcaatgcttttaaattttctgagttttcatcttttaccacaaactatttatagaaagatgagatgagatgatctttaactcccttagacaaatctgttttgtactttcacttctaaatttgaatttttaaaggactcacctatataatttcggcaattattcagttcaattgctaggaggtcgtgtatactgaccagcttatgtgccaagcttgacagttcccatatctccgaggctgatgcaacatgcctggaatccatgtatcacaaaaagagtgctgctgttatttttctgcatagtctaagatgaattgagtttttaaaatcatggttttgatatttcttactcatatctgaaatctgtaaggctagcaacatgccaagcacatgctattatgcttcgaacggtccagtatgctgcagcaggaatatgagcttttccaactgataattgctccgagtcttgtgaaaggtactctgttggtaggtcattgaattcaataattagtttagtaaccttcatgacagcattgatgagattgtgtatcgcttcaagctgaggcttcatggctcgcgaatactcaatcatgtctgagagttgcttcagaagagcaacagccttggccagtggatttgttgcacagagctgagtgacaagccagaattcaccataagttacagaaaaagcagccaaggctagaaccacttttgcttcccatggatagtatgacagcatcttgaataaaaccagagtagacgcatgcagatccgtccctgagcacttgcaaaacatctggccaaatatatttagtatttactaatcagttcataaagagaatatttcatgtgtcttgtagcattatgcacctaatacattactttctctttactatattacttattaaactgaataatcttattggtgcagaaacacttgggatccttctttcttttcagaaagaagtatgacttactgagaaatatagagtataaatttatggattgaagaactactgcattgttgccactttgagaccaattcaagtggttgagtgagtgtgtttgggttcaaatcccagccttgactattttaattaacatggataacaatgaagtgattcttataaaagaaaagaaaaaggaactgctgcattgtttagtttagttcatgattgaagaacaacctcacaggaaatcttatgtatgatatgagcaagtgcttcgagcatttcatcgacgctagctgcgctgaccttctcatcatttgtatctaaatgtacaccctgcaaaccaaaactcaggcaaatcactaaccaagtataactaaaaaagacaaagattgcacaatatctgtactaaatgtaggatggagattgcagaaaagagaagatgaatacatttatcatagcatcaatgccaggagcagtcctgcgaaagatgtcctcaatgaccaggataattggtttgacatcaagaaagtgagtttcaggactgtgagtttcccgaatttgtctcaccatcgtgctgtcgtcagatatcatatgcctcctgttatggtctctcttgcctccagacgaaaaatgagggatgattgcttgtacgtgtttttcagccatgatgattttttttttttttatttttttttgggaaag

SEQ ID NO: 186780 - DNA, 4245 bp, Cannabis indica
atgaaaatcattttgcaaaatgacaataaaaattatctattttgattctatctttttatgttttaataaaattatataattataatttatatgtataaggtttatgttgttggtgacacttggaataaaatacaaaagtaatactaatataaaacattgatattgctaatataagtaatcataatacttagtgtgtataattttaacatgtatgattctatatttaactttctatcatacttttatttatttttatttaaagtacttataatggattgcttgcatgtatatattacttttgacaagataggatttggcatatatttgtgtttatattctaaagtgtctaacattattgctaattataatttagactaattaatagtagaggcatgctaatttttatctattgtttagttttgggcaattgtgtccaacactacttgaaagttgaggtgtgttatattgagtctcacttaatttaattgttaaaaattatcttagaccatctctaactacaataatatatttggtgttacactaatactaaatatgtaaaattttagaaatttgttgtttctcgtcttatgagacttactcttagagcactctcacgagctttcttactctatcttttaaaatacattattaaaattttactttttttattttacattacaacatacaccaacttttttaaaatacatctctaaaattctactttttcaaattttaatatattttattcatttcaaacatataatactaatatttacacatatccctatataaagtaaaaattaaaactccaaataattgatgcaatgaataatattttataaatgtagagcatgaataatgaatttaaagaagctttaaaataaaaaaaaaaaagtgtttagagtatctgatgtaacgtgtttttagttaaattctttaaatatattaaaaattctctattttaaagcatcttatttggatgctcttatgatagtatctaatacagtgtcttataagggcaactctaatagcaaaatttaaaggacactactttttttcaattccaacgagaaaactataaattacacaaaaaaaaaagtatatttattatttttatattaagaaaatttaattatttaactattatttcaatataaaaaactaaaaaaaatacaattttagtatagttgacaatgccacatgaataatagtgagatactatagacaatcatataagatagcttttagtattggattggattaattttagtgagaataacactaaatttaaatttttacccatagaaaatgacctaaaaacccttttggacaatatacttttgtggtgtaccaattgtactgtagattaattttttggaaaaacactaagaaagaaaaaggttaaacaaaagaaaacatgattggacatttatgcactatacacaaaaaggtatttaaaatggacaatctgtccaatatagatgtatatttatgggtgtatctatgtatatgcacgacaaatcagcactatagagtttcattcaactttgtttaaaaagcaccaattttcatgagcgtgctagggctagtgtcttaaccaaacacacacaaagttcccactaaagatttctcattcatcaaatcaaattggggcatgaattttaaacacaactttctttctttcatttctctctcaatatgtcctttttaactttcaaagctagaatacaaaaattcctataatagggaaagaaggggaaaaaatgaaacaagaagggtgattttgtaaattaatataaaaaaaaatatctattttcactaatgattcaaaatgtaatgtattttctaggcttgattttattcaactcattcctctctatttgctttaagtggttttgtgttttgaggctttttgatgttatcttaataaatcatgttatatgcaggttgggaatgagcttggagctggcaacccttacaaggccaagctagctgccatggttgccctaggttgcgctttcttaattggcttcatcaacgtgacatggactgtgattttgagagagagatgggcggggcttttcacaaaggatgaccttgtcatggccctggttgcgtcggttatgcctattatgggcctctgcgagctggggaattgcccgcagacaacaggctgcggtattctccgtggcactgctaggccggttgtgggtgctcgggtcaacttaggctcgttctactttgttggtacccctgtggctgttggactcgccttttggcttaaaattggcttccccggcctatggtttggcctcatgtcggcccaactagcctgcgttgtatccattctctatgtcgtgctcctccatacggattgggaggccgaggctttgaaggcgcaaaaattagccggggtggaaatgagtactagtgcttgcattgaagaaggggaaacaaagtatgaagaagatgaagagagcaaagggcttttgattactaatggaaatggtaatcacaacaaggatgatgttttttggactgaatgaacaaattttgtgtttggttctcaaaaatttatggtgaactattattataggcttaggaagaagaatgtgatttgtctatgaaatcaatgttgcatgccacgtagttgtaaaaaaagtaggtttgtattggctttccttattataattttgtgtctttggttataataagcaaatgtcaaaactttacaacttctcattgcataacatcacaatttttaaagagtgtcattatggtgctactcaatgtcttaaagtgaatttgttcaatcttggtaatttattatggagaaaagtttgttatgctatatggttactaacttactactgttttggagtgtttgtgaacttcacatttgggctactcatattacacacgattttcccattcaattctgaaatgttaaatgagactcatgttgtccaatacccttgtgatgtataatattattattggtgcaatttaatatcgtatcccacttagtaataaaaattataaaaaaaccgttaactaattataaagtgtcatcttttagtagtgttagacaccttgatgtttcataataatactcgattcaatttttcttcttttaatgtgccatgtaaaaggttatgtcttgcatagaggtgctcaaaggcaccaagtgtggatttttcctatacttctagatttttttggacccaaaaaggtgggattttttttagtattttaatatcaagaggcttctccaattcccccaaaactttaaaaaagatttttcatgttcaactctggcttgaattctttaagaagactttggttagttaagtcatcttgtttgtctcacatagacacctttttatatttacttggatgtattttaggtttcaaaataaaacattggttcttgattcctttcccatgtggaagaagtctaatttgtcgaattccttaatgagaattatgtcgcacctttttgttttttctacctacatttaccagtgttggttttacatataaattgttgtgctcatctaacaacaaccccatatccacttttttatggtaattgctcgattatttgaagcattgctatgtgacacttattataactttctagctttaaatttttattggtgctcttacattcatggatgactctcttacgttggtacatcatgtttggttgctttttagaatgatgattagctttaaaaattagcacgagtgtattcagcatattttatcctcacttgcacgttttttagaaaaacttctcaggatgttacttattctagtattattctaagtaaaacacatttacctttagagtttttaaatgatagactaccgaaaataatgtgcacttgttaatataggtagtaccatcaattcatttaaaccttattcaactatgtagtctcgtacctaaagttgtatatccaggcggcccaacccgtttttataaaagcccattttttatgtaggcccgacccgactaatattataaaacgggtcgggtcgagctaggccgagcctggcccatatttttgaactaagcccaacctgtcctataaacacatatttatttatattgggccgaacctatgctgggcctagacgggtcagcttgttttttatgaaatgtatttatcaaataacccttaaacgagcttatgaaaaattgctattttcttgcattttttaaattaatttctaatt

SEQ ID NO: 186781 - DNA, 2734 bp, Cannabis indica
atttttaattaagtagtaaaagggattggattgtaattattttgtctttctaattattgctgattgatattaattcactgagatatctggctatttcttcatcaatggtaagattttgattaaatgaattttctgtggttcttctcctgccccctctctctttttctgagaactttctatttgtggaaccgtggtttttgttgtagttgctataccaccatctctttaagtttctgactatctttttgtgtagggatacacccatggattatgatgacaatgattttcacagccaaaattttcatctagctggagaagggagttctaaatttcctcctgttttgcgaccttatcctcttcccaagtttgattttgatgatagccttcagaaccatttgaggtttgataatttggttgaaactgaggtttttcttggcattgaaagtaatcaagataaccattggattgaggatttctctcgtggaagtagtgggatagagttcaattcaagtgctgcagaatcttgctctatttctagacataacaatgtctggtcagaggccacttcttctgaatctgttgaaatgctattgaagtctgttgggcaggaagaaactattgtcacgccaaccatcattgaggaattagatgcctgtgatgaattgggttgcttaacaaagcaaatggagcatagtttgaaacatgatgacaataatattctttcaaagactgaggatggtacaaacttaaatactacctcatctccagatgggatagttggaaactcttctagctcgaagagggatgtaggtgtagaccaacctcttattgaggatacttcacaaattcagagtgatgaaattgcaaaaaatagtagtttgcatgattctcataaaaaagctgataatggagagagtgttttacttgtaaatgatggggatatcttggtgaatgaaaaatttgatgatgtgagcaaaagtgcagttgataccttggctgatgaacagctggatgtccaaatacaagaagactcttttgcttcaaggttgcaagttgataattcagtgaccactgtgcaaagtgttgtctcaagcagtactggaattagtaggttgcaagttgataattcggtgaccactgtgcaaagtgttgtctcaagcagtactggaattagtggtattgatattgaacatcagatgaatgctgtgagtaatgataatactggaagtcaggtttcaagcaaagaggaaatttctgtggtttcagcttctaaggtcgaagctgtttcagatattaaagaggttagcaaaagtaatgtagatgaatctttaagtgaagtagagaagggagattctgagctgcctatagtgtctgaaagcaatgaaggtgagttttctggtaaacctattgaggtcagtaatcatgaaaatgtggtgctgtgtaaaaacacagttgatggtgatcaggaagaagttaatacgattaatgtaatatcagaacctgtcaaaagtgaaactcagtttgagagacctgtagttgaggtcagcaatataagttcagaagttcgatctactctggaaccaacaaaggattttgtagaaaacagtcgcaaggaagatgtgttcgaaagtagtcagcagttagatggtgaaactttagttcacagttctgaggtatatttgtcccctattgaggacgctaaggtttcagaacatgaaggtcttgcaagtagcaacagtcaaatgggaggtatttccagtatgagtggtacttgctcttcagttgaattacatagcgaaaccaatgtcactggagttttgaagggtgttcacgattcccttgaaacttccacagaagatttgagttctgctagccatgtttcacttgccattctaactgaatccacacaaatatctgagaagaaccatgcatatggagaggctgatgtttatatatctaatcaacatgtttctgttgttgacaaagataatttaaagttgcataatgattgcaatgtagataatgaaactataaataaagaaggtgcctcctcatcgattggtgatgataaatgtgctactgctgctggcagtgaaccaggtacattataaactcatcaaatttagttagaaagtcaaacattatgtattgatgttctaacttcacctcctttaaccctattttgattttgtagtgtcagatagtagtgttgtgccaaatccttatttggctccccatgagattagtgatagttctttgcctactaaagatgtattgaagatagatgatcacaaggacattcaagtatcggctgttcctgttgtggggtcaactctcttagaaggaaaagaagaagcaaggacagaagcttttgcagaatcaagtgtggcggcttctttggtgtcttgtcaagtagttgctgcaccagactctgctgaaaaaggtgcttcttgtgttactgctgggggcctcttacacaagcctcccgatctttatctgccaacagaaaataaacctgaagttgaaacaaattctaaggatccagcagctgtggaagttagcaaggagtgcactaaggagatgaacattccccttcacgaatctacagtgagagagggtggtcatgtcatggaaccggtgattgtccctgaaaattcgaagcaattcattattgaaaaacatgtgttgcaggatgctgcaagtatcagcagaaccggtaaatctctctctctct

SEQ ID NO: 186782 - DNA, 1895 bp, Cannabis indica
tgattttttttattttgtcctattaaatttacttactatatatttatgtaaactaattttctattaccatattagtatttatgtaaatagccctttactaactttgtcaataatgctttcgtcattatcaagcagctaaagactgataagagtaaagctaaagcacccaccaccaaaattcatgctttcacatgtgctttcaacataaaaggaatcagcaactcaaaagacatgcatcagaaccatcaactatttgttcttaaatctggaacttttgtccaaagctttcttttagtcttttaaatgtgaaagtttatctctccaacatacatatgtaatctctatgttttccatttcacttttgcattgtacttggtatgtaattgctaaacttaggcatgccagccatctgaaaaatgagcagcaatagtggcgatttccgggcaccaatcaatacgccgtcattcatttctgaaaccacagtggtgaaacaccaaaatgggaggggagctcacacaaacttacagtgaggttttgtattcttaaattcggcacactagcagagtttaacagaacaaatatacaattgaacgttctaaatggtaaaacaaaaaatgaagtgtgctagaaactgaaaatatcaaggccatgattttgtaaaacggaaatatcaaagtgctactgctaccttaggaatcatcaagctaacctaccaaaaagaatattacatgcttttaatatataagagggaatgcgcactattattcattacctcgtatcatcgtccaccagacaactcaatagcatcctgattataaatggaatcttcaccccagtcgaaccttctttgtattctttcatactcttgccttcgagtaacttcgacattctgccactcttcccaccgctcagccagtccctctccttcaagcatccgcacaacctctgacattaacgggcgatcatctggtgattgttgggtgcaaagcaatgcaacctgaatcatcatttctacctcttcgagttcataattattattaagattgcgatccacaatagcctcaagtcttttctccctttccagttttttcacctgcaggaagaaaagaaattatctacaacaaattggttctctcagatgaagaaaaacaaaagtgcacgagtaagaatgcagcatctcagtacagctaaacagtaacgaaaatatatgaaaacattactcttattttgcgtagtacagtgaaaaatgagaagcataagtcgactatcttaaatagcaaaagcttgatggaaatgtccatgtagcacccatcccttgatttctcaaatatgtttccacaataaaagcagtgtgaattatatgcatgtttagggaaaagcattacatggtcaagcaataaaacatcatcttcctcttccaaacgcgagaagtctatcgcccgcttggcctgttacaatctccaagagcatgattccatagccgaaaacatcagttctttctgatgacttcccagttgacaagtattcaggtgctatgtggcccatcgtccctcgaacttgagttgtcacattagtctttctagcatccaccagctttgccaagccaaagtctccaacaactgcttcaaagtcttcatcaagcaatacattagcagccttaacatcccgatgaatgatcttaggattgcaatgttcatgtaagtactccaaaccacgcgctgtacccaaagccactctttttctggtgggccaatccaatactggctccccaggttttatctctgcaataaaactcaaaatcagaaaagtacagtagatgtataaagatgtagatataaatccggtaacaaatcacatttacgacctaaaaagaaatacctcgtaattgataagca

SEQ ID NO: 186783 - DNA, 1976 bp, Cannabis indica
aaccaaataactatgaagtttgttaagtgctgtcaaattactctttcaatagacagccaaatattattttttttcttagtagtttattatttttattgacacacataattattttttttttaatgttaatcacaattttaatgttgtgactcataaattaactaaatatgtctgtaagatatataatgaatttttgaatgatatttcttccttctttcttgtattggtacttttgatcaatgaaagttaattataactaaaataaaaaaattattaaatactgattttcttgttaaactgccgcatattaatataatgctggttaggattttaattttttttaaaaagaaattattaaataatttacaaataaaaaagaattgactaatgtattttaattaataaaaaatagatataagaatataatttttttttttaggaaaatataagaatataattttgaacaataaagatgttgcaaatatttctttttatattttgagtaaattacattgtctttgtattaaaaaatgtgtactaatataatggactcccccaactattaatattgaatttaataatttttgtctaattttattaatataataattgtttttgtactaaatcgtagttttattttaacctatattaaattgtgctttttaaacttttattcatattaaacttatgttagtaaaattatacaaaaatctttaaatgtaataatttaaataattcaaacaaaatttttaacaggataaaaaattagacatataatataacatttgggacaaaaatcttaattagtgttattgagtaactctaggctcttagaggcagttgtgtcgtaaattagatctcttcaaaattgtcgtttattgaattatttgtcgttaaatttggactctgttgttttgataattcaatttttagcagaaaaaaaggttccaaatcagagaaaagccaagctggttcatctttatggtcgcaaaacttgcttctctctcaccactccagacgccatagaaaactgagaaggtcaaggtggttagggcaaatgtgtgttcgaatctgatttcctaaaattcagaatcaccattgagaacaagctctagaaaatgttgcgactcaaagcattcaggccgagcaacgagaagatcgtgaagatccagttacatccaacacatccatggatggtcactgccgatgcgtcagatcacgtttccgtttggaattgggaacatcgccaggtaccttttcatctccttcttcctattcaactcatccgtaaactggagaatcgatctctggtctatcttacttttgatctatggattatattaggtaatctacgagctcaaagctggtggtgttgatgagaggcgtttggttggagcaaagttggagaagcttgccgagggtgaatcaggtacaaatgtacttctttatcgctttgagattttagttcgaattacgttgaaactaatagatttaagcaattcattgctacggttgattcaattttgattatgaagtctttacattttgtagattagtacagttaaccttacattttgattctattcttgttcagttgtaattatcttatggaacttattgaagttcagatctgaatgttcttgattactataggaagcttagattaaacagttaaatccagaaaagctttaaattcagttaagtactgagtttattagcctgttagaactcttaaggatgttggtgaaaaatagtttgctagcattttaaagattgatttttatgttatttcttttgggaaatgaaagttaaggataaaagaatattttgtcctaagcaatttacagaaatctgaatacaattacattttcctcataacctccccgtctctcatatgcttcttttttcagtttcccataaactggctagttaagattgttgttgtgtgcttgcttttgtttgaaaaaaaaaaaaaa

SEQ ID NO: 186784 - DNA, 1647 bp, Cannabis indica
ctaaaaaaaggaaatgtaatcaaacccccaaaataaaaattaaaaaaaagcaacaaactttataatttctacattatgatcgtcaccgatcgagactaaacaagtcacaaacaaagattacatcacatggaaaccaaaaattcctcaaaacccatctgaatccaaacccaattgcagaaattttcatcttttaatttttcctctaaaccaaaagcagtaaaatttctgatcaaactaaggaacaaagaagtgggtttgtgatcaaaaaagttaccccgttatcctaagggttgatcaagattaaaactttgagaaacttgccaaaggatttttgagagaagaagagaaaggagagaaaaagatatgattttttttcctttcctttaaaaattcttagttttggttgagagagtgaatgaataagaacagttttagcttttttattttgtatgggaggtgacaacacccctctcttctaatctatacgtttctttaaagcgatgaggtgtctgtctcttggggctttaggactttttgggtggtgaatgaattgagaatcagagacaccaaatgctatgctaagctctctctctctctccatttttattcatacaatttttcgttttaatttacatttaatttttctatgactgatttatctctaacaacctatggttcaacgagaaatgagggtgaaaaagtgggagattcacattagtttaaatcaccctttaatacatagtttatatcaaattacattattaattttggcaagtactattatgttaggttctcttttattatatcaaacagtctcattttctttttttttttaggtacaatttttttcaactataacaagccaataatgaagtgtaataataacctttgtaattaaaacacataaataatatatatataaatagttagttagtcagttagagtgagtgaggcagcagaataataaaaatatgggtcaaattataatgagtatatttgtaatgttgtgggaaacaaacatgaatatacaagttgcaaaagggtctaaaatttcaacttgggagaatggtaatgactaatgagtgactgaacctggttggttttactagctgtgatttaacaaattatgaaattaataataataataataataataataaaaaattcccaaaattaacaagggaaaaagcaggatccatgtggttgtgatgggccagattgcttgatttgcacctctccttgaagaaatctaaagataaattggttgcttttgttgtatgatttgttaaggtgcaactaattgaatcttctcatttgtgaacattgcaaagcttgaagatatgataaagcttgaatcttcccttagcccaaaggttcttatttttcatttattttattaattatatacaaattttattaaaatatcagacatttttttttataggtgtatataacatggtacacaatgccacaatacaaaattacaaagttaaatatgaatcaaaaataatttaggtggcatggaggtaatgaaatcgaatgcaataaaaatgaaataatttttactctatttctttgtttggttgcattttaaagtattgaatgtcattctaatgagatgttctttctactattttagtaaaatga

SEQ ID NO: 186785 - DNA, 6409 bp, Cannabis indica
tctttctttctttctattctctttgagttgctaccaagaaaagaaatcataatttcattttctctttgcattgcgttacgctgtgactaaataataatattattttgatgttctagatagaccttgcgagtgacttgtgaggtagggaagggaccttgcttaaattccagatatataaatattatatagatttcctttgatgctttggatgaaagatatttctattttgaaatttgaatgagaatctatgattggaatgtacaaaacaattgtctccaaacgtcaacaaaaaataaataaaataaaataaaaaggcttgactatatcttcctttttattttcatgctttagaccatctttggcgattttccctatcagcaagtaatactttttatgttttatcataattggtttcgttttggtttaatataatcccaattggacacttaaaagttcataagcatcagactcatcaactaaggggacaaacaatcttgtcataaactttgtgtatttcaacgattgttaaagtacagtttaattaatgttttcttttaataattatctttgattaccaaaagattcaaatttgtcttacactttgtgggctttcaaattagagacaaagcacaacttaacaaacttttatttccaaaagattcaagcttaaaaagccgaacgatcaagagaatgtccaattacaacaagcaagactttttcatagcaatgttttcatttgggtactttagctactttgttctcatcacatatttattttgtttaattccttttccaaaggagatgtgggcttttctttgcctgttttagatttcgatccaataaatgttggagtttaaaggcctaactgatgtttctcacattgaaataaaaatatctgctcatacttctaattagtacccagaaagataaatcatgtacttttgaagcagtatcaatgtggtaactactaactagtattggatatggctaaaatatacggtgctacatctaggaatgacaattcatggtcgcggatcgtgtattcgtgtggtattaagacttatatataataagtatatgtccagtctgaacacgacctgtcatctaatgtaaccagtttataagtattttttatttaaacatgtcaaccaataacacatttataacatattcaacacgtttataatttatttatgatctattaaagtactaaactaatttcaaataaatcattaaatagtcagttacgtattagtcgtgtcaactcaaacacgaccggtttactaaacggattaaacgagtcaatctgaacactacccgaacccatttaacacaaatccaaactcgttagttcttgtgcgggtttcaactcgtgtaagtctttgagattttagtcacagcacagcctcgtgtcactaaggcatagtataggaaacaagaaaaggaaacggttagctgagtcaaagtaattacgagttatgttccactttatttttccccggctagtaggcaaaacgatttgtaaattgttataaaaactaaagacacaaattgttgcaaaaataaagttgcaattttttcatgaaatttagaatgacaagtggaaacctttaattcacatccaaaagaaaaaatatatatttaataaaggaaaaaaaacactcatcaatgattcctaatttcctaatattagaaaatgcgacattgtcaggctaggtattagaatagaaaaggcaaacagggcaatcaaattgtgattaaattaggaggagacgagacaattacactagcatcttcttcagttacaaatacaaatatctcaaacatggattttctaccataaacagagaaaccaaacagttataatcttagttgctgctatcactgttattattattgttgttgttgttactatgatgatggttactggcattgccaatcccaccctttctcccatgcttgagctgtgaaatctccaactgggtcttcataaagaattgcatcctctgcaactccaactccttagcaaaattcattctctgcttctccatctccactacctgttgcaacttcgagctttcagcttgctcataagcctctccaaacttcaatatagcttgtgtcaattccttaactgcatttccccaacccttcttctcttttcctcccctaaatgcccctcctccacctccacctccactcctaccaggattcaaattcgcattcaaattcatctccctccccgtcctcactcttttcctctcataaaaatccattgggaaactatccgttgaagcgggagatgcctcccttgatgagctcgaatccaccggaccccgtttcttgtgttgcatcttctggttcttcagagattgctgaagatggtgcggtttcgggtcccgtaatccttggaaaggactaactccccgaaccggaattcccaggggaaccttatgagcatgttgggaagagctatttgctaaagaaacggcattatgaccaccaacggcaccggcgatcttcacagtgggaccaatcaaatggtcgagtctgtcgtagaaaggccacttgctaggccctccgccggacgaaagcttagccttttcaagcttatacttctttttcacagtatcaatcctgttcttgcactgaatatccgtctttgcagccttcgtatagtcatccctaccactcacaatatccgccacctctttccaatgtttctgctttagatttcctcggctcagctccaaataccgctcgccccacgcatcaatcagaactgacgtcgctccttcactccagcaatcctccctaccaccaccgccgccgctacctctttcacccacaccattcctagtctgtatggggagagccagagtcagagcgttttgggtcaccggctgctgaggtggggccgccgccacagtcaccgttatccttccgacgggcctcggagacgccggagatgcactccccggagattgatgtgactggatctcgtcgtcctcctccattgaaatcctagttctcgtcggccggtgcacagaatagtaaaattccgatctacgaaagaaacagagttagaaaaatcttaggatttcgtagggtataagaaggttaagatttcaaggagtcatcggaagatacaccgagatacgtagtttcagatcgaggaaagtaactagcgattaagccaaattctaaactgtggtataatattaaacccaccacatctgaactcaacaaccatgttctgaattacaaaagatgaaagataaaatttaagactttctcgtatctcacaaaacataaaccaatatgaaatataacctggatctagaaaaataaaacaaaaccccaaaaatcaaatagtcaaatttcaaaaaccctaaaacaaaacacaagaaccgaaaaaaccctaacaattagaatcgagaaaggaatagctgaaatccaagaggagaaaagataatacgtacctaagaagagataatcaccgagtcggagaaaagaaagtgaatttcaggctgatcggattagggttttcaaaagggtaccggcattttcgctgcctcggttttctctctcttttgtgagattatcattattattataaagtttatttttttttttctcgttgacggaaaaaacagagaaaggtggggtggggtgggtggggttgacggctaccgtcgaagggtacgaaaggagtgccgaatggggaatgagtttggtgatgtggcagagttttattggtccaaacgctgtacacatcaccaccggcgtcacggggtacgttggtctatttgacataaaaatccacgtattttctctgaaattaccggttgatttcctaactttcctcccctctgctcttactatctgacatcttttgcgttagctatttttttttttgtttttttttaaataaaattaataaaattttattatttaaaaataaatcaaaattatttcgtttatttttcaaattttgttacaaaaattaaggaaaatgtgctcgatgccgttccggagactttattttaaatttgttgatgattataataataatgatatttttaatatttccatgtatatggttaacaattaaaagaaagaataataattttgaataaggttgttcgaggttggggacattaaggtcatttaaatgagaggtaagatagtggaagttacgagaacaaagaaaggcaaacgtgtttgtagctagggagaactttagtcaattttattcattcacgggaaagagacaagtgagttcattgagttcggataaaggccccagacacaacaccacaacacaacaacccaaactaactaaatggatgggcttcttgtagttaatgaaatgaactatttacatctcaaatctagggaaatataagttcaaataattttttttttcttaaaatataaaaaaaagcgatcataaaagtggagatgcgggggatcgaaccccgtgcctctcgcatgcaaagcgagcgctctaccatttgagctacatccccgttgtgcaattctgctacagtaactaataattataatgtttttgtttgattgggaatgttattaaaggaaaatggaaaacagagaaaacagagtgcaacgaggaaatcagaagagacaatattctgataaaagaaaaacaaaatgatgacgacgagtcatggccatggggccagctatgaaacgttgtattttggaatttgcttacaaaagaaaaggacatttcaagtcataacataatccgcccgttttaatgggtccatataaccccagttcctttggtataatcgatttgattcaatgaaactttatttatataatatgattcaaactacgagcctcttcttattataacataaccatttttttctttcaatagaaaaatttatatatttgtcttaacttataatggcttccattgttgcaagctccccaattagtgctatagcaactcttccatcaaataatgccacacccagaggcacagtttgccaacttaagggcttcactaacattgtaaacaatttattattgctaatcttcattggtatgtgtgttatgtaatgtatacttatatatgttgattttaagtattttatgttcagggaggtccagtggttaatgggctaagaattgctcctaaggtcacattcacaaaggcaactgagagattggttttattctcatctaattgcttcaagactagaatttcttgctccattaatgtgagtctacatatatctatttatatgcaccaactaaattaagcttaattattttagaagaacactgtgctcatatatatatacaggctcaaccagagactcttaaaacggttcagagcacaattgccaaacaactctccattgatgaaaatacagtcacaccctcaacaaaatttgctgatttaggggctgattcgcttgacactgtatgtcttttatagtttttgaccctattctcaagtcataataataataatgagccattaattatgtgcttgttttaatactaataatattaataaatgttataagggtctttggattgaaagtattgttgtttgtgacaaatggacaggtcgaaatcatgatggctttggaagagaagtttgacgtgtcaattggagaagcgggagctgagaatatctcaaccgtccaagatgcagctgatctgattgagaaagtgaaggcatccccagcttaattactagaccaaataacacctatatcacaaagcccatcaaggatctctctatgacgatcgattattgtgaatttttccttttcaagtgttttttgtttttgttccttacctaaattgttgtctctttattgattattgaacagtccaaacagaattacaaaaataactatttcccatggagttctctcaaattttttcttctaataaagactaaagtattcagtaatgatatcaaactccacttttgatttgtggtggatgggattggcaggacttcataaacaatattggcaaattagaaagcaatgtggtaacaccacctaaatgggttatcaaaagtacttactgaatacaactaactaacttttccaaagctcttctattgagtttttcattgaaaggggattcaaaccacaacccatgtatatacacatattcaagctaaaatataagcccctgtatgtacaatacaagatgaaagaaaagaaaaacacacacacacaaagaactcgatcggtgatagaaagttatggctatatataaacttactcctctttcccacaaaactcaaacaaaacaacaagtattggtttatcttcaattcttccacggctgaaccaaccgtagacttattattataatatttatattattattaatatatatatgtaca

SEQ ID NO: 186786 - DNA, 2665 bp, Cannabis indica
acaaataaaaaatttaccaaaacaccatttaaaagtgaagtgagacttacccaataatactatatatgtatgtgattgaaaacattagtattggtttaattgaataatgaaactcctatctcatgtaataatagtataatatatagtcatatttatatgtggcttattttgagccacgtctcccaataccatctttttctctcattgtttttggtatgtgacttaacacataactatatataaacacacataatatgtatatacaccatattcataatccaaactatgtgtatttacacacatacacaataccatatataaatttatctcaaaatcatcaaaagaagaaagatcacaacaacaatgatgatttgatgatgatgatgaagatgataacaatggaggagagatcatcaagagtagagaaaaccaattcaactccaacaataatggctgacgactcaactgagataagcatatttgatgctcaaaaatacttcaacgatcttaaccttctaaaccctcctcaaaaacccacttccactcccgccgtcgccgtcgccggcgccgccgtctccggcggcggaggtggcggaaaccgagtttcacctctagccgaaaacatcgccgagccttccagattctcctcagcctcttcctcaatcgatagctataacaatatcaacaataaaactcaccggaactcacagacgatgagaagaacccgatctttccgatcaaccgccaccacacccaccgcctcctccgaagccagctggaacagccaaaccggtctcctctccgctcctcccggatctttatccgtctcattcaaacacccactttcttccgacaaacgcacggcggcccggcgccggcgccgccgttctccggcggagtcaggtggctaaatttaagaagaaagtgtccttgtctctgcaaaaatccgttcaagttaaagaaaatcctgtacggacaatatcggaaagtcatatcccgataccgcaaatagcattaccaccgtcgccgtcgccgtcgccgccgcctgcggcggcggagagattagtacattgtagtattaagtcaacaatggctgagattagatctggtacaattggtaataatactaatttcgaacagaattggggaaatatcaattctcatcatcaccatcatcatcaaatgagaagatcgttgcagagtaataataatggaagatcaaatattgggtttacttttccaattctgaataatcaagcttcatcatcatcatcaacaacaatggcggaattcgaagatccagctagagattcactcgagatattcagcccaccatctcatagtaatcgaatatcattaaataataacactcgtaatttcactttcttaactagtcccacatcgagaatgagaacactcaacgccccctttattaataacaccaccaatggtcaaatcagtaatattacttatgtcgacgtggacgacggagcaagcgatgccagctcagatcttttcgaaatagaaagttttacaactcagcaaacgaccacaactgaatccacaacgaccacagcggctcacccttctatgttccttttcaaccgccaacgacgagattctctcgaagaagccgccgcaatgcggcggttccctccgatctccgctgctttgtatcatccgatttcgggtgtgacggcggctgattatggttacgagcctagtgaagctagcattgattggagtgtgactaccgccgaggggtttgatagagcgagcgtggctaatgcttccgaggctgattttggggaatatttggttgcgacgtcgtcggggcagccgccacatgtggcggcggtggagaagaataggaggaggtcttcgggtaatgggttgttgatgagttgtaggtgtgagaaggcggtgagtgtggggccgggtccgaggccgatgtcgagggttgtgactcggccgagctcttctggtggtggcggtgagcgtggacgagcggtggggcaagggatttcgctttcgtcgagctctactttggccatgtgggcggtgggccagaaaagttgaattttgtcaaattccgagttgtattgaaagagttatggtcaaaatacgagtttttttgtggggctaggtcaagctcgacgagtggtgtctgtggcagtgagcacggacgggttttggggccggggatatcgctttcgttgagctctacattggccatgtgggtgggtcagagagaattagggttttcttttttacaaacatgtagtgtgcatgggtgcatgcatggctaagactctatccagttccctctctttatattgcttggttattatttactatttatttttgttttattcaattttaattctttattttgtttgtaagtagtaatagtagtagtagtagtagacatttttccatgatggtcatgttatgtgttttgtttttttatgttagagtttgtgtttttaatgattttagtttcgattttatgttgggtttgtggaatattcgtgtctgtctgttattaatatttaggaattatttaataacacttggttgctataatacaatttctgtcgatgaatctaacaaaatccctcaattataatgtttctataatggatgagatattatcatgtttttt

SEQ ID NO: 186787 - DNA, 1428 bp, Cannabis indica
gttttgggtatatattcagtacagaactagttccaaccattttacaaagatacaaagtacaaaatttcaaacgaggaatatgaaacacaaccgttagaataataatagatcatcatgattgaaaatgatgttgttgatgatgatgatgaagatgaagataatcaatatgaatttgaatatgatgatgatgaagatgatcaactaataaacaacaatgtgggttttttaaactcatcttccaaacgcattagagaatcagattctaatcactccatttacacttctctcccttcaaaaaggtaaaaaaagaaaagaaaaaacttcatcttttacttttttttgtttttaattttttttctccttttcaagatttccctttttaatatatgctagaaaaaaacaaaaaagtgatatgaaaaaagtccatattccttttttcttattttattattttagtactttttggttttgattcttattttcttttatttataaatagagcaagaagttcttcaagggtgcaatgtaacagggagagaataatatcatcaacaagtaatgagagagtgaggaatccgtactattttgatgattataatagtaagttgttgggtttgggtttgggttgtcatgatcatcatcatcaacctcagtctcagcctcatcagcctcagcagcagttgtttaagggaataataaaagagactcattcctcaccacctttctcactgccacacagtctttacaacctcaatcctttcaaatatgcagtccaagaatctgatttctttaaggtacaactttttttcttttcttattatacatacatatatacatatatacatgtttttgtcttcaaatgggtttttgggttttcctagttttaatctgaccatttatatatatggtgaaaaatgagtacatatgtttatatatatatatatatataaataaatggtcgatcttgtgaattgtgacaataatgaagtataatgtatatctttggcgttaagttattattgttctcaattattcatcaaattcccttttgattttcattttactttttattattattcacttaaaagagaaaactttacaagattcattaaacgtgttaataagactatagtagtgtaaaaatatgtactaataataatgggtaataatcctatgtgactaactatttttcttcttctagtttttttctttttctttttaatgttatagtattttcttgggtttagcaatatttctctacaaacaaatattaatactatagtatactacattcctagaaaatggttggcttgcttgcacagttgattctctgaaaaccttttcattatattctttgtggtccttaacttattattacacttactatacactcttgtaggggacctgtaataacctctctctctctct

SEQ ID NO: 186788 - DNA, 9891 bp, Cannabis indica
taacactgaatgtttagagtctacttttgcatattactaaaaatcactcatagctcattagtgacccgtacattttatgtgggtcactaaatagtggcactaaaatcccaaatagtagtagtgtgtggagctactaccttaggacaaacttctacacttacaagtttttctaggttcatgttggcccaaaccagatgtagtggtgccttggaacaaacaagaataaacataagttcttgaatcgaatgtgaatcattctaggaacaagaggagtggtaagaacccaaatttaattgaacattcgaacaaaaggagaagtcatgaaccaagatattatgagtacactagtttggtagattctcgagagaatatttataaggctacttgaaatatggtccactacaagaagcaatcacctatgtatgaatggggggggggggcacaaaagggaccaaaaaaaagtgttagtaccatggtaatgttggaaaaatcacagatgagtgtgactatttgaaagattaaatagagggattgtttagaaatgatcatttatcctattgggtacggatcccaatcatttatctttgatagggagtggcacacagacaactatttgctacctgacagtagggaaccataaatcctccttagggagtagtttaccctcattctccaaggatacatgcccaaggaattaaaactcttgggatgcaggcccctctagcggtaccaataatgcctaaaaacctaaagcctttccagatcccagaccaaaaatttcatatctgttaggagttgttgcactagcgataggtggtcatgttggaaccatatctggtggcccacacactactgaaagtacaagaaattcttacaatagataccttaatgaatttgatcaagaaggggaaacatgtaaaattatagagactcctatcaaacttcaaggctttaatagagactccttattaccgatggggaagattcaaattctagttacactaaatgggggtctaaccagaagtaatatagcctcttactttaaataatgtaaaattatggtagtagattttcctacaacatacaatgttattctaggatggtcagtcctaaattatattggagccgtgacttccattcgaaacctatgtatgagatttctaagtgacaatggaagcatttgggtagtgaagggaaattaaagaagtgcactgaaatgttacaatgtctcggccatatcagtatttatggttcgagaagggaatcaagaagatctcacaacacccatgcagtcagcgcaagggctaatcaaagaggaagatgagttatatctctaagtgggtgtagaaataataatgtaagcaatggaggaggtggaagaagtatgtattgatgaataagatcctaccaaagtcatcaaggaaggatgaaatctacctctaaccatcaaagaaaagaatgtatccaggtgaagaaaaatcatgatgtactggtgtggagccattctgatatgattggtatcaatccccacataatctaccgttctttaaatgtttgcaaaaatgcagatccaatttctcagataagaacaccattagatcttgtttgagctaaagcaatgaaggcagaagtcgagaaattaacctccatcgaattcctctgagaagccttatatccggtttggttagccaatgcaacctggacgatatgtatagacctcatggacttgaacaaggcttttcaaaaatattgcttcccacttcaaaagattgattagatagtggacgcaaaatttggatacaaattcttgagtttcatggatgcatactcaaggtacaaacagatcaagatgcatgtggcagaccaagagcgtaccagtattcaaatgaacgagggtgtatactatgacattgtaatgccatttggacttgagaatgtcgaagccacatatcaaattctggtgaacaaaatatgttggtaaaattcaaaacatccaaggagcatatcgatcatctagaagaagctttatttgtcatccaaaaatatgggatgaaattgaatcccaaaaattgtcccattggagtttcctcagtgaaattctgggggtttcattgtcagcttttgaggaatagatgtcaatccagagatgattcaagctattttggacatgcctttccccctagaaacataatgtgcatttcattttttattgctctacgtggaagtaacaagtttgaatgtactactaaatgcaaagatgccttcatgcaactaaaagaaaatttaggaaaagctcaaattctatccaaattggttgagggaaaaccattatacccacatttggtcgtgtctgaccatgctatcagtgttgccttagtgcgagaagaaggaaagctataacttctagtgtattatgtaagcaaaaaaattttgggcacgaagtccagatatccaatgattgaaaaactttcatattgcttacttattgcctcacaaaagttaagaccatactttcaggccaatgcaatcatggtactcatgaaccaccctcttcgccaagtgctacggatcccagagtcctttagaagtctactgaaataggtcatcgagctcagtcaatttgatatttcttattaacctagggtttcaattaacggtcaggccttacaagattttattgtcgagtgtacaggaattaacaaaaattttgaagagtcagttctaggacttgaattcttgaaagtgtaagttgacagagcaataaacgaaaaaggttatggagctagaatcaatttcatctctctacaaggacataaactccaaagtgacattaggtttcaatttattgtcttcaacaacaaataaaaacacgaagcaatgattgtaggcccacaattagacaaggatgttgaggtccaaaacattgaactccctattgaatctcaatttatggtaaataaaataaccgaagagtattaaacaaaaggtcagaaaatggccatttacgtatccaaatcttgagatctacttcaaaatttaaagagatatatagtcaaaaaggtccttaaggcccaaaatgctttggtggatatgttgtcaaagctagcaatggacccaaaaatgagcaatacaaactagttcccatagctcacattgttttcccaagcacacaatcactggggtaagtgtgattgataatttctagagagctttcggatggcaaagtcgtagccaagaaaaatcaacaccaagctcacaagtatgtgtttctggatggaagattttaccgatgagggttatcgatatcctatttgaagtatatagacggaactaaaattagtgttgtgattcgtgagatacatgaaggcttctacgaagatcatacattgggacccagactctccaagaagatcatctgtcaagggtacttttggtcaataatgaagaaagattgtatagattaccttcggaactgtgagtagtgccatcatgattataaggattcaagagctccaccaacaaaaataacactaatgaacagtctgtggccttttgttgtttagagaatttatttagtaggctctcttccacttggaaatgaggagttaaatatgcataaacaatgaatacaatcacttcaaaaaaagcattggacttcatcattaaaaacatagtatgtcattacaaactttttcacaagattctatcagataatgggaaacaatttgatggtgatcgattcactaatttctatgtctaacacaaaattgtaaaaaatttctcaaccatggcaagattataggacaatggacaagttgaagttgtaaacagaaattaagcgaatgaatgaaaatgagggctaaaataggggtttaaattgaaaaaattgagcaggatttttaaaccacatagcctgaaggttaaacactgaagggaatactatggatgacagtttaaaaccatcgactataacacgaaagcctactgttttaaattgtcgagatgccttctataaacctgtttccttttttgcttataactcttttaaactgttgggaaaagtacacgagtgttcaaaatcaccaggaatagtccactatagctgactattttaaacactcacttcactttattatgatggtccaacaaaaaaatcaatttaagaaccaacagaaatagtggcttttgcagtagtagacacataaaacaaaatgttatcccattttttcccacctgacgtgggatgaccacgtggccaacatcaatgccatgtgggagtacaactcgccaacaagaaggccaaggcatctactaagcatttgaacaactaagggatccatgtaattaggtgggatgacagaatgaccaaccagccacgtcaagggggctggccagccaccgtggctggccctatgacaagcatggccagccaacctttcacctgggaagattttggtgtgtagctttcatctgtagtcaaacaatgaattgggcctaaacagcccatgaaaatagagagaaactatcatcatcttccctatttttgaggagaaatttagtcatttgcattttattaatttattatgtaaataatagctttatttatctattcttaagggatattcgggatctaagcggtactatataaagagcattggtcaaaccctaaaaccctaagtctcaaaccctaagccttaagctgtaagcatgataactcatctcatctctctctcacatgtccatttctctattctcacttaaaatttggcaactctagttatcacattgtattcttaagagagccacttcagatccaattactataatgatctaagtggtattatctctggtatcaatacaactaaaaggggcgtaggtcattacccgctatcaatacaactatagtatctatttacttttctattctaattgtgtaatacgtggcaaacatccatataaaatctgactccgctgtcggttggccaaatttgacgtcaataatttggtgatttcattgagagtgagttgttaatttatctgatcaaacgtcatggttaacataataagaagtctagcaatgacgtctgcctcctcaggtcttcctcaagatcctatggtggacgatcctgatgatcgtgttctagtcataactagaatctccacaaatcctataaatttgaccacttctaccacatcggcaggcaccacaaacctggccaccatagatggcaggtcaacataaccatttttctgggtctaaacaatcaacccatacctcctagggatgaccctccactagcacgtcccattgaaggaataacccacattaagcgacccccaggtattacaactagatttggtccccaatattatgctatcggaatgagcctaagaatatgcgagccctatgtagacttaggagaagatctcgagttagccagagttagagaagccatctatcaagtcagttaaactgaagaaccacgcgctgttggttgcgatgtatttgcacaatcaagatgcaaatttttaagatggatggatgaacaagagtacatcctctgatctcgaccagggaaagctggaccaccgtaacatagaagctagtgaccttataaggtggttcaatgagaaattttttggaagaggttaagatctcataagagatactctctaagagagactagtcaacaagtcggggatgttttattgacagactgtccaactaggttcctcatagaaaaagaatagaccttcccctacccgaaggacgataagtcttgcgacgaaggtctagtggtgagaatagcaagatctcggcaacaagcagtttggggggccggcttggatcttaagctctacaacacccccattatgtcaacctctggcgggccaggcccctagtggtacacctttgggcagctagcgaggtgaactttcatctcagggactttgggagcaagtaacatagaggtccatctttcactggctaggtctgggaattcgtcgaaaacaccgaagacaacaacttaagtagtgagtcttgtcactttagatatctagatccaccaaactctagcaattggtctgatctaccatctatcaaatcacatgctgcaccatccaatcaagggagaaatggtggccagaccatacctagcacattgctggtcgaccatcaagagctactcataatggggtgggccagccgaggccagtctagccttccttgagtggccagccaaaccctaacacattcaagactatagcccattcgagaagggccaatcagctaagtccctatgctaattgatccttctatgcaagcacaattggaccaaataagggacatgatcaaggtcctagcttgggaaaaaccttcatacattgaagtagataggtgaaggggatcaccattctcggcatatattaattccttgcccttgcccaagttcaacatgtcggtatggaaaatgtatactagaagagaagacccactgacacaaatcaaatattttgagatgcaacttgatctctagaaaattacaggtgatgtgcggtgtcataaattcccaaaaaccctgtaaaacacaacttagcaatggtactttaagctggctctaggaggatttatttcttggaaagaattttcttgagaattctaaacatagttctcatccttgaggctgataccaatgtagctggaagaccttgtcaaggtcaaccaacgacaatgagaacttttacaggattacatccaaaggttcatggccgaagccaccaaggtcaaagacctaatagaagaaggctggtatacaaccatattggggggcatccttcaattgagtgacttctggaaatatatccagaggatgtcaacaaacaacatgaaggagtaccatgatagagctgacgactttatcaagctggaggaagctgtctcaaggcaccctgcagccccacgactttctatagacgtatgtaggtgctagtacttgtacacaaacttcttgtggcaagaacacttgggtaagcgcaacaacaatagctctggaagaaatattggcaataggagaagtacaacacttctcccattccataaaatgaaaaagataacgaggaggagttcacctactttacattttagatggagaaacctaagaccattttcatggccactcagggaattgtcccgtacaagaagccccacaaaagggagatgagcaagagggacatgttgaagctctgctaattcagaatgactttagccatgacactaacaagtgttagaatttgaggagggagatggaattccatatatggttgaacaatccccactttcattattatgtgcagaacgaccaaactcaggtacaaggtgcccagaatgtagaccttatgccacctccagtggcaggttatttagaggtaattatagaaggaccccacatcgtaggtgagactagcaaggctagggaatgctatgctcaaacacttcatcatgagcataaaatttatatcctaggatcaaagagaggggctcaaagcaaccaaagctcagagagcccactatctctttcactaaaggggatactactcaagttagtttcttgcataatgaccccctagtcattactacacaaatcgggaatataactgtcgcaagatgcatggtggagaatagaccctcctcaaatgttcttttcaaatcaacatatgaaaagatggggctccaactaaccgatttttcaccccacactcaagtaatgtatggcttctttggccaaggcattgcacccatagggtacattcgattgcctttgacagttagagatccaacagctaggactctgatggtgcagttcgttgtaatagacgtaccctcagcttataatgccatgataggtcgaccaaccctgtatgacctaaaagcggtgacaaccatctacgacctttgtctgaaattcacatcaaggcatggagtaggatgtttgaggggagaccaatagtctgcccatcattgttacaacttggccttgtgcaaagccaagaatgagaagatgcttgccaagagctatgaagaaaagcccagcaaagggcagttaagtccagcccaaagtagggacacaaccatagatcttcactttagggatcctacacatagctttagacttgtaaaagagctggaggaagtggaggttaatcccacttctctagcaagaagactaaagatgagggaaggtttaacaccagaaataaaattagcactgataaaatttctaagggcaaacctgaacctctttgcattgtcacatgtagacatggcctgaatagacccttatgttattactcatgccctcaacattgatcgaaacttctgactcgtacaacaaaaaggaggttgttttacaaggaacatgcccaagtgctcaaagatgaggtcgaaaggctacattattgtgatttcatcaccaaggcattctatccactttgggtatttaaccctctatttgtgccctaaccaaaaaaaaagtggagagtgtgcatagacttcaacaacttgaactaatcatgtccaaaggatagctatcctcttccaagaattgactagttggtggaagccacaactagccttgaaatcctaagtttcatggacgcgtacttagattacaaccagatcaagatggatttgccagatcaagagtacacaagcttgatgatacacttaggcctatactgctaaaaagccatgccctttgggctgaacaatgtaagggccacctactagaggcatatcaacaaaatgttcaaagatctcattggccgcaatatggaggtgtatgtggacgacatgctagtcaagtccaaaaagtcttgggggcatgtggaagatctaaacgaatggtttaagatcctccataagtacaacataaagctcaaccccctcaaatgttctttcgaagtaggcttaggttaattccattgattcatattcaatgccaagggaatagaagcaaacccagacaagatccaagccctttcgaacatgaagtcaccaacaaccatcaaggaagtacaaagcttgattggatgcattactgcactaagcagatttgtatccaaatctatggacaagtgtgtacccttcttcaacattctcaaagggaacaaaaacttcgagttgacagaggagtgtgaaaaatcattccaatagctaaaaaaacaattttctcaaccacgtgtcttttcaaaacctttggataatgaagagctaggcgtgtacctagctgtcacaaaacatgttccgagtgcaatctcaacaagagaggaagatgacatacaacaccttgtatactacatccacaagaaacttatctacgctaaaattcgatacctactcatggaaaagctgacctacaacttgctcttggcatccagaaagttgacgccatacttctaagcacaccaaataaaggtgtaaaccgatcaaccatttcagtaggtttcacaaaaacctgaagcatctggccgattactcaagtgggccatttaacttggccaattcaatatcacattcaacctagaatggcaataaattttcaagcccttgcagattttgtggttgaatgtacaaacacatctcttaagatatctcaagattcaagagaaaatccagagccaaagaagaagtgagagccagagcagcaataaaaacctaaagaatcaacatggaaactacatgttgatggaagttacattgaccaattgtccaatgcaggcattgcccacataacacttggggggaaatagctgcacgaagctagagtagcttaattccaaactagaaccttgcctaaaaaaaggaataaggcaaaaaaaatgagaagaaag

SEQ ID NO: 186789 - DNA, 7720 bp, Cannabis indica
gacactttttattattaattgaatttgatttttttagggtcaaaaataatataaattttaattatctcataaaaaacttggttaaatccatttattgaattagtaatattttattattaaataaattatgtgaaatctaatatataattctatcaataatgacataacaccttagattagattgaaggctaaaaaaattattcataaaaagaaaacaataaatatcctaatatctaattataataatagtaaaataatataaaataacaaataaaaacatgtatgagaactctttgtatgcactattgagaaaccgacgtcttagaaaagtgatggatgacgaaatttctgtagtcactcgtttctcgataaacacccgcatagtcaaactctttcgttctttcaactctgtttgtgtcatcctagtcgcagtcttcgagagcatgcacaacatggtgtcataatttattagcgtcatctttatattctgatcttcgtcctcttctatgttacaatagtagggattgttccagtacagagtatttaactgaaaagggattttgacacgggaaagcatcaagcgaaatagcatgagcgaagaatctgacgaatcaaattcgtgcaaagggtaattgaactcgttagttgtgaggtgatcgatgatcgagttgttttgatcactagttcgtcccatgaccatgaatttgatggtgaggattggatttggatcatgatgatcataatcttggtggtgatgatcatcataaatgttttcagtgtaaacgaaaactaattgagaggtttctttattattaagaattggttttgccataattaatatagcaagtatattaataagtatatactatatcgatgtgtataaatctattaatatatatataggcatgcatacataagtttataagtttatgtagttctaatttgattagttataggtttttcattaattatatattagaattagattataaattttaaaatcacatttataattatatatgaacaaaatttaaatttaaattatcgctaaaaaaggaaattaaattaaatttaaatcccatatattataaattaaaaaatcttttcacataaataaataaaataaggtaaaatttcttaataatttttttttatctcttgaccaaatttaaaaataaaaaataaattaaaacatcttttcacataaacggtaataaattaacaattatatgatatatcaataagagtataaaatttctttacacacctctttcattatggtattttaacactaattaatcactatattaaagataaaaacatttgtacaatttatcttagtaattttattttttcggtattttcatgctaggtgcgtagaccttaagactaaattcaacggcacgacgtgttgtctctagatttgatggagtgtaggcaaattttaaacatgagcctatttaaagaaaattttaaactatcttttagcaaccaaaacaaaaaaaaaaatcttacaagaaaaagaaactacgggggcctcttgagctgagaagctctgaaaagagattggaggaggcctcttgacctgagaagttctatgaaacggtcctaaaaagatcttaaaagaaaaagagtatgagagaggcctcttaggcaacagtcccgaccctagccaccctaccctaaagatggcgagctaaattggtatttcatgaaagaccaaatgtcctcctagctagggcacattacagtatttttttaattactgtattaatttttactaatcaaagaattttaacatcaaagtgtgtttagtaaaattttcgtaataattaaaactttagcgaacatatattatatttgtaaaacatttataatttgggaacattatatgtttttgatgctctttgaaacttttgtatagagatactctgtgcattttggcactgataggttgtaagaaatttattgatgtaacactaacgtgacgttaatacttaaataagaaaaatatattaaaaaatcaaaatacattgaaagacattattttcacaaatttgacatttgtcttgtttttgtttcccctttaaaaggccatgtgttactttacttcacaacaaaaccttaaaaattgcagagtaaaaaaaggcccaacaatggtgaatgtctctctctccaatgacaaacttccccaatttttcaaagtcttcatccccaaattcagttctaagcacatggtattaactattaactctattcttcttttcttttctaaatttattaatattcataatattattttccccttcatttctaagatccctaagaaaaacaatgaataaagcttctaattaggtgaacaattgaaaatcaaattcatcctaataaaaaccaataaatacatgtaattttttttggtggatatgatttatttttgataaagttttaaattttaacttcatttaataaatttggtattaatctctacactcttctttccttttctaaatttattaatatattttgccttcaagatctctaataagaaaagcaatgaataaaacttctaaggtgaaaataaaaaatatatttaatttggtgggtatgatttatttttgataaagttacaaactttaacttaatttaataaatttggtggtattattattgtagttgatcccaccagattttgttcagagattcatttcaagagttccaaagaaagtaattataagacacacaaatgggaaatgttgggtggtagctttgggtatgagtttggaaaaagatttgtactttgagaatggttgggaagaatttgttagagaccaaatgctcaattatggggattctcttgtgttcaaatatcatgggcattctttatttgaggttgatatttttggtcaaaatggatgcaagaaaggaattggtgtaccttctaaaatgatgggtaaaaaggaagaagagacattgaagaaggaagagcttttagactcttacatgcatgccacaatgaggagattggcattaatggatcaacaaagaaatcaagtattctttgtattttatttgcaaaattatctttttcttttttttctttttgtgtgtttggtaatgagtaatcccattgaaccctcgaagatgttcgaaaatctcgaaatgatcttttagttccggggaaaatttgcaaaactctctttcaattgagaattgaatggagttttacgtatttcgactgaagaatctaatagaacagaatcacactcaaattacacataatttgtacacatagtgatgtgtatttaattttagccatatataagtggggattatatcacttttaattgtatggttgagactaattatacattattatgtgaaaaaaaaatatatgtgtaatttgagtgtgtttctaacattactcgtttggtgaaaatgtattctaaattttaaaggtgattggtggaatagactttttgttatgttactttacaaaatgattttatttcgataatttttttttgtaaaataacctcttcaaatttcgaccgaagttgaagattattttgcaaagaactatcgaaaaaatgttatttcataaaatgactttgaaaataatgtgtgaattgctcttcttttaaatagtaatttgtataataggcgcattttgataattatttgcaaatagcatttttccgattttcaaatgataagaaagactattttataaggctttgtcccctttgatcttgttaaatgttatttgaagttgtttagtttgcaggttcatctacaaaacatgttccaatgaagaagaatccatgttttgtagcaactattggaaattcaaaaatccactcatacatgttggtaagtcttttgctcttgtcttatattgttgtttttgttttacttctatgttttctatcttaagctctaaatcttaactttatcaagaacccttatctaaattcctatttgcaaagacagggcgacactgtatagaagaccgttttgtaaattaacaaaatgggcacttttttcggttttctatcgccattttttttggtattgttgtaacctatatgattcactatagtttattacaatttcagtacattcctcaaccagtgcacaatggagtcaagttcaagcctaatacgaagcttcgatatcacaacggcaaattatggcctgtgaggatctcgaactggaaagatggccgttgttttctagcagctggttggagaagatttcgagaagagaatgatttaaaggcaaacgataaatatgtgtttgagcttgttcttgccaaagaaaatgaatgtgaagaaatcaaagttacctgccaatcaaaggtgcaataacacaagtaaaggaagccatgaatttactctacaagctaataaccaaaaactctcttttgagacatgtgtggtgtttttgttcatgtagttttgaagtaatccttcaaaaataggtactaaaagataagtgacttttgtttgctagatagttgtgtaatctatgtagtaagaaatattgagtatgttaatgcaaaatcataagatagggttttacgagagttagcgatttttcattgtagtttcttatatgacactatgctttagcaattcagtactagtacttaggggtggcaattcaagtcacaatccgtgggtttgacacgaacaagactcaagattttacgggttcgacagaacacgaaaattattcaggtcgtgttttataaatttttcatatcacgagtcatgtcaactctctaaaataaatttaagaatttcacacgacgcgattgacaaaattaacaatttaactacaacccgccaacacgacatcacacgaaatttctttgaattgtattcatgtcttacaaatttttgtgtcacggtatcgtgtttgatcgtgtttgggtcacacaacacgccgacacgaattatcacccctacaagtactatcaaatcggttataaagtgttgacaaaagtaaatgcaatattcaacaagacactactacaaatatcattgtatttttggcattatataaatgtgactacaagagaactatgtccaaagtgttaatgcattttcagaggaatgcatttgcacacaaacaaatcaattgtgaattaatgtttccttcaccaattctattctttcattagatacataagatttaggcaagaacaaaccatgtaaaagtcctcctcctgagatgggaaagatagaacataatgggctaatgaagaagaaagctttaccaattgtacccagttagttctgcaacaccaatcttctagtatttagtaaacatccatttgtcgaactgttgttcgaactctaaaatcgggagctccaaatactttagtggagcatttcgtatacatgggatccttatttttaattgaaacacttctattttccatattcgctgttatttcacttcatcggtttgtggttgcgatgatgaaaacactgcaaaccgaatctacatttacttgaatgcatacctaaccgaaaattgctacgtacaaataaggaaagacgcagagagagagagagtagtatcttacctaaaccaattataatagatttttactctttgccactcatctatcagttgacatggcatcctcgattctttgtattacaacgcttagactgcaacgactttccagagctttaacagcagcccggtgtgcatgtttatgccacttcaacagattgtatgattgtagaagagaccatcttgcttgattcgacatcttcccatgacaaagatacaaacaagtaataagattttttaacaaaagaacatggaccgagtgaatatcaatcgagagaattacctcagctacagataacgggggttgcagaagagtactagtgcgcctaaacagattttcatcattttctccaccttcggcgtcaccatatataagagcttcagcagcaatgccagcaaaaagcaccatacagtatctaatttaatttatgaacacaagcaataattaagtaacttgtgttaatgagattaggagattaatcattgatttgtctaatcgaatttccaaaagttttttaaaggatccattgaaataattatacaaccaaaaggtaaataaatggcaaaacataaccaatcttaccagaattaaacccacctgtcaaaggcggtaccatccagtcgtccttcggttaggtcattagacattttctcgtcccaaaactgagttccggcctacacattaacttcaatgttagctcaaacacccattctaacatcacagtatacattttaggtttcattttaatttttctttcttgttttcgattaaagaacatcatagactgcatgatgtaacatcacagaatacatttataatacacacaagaatcaattacctgtccttgaatgcccatttgcattgcaacaatcgggtctagaatgaccccacgaatcggacaacccatcaggtaagctgcaattcaacgagaacaccgataattagctcgtttacaaggaaacaaatgtagttcttttgtttttttgagaaactatgggtcataaccagcacttaaatataatttatgttaaattggtatttttcgacgaattgtaaaatcttaactagggcttaccgattaggagatgcccggcttcatgaacgagtatcctacgtctatgcggaggccaataacttgacaattgagctaaacaacaaccaccaaggaatgtagaatctacaaatgctagccccaatactgctgcaaggttcggcctaaaatcaatgccttgataaagaagaaaagatgtcccgccaaggaaagcgatcaaagtaagctgggaagttccagaaagaccccacttctttggagcgaatttggacactggataaaaggattaaaaagtacagatgtaagattgtttaaaggaaaaccataaattaatgttacaaaatgtaagctataaataaaataaacaaataggagatgggtgagataacaactgacaagacaagcatccctctagatgcttcccgaaaaacaacatcagaaacgaaatggaaagacattctcatgttatccatcacttccgagttccaacaaaacaagcaaagacatggaagtcttttacattaaaaattgatgtaaatatacatacagaactatgaaactatctaagaaaactacacaattagccagctaaatacagctattaaaatgtgtaacaaaacactccccctcgagcaggatcatagatagtaatcatgtctagtttgttacatagataatcaaccagaaccgcttagaggttttgttaagatatcgcctatttgtaagtgaactatgaactccgaactcgaccatgctatttcattaacagccacaaagtcaagtataaaccctctcaagaaaagagcttaaatcaattaactcaaaattcaaaattctatggtggaagtcaaaaaattattctaacaaaatcataactccaaaaaaaagtcaatcagtgtataaagaaaaggattattagaaaccttctaaaccagttgaagtcttcaatacagttggagtaacattccttggtccctctaaaactgcaaaaaatgaaaacatagaaaaagaaagaaaaaacaacaatgttaaataattcattaaagggttaacaaaattagattcattcaagagtaaacata

SEQ ID NO: 186790 - DNA, 4209 bp, Cannabis indica
catactatgtttttgatgacaaatccaaggccttttttgaagtgactgcattcattggttctatttcgacccactttgtgaagtaatcaatagcaaaaaatagcgtattaactccttctttccaagttggaagagagccaactaagtcaattctctaaacagtgaaaggacacagattgttcattagggttacttctgttggtggggctttgagatttttagaatattgttggcattgctcacactttcagacgcattctacacaatccttctttgttgtgggccagaattatccaattggatgattttctaggataagcttagtccagatgtatattctccacagaatccttcatatatttcatgaataaagagcttatttcggttccaactatccacctcatatattgtattgataacccttatttgtataatctttcatctagaatcacatatctgggagcatgatactgaatttttctagaactacacctatcttctagaagctcctgagaacttaggagcttgtatatagggcatataatggaggttgaatgatcaatgacacttacccctagtgaatatttactttgaacaacaaggtgggctatgggaactagtccatattgctcaatctttagatccactgctagttttgccagcatgtccgccaaggcatttcgttcgtagaagaattgtttaacaatatatcttttcaaacattgaagaaactctcaagatctacatatgtaactaggcattttcaaacctttcgtttggtactctttggatatctgatttaccaccaattgagaaacgttgtagagttcaatgttctgagctccaacttcttttgccaattgctagcctacaatcattgcttcatgtgttgcttcattgttgtaggcaatgaattcaaattgtatggcactttggagttgatgcccatacagagaaataaggatgattctggctctagaacctttcttatttgattatctatcaacaaaaccttccagacttctagttttgaaatggctccttcaggattgttattaattctagtaaattccacaatgaagtatgctaaagcttggcctttgattgagtctctcgattgataatgaatgtcaaattagatgagcttcatagcccattccaattatcttctagtggactccaacttctgtaacacttggcaaagtgggtgatttatgagtaccttgattgcatgggcctaaacgtatggtattatcttccacaggtcaagtaagcaataggaaagtttctctatcataaggtatttagactccacgctcatcaatctcttgcttacgtaatacactggaagttatacatttccttcttctcacactaatgcgacactgatggtatgatcggacacaaccaagcactggtacaatagttctcccttagccggtttgggtagtattagagccttttataaatgttctttcagtttatggaaggcatcttcataattgggaatccatgaaaacttattacttcagcacaaaacattataaaaaggaatgcatttgttagatgagtttgaaacaaacctgatgagcgctccattccttccaccagacttttctagatctttatgtttccagagggaagggatatcaagaaaggcttggatcttctctagatttgcttgaattcctttagagctgacaatgaaccctacaaatttccctgaggaaaccctaaaggtacatttttttaggattcatatatgttccgtacttccgaatggtagaaaaagcctctttcagatcatcactatgctctttggaggtctcttacttgactagcatggtatccacattgatttccatattcttccccaaaacatctttaaacattttgtactcctgacactgatttcttgctccaaaattcttaagcccaaacgacattacaacatagcagtacacaactttgtcaatttcggaagctagtgtgttcttgatccgctacatgcatattgattttttttatagttggagtatgcatccataaagtatgaaagctcatatctgaacatcatatccaccatctgatcgatatggggaagtgggaacctgtcttttgggcagcctttgtttaattgtatgaagtcagtgcacatcctccaagttccatttggctttggaatcaacactaaattggctaaccaaactggatataaagcttcccagtggaacactatggaggttagtttttcaactttttcctttactaaatcaacctaaaaaagatctaatggtcttctttcatgatggattggatatacattctcatcgatgttcagaaaatggcaaatcatgtggggacagattccagtcatgtcagaatggccccatgccatgacatcattatttttcttttttgtggatacaaatttttcttttatggtcaaaggtagatttcttcctgccttgatgactttggtaggatctttttcatcaccatacacttcttttacctcttccattggttcgcttattctttctaacccactcaggggtctaattcatcttcctcctaaattacccctagtgctggctaggtaagtgctttgaaagcttcttcttgatctttttcccgaacagcaaggactgttttggctgacatagtatacactttgttgcactttttcgatcaccctttacgactttgatacttccattatcactaaggaatttcatccatagattctgaattgaagttacagctctgaaatcaactaggatttgacgtcctagaataacattgtaggccgtgggacaatccactactacaaatatgtagtatttgaaggtggatgttgtgcttccgactactcccctatttaacgtggttggaagctaaatttttccccattggcagtaaggaatctccatcaaaaccttagatttaaattagacaagtaatcaaattagttttaactaatccgattacgtggaaggaagttttgaaaagaatgttgaccaaacttatattgtccaccagaattctggacacgcttttcttagaaatctaggcttcaattaccaatggatcattatgagagaaatgcacacacttggtatcttcttcggtgaaagtgattggaagatttgtcattcatggatgttgggcaagagtttgaacaagagcacatgcttcaccttcttgatctagctcattgaggtatatcttccgagcatttctggtacttttagcaatgtgtgggtctctgaatatggttactatgttgccatctactgtaggcagagcaacacctggtagatacagattacctggtcttagagcctaaataggcttaggtacctaggcatttcatagcccctaaagggccttcatgctaggatttataattccttgggcatgtattcctggaacatggggaaacctactccttgaggaggatttatggttcccttctatctaggagcaaaaagttgcatgtaagccacaccctatctgaggtaaataattgggatctatacctagttggataattaaccattcctaaccagtccttctatttcatctttagataatcacactcatttttagtgtgcctaacatcatcgtggtgttcacatctttttttttatccctattatgccttcaacctttgtatatacgaaatggcgtcttgcaatgaaccatgttgcaagtttctctgtaaacattttctcgagtgtccaccaagctggtatactcagaatatcttacctcatgactcttccacttcattggagcttcactctgacttgtattcttaatacttcttttgttcttagaatgactcacatttgattccagaacatccatttattgaattaattttctaggagtgacacgacatctggtttatgccaccccaaagctagaaaaactagtctttgtggaagtttgtcctaaaatactggatccatacactattgcagttgtgaatacacttttgtgaggagctatagtttgagcagaatatttgggagccagggttaaactgctgacagtggttgatggtggaggaggtactccataagcacggacataagtctcttccatatgtattaagctttgagctctcggcaagaaatctaacaatgtatcaaatctttttctttgcaattctccaacagcaagtattcggtggatatccct

SEQ ID NO: 186791 - DNA, 3594 bp, Cannabis indica
ctaaaaacttaaaaaaaaataaaaaaaaaaaataaaaaaaaaaaagtacatgatcatcacctgctaaattgccaccatattatacgaaaccaaaaccaactagtgttcccgaacccttttccttttcctttttttttcccactagtgctatggccatagattcctagacttgaaagttacaattaattaagttggcaggcattatgatcacaaatcaaataggaattgaataaagttttacaagccatatggatttcattactgatcaattttacaataatctcatcttaaagcaaaccaaattaactatattattaacaatgttaccacattttcaataataataataataaactatattaaatgcacttatgaataggataggaggaagaggatcagcctactaaaagctttagttaagtagttctttttttttattatttataatagaagaacaaatgtatggtttttatataggctattccaccgtatctattttgttgctgagtagaagcctattcgtatctctgaaggcacaaatacatacattgtattctgcgagtgtagaatcaaataataagtcaagtttagtaaaaagagagtagtagctaggagaaaatgttataaatgtattttatttagtatatatacatatttatctacgtatgtagggaagcagagaagatagtcacaatcccaacagaaacacacaacacacaacacaaaaattcttaatcaatccaaaaactagaaaacaaaaactcaaacagaacccccatcgatctcattctcatcacactttctctctctcaattattattctacatttttatttttatttttatttttatttttccatcccaaaaccacgccgcataaataaatcccccattagaccaccccctcaactcaaaccctcataaaaacctctctcccatatatcttcaccctcaaataccaaagagaaaaaccaaactagacccaacccgaatattatggtgacaatgttactaaccttacaaactcctcctttcataacaccaataataatagctctatttctagtcctctactctaccaccacctgcgccgccactttctctcatcccgatttccaacacctagacgttaaacagacactctccgaactaagctctgataacctcatttctccttctgccgccgaaagtaacgtatccgagtaccaatacgaagctcttcatgccgaaaccggcggaggaaagtggaagcttaagcttatccatagagataagctcgtgtcgttaacatcttccacttatgaaaatgaaaatgaaattgaaagtgatcgtcattacaatcggactaacaatagcggtcatcgtactcatagccaccttttccatcaacgtatgaagagagacgctcaaagagtagctaccctactcagccgactaaccaatacgactaccaccaccaaaggttccgacacgaaatacgaggtggatgatttcggttcggatgtggtgtcgggcatgaaccaagggagtggagagtacttcattcggatcggagttgggtctccggccaggagtcaatacgtggtgattgactcaggtagtgatattgtgtgggtccaatgccagccttgcaaccagtgttaccaccaaaccgacccagtattcgacccggcttactcagctacctacaccggcgtctcgtgcagctccgccgtgtgcgatcggctagagaacgccggttgccacgcgggtcggtgccggtacgaggtttcatacggtgatgggtcctacacgaaaggtactctggccattgagactctcactttgggtcgagccgtgattaagaacgtggcaatcgggtgtgggcatatgaaccagggcatgttcgtcggggcggctggtcttttgggcattggtggtgggtccatgtcgtttgtgggccagctaggcggacagactggcggagcatttagttactgtttggtgagtcgtggtaccgactcacccgggtcactcgagttcgggcgtggagcattgcccgtgggcgcatcatgggtccccttggttcggaacccacgtgccacgagcttctactacataggtctcgtgggtcttggagtcggaggggttcgaattcccatttcagaggatactttcaagttgacagatacgggtacggtggggttgttatggacaccggaaccgccgtgacaaggtttcccacggcggcttacgaggcttttcgcgacgcttttattcaacaaccgggaacctgccacggtcgtctggggtatcgatatttgacacgtgttatgacttgtatgggttcgtttcggttcgggtacccaccatatcattttacttgtccagtgggcccatcttgaccttgccagctaggaattttttgatcccggtggatgactcgggcactttctgtttcgcatttgctccaacaccagctgaattatccattatagggaatattcagcaagagggtattcaaatttccttcgatggagctaatgggtttgtgggatttcggtcccaatgtgtgttagagtaagtataactataactataaatatataaattttgttagttttagttaaattaaatcctcatatattattactatttttcgttttagctagtttactatattcttaggtgtatttccttgaatatataataagggttctttcttgattgtaattatggattaaagtagttcttttttcacttgatgagaaagtaatgtaaaagaaatattatgtaactattatgatatatcatgactttgagatggaaataaagcaaagtttaaagcttaaccaaagggaaggaggcatcgtgtaaaatttaaagagtcaaaccttacctgagaaaattaagaacggtcaaaagaatcaacaaaaaaggtgaagaaataataataataataataataaaagtaagtatttagaacaacctttttttttccagtaacacgaggatccaagagaacccttttatcactaagtagaaatattttccatgactctgtctgacaatacacatttgttcattgcccaataaacttctttattcttttgaaataaatttaaataaaaacaaataatatttttttttcacttcatattatcctcaacagggaagagaatatctctctttatctactctagggggccactgtggggtttgaatcattagagaagggagccaccaccattgtagacatgtgaagccatcagtaatggtgtcttggtcttggcttggcatgacctaagttggagtgcgttcaagcaatgacttttaacaaaggcctgtttttgctttttgtttttccctcttttgatagattttgatatttagaagggttacaggttacttcccttttccattttgtataaatgtttttcatggtgatgttttttaaacttacaacattaattatctttgtaaatttttaaaagattacacgtttacagtatcaaaaataagcttaatttttttttaaaactacttgaggctgattataggagagtaggatcgtaggtgtgtgttgggggtcctgagttcgagtctaagattatac

SEQ ID NO: 186792 - DNA, 885 bp, Cannabis indica
tttttttaaaaaaaaagtaaacagccttattaagaacaaaagccattgtagaaactcaacaactgtaagtttgtttatgttcagcataccagcttggggtgtgcctaaggcaagattagtttctcccagccaagatattggctgatcctcaccataagaattcaaattatcttcaatgtttaacatatccaatgaaaattgtgatagattagcagagttgcctgccaactttgttgacttgacaatgacttgaggagcattctgtcctctttgagcccgataaactctatctttttccaccatatcagctaccttttgattacataaatcaggccccgagtttataagatcatacacatgattccaaaacaagttaggtgttagaccccttgaccagctttcttcatcatccccagcaccagctatataattccagctatactctgagctagttctaatttgagcatatccagtagagaaagaggcagaaacaagtatgatgggtgtgaaatcccatgaatcatggtctggtacttcattcaaccagatcactgatttctgggatatccatagagggcgcaatggttttttcaagcaagccgcaagagctgctatatcagctccactttcctccaactgtttggtccactcctctaagcgaccctcaattgaagatctctcagttttggaaatccacaggggaagatgcaatgaacaatcccaatcaatagaggcatgttttatgtcctgagcactttcactggacatacttgaattctgcatccaaaacaaatacagaaaacgaagaaaatgattatttataagcacaaaaagaggaaagccataatcaatattgaaaggaaaattaaatatcaaactctatct

SEQ ID NO: 186793 - DNA, 3801 bp, Cannabis indica
gtgttaagttagagagtggtaaggtggtaagattttggtttaggaatgctctccataagctctcacactctcatgctttgatactagaattcgtggtgattcaagataactcacaatcaagcaatgctcaatattaatgtatatttttgtataatttaatgctttaaataaaattggatcttggttgtgataaatgcaattctataaacttatgtactttcgggagcctgaatttgagggggagtactagaaggaaattcaaactctcaactatgatgaaaatgataaccaagatgttgtcaacttggattcaagtggtatcatattggatcaaagtggtgatgacacaaacggatcaaaatcaggaaatgtgtgatttttttaatttttaaaaaataataattatatatatcataaatattatttaatttcgtatattattattttttttaaaaaaaaagaatcatatagtttatttattttcaaatatctagttttattgaatattatttaacattattttctatttaaaaaattgaaaaattataaatttattaaagaatatgttataatccatttattgttgttttcataatgtacatgaattttcaaaatattatatatatatatatatattttaatattattttatttaaattttataaatatttattttatttgtgaatataagtattatttactatttgttgactcaaaatttgatcaattagtagcggagctgtatttatgatagacaatcaccacgtgtcaataagaacaataaatgataaaagagaaataaaaatttatagaggttcaactcctttgtttagtgggaaatggcctactctcccttttagttgtattgatatgatagataataccactccgatcacaagtgttgtaggttctaggatggctctctttgaattacaatagtgagaatgatgctagacacatcaagaactcatcacatcaagaactgaagagttcttatggaggacttatgagaagatgtgacttagtgttttgtatgatgcaagtggcgtgtgggagagagaagtagagagtgcaagtgttctagggtttccagagttagaacttagaactcatgaattagaacttagccctttaggtttagcctagtgctctttatatatgagagtatataggagagaggttacagaagatctaagccaaagtaggttgatatcccttaaaatgaggagatatcacctatttgttgcgtattaaatatataagaaaataacctattaattattcctaaagaatagataaatatctgaagttgaacccctatttttgtgggttgttgaagccaactcgtagctgagagtatctgtccaagttgaaagctgcaaagacaccaaaagtgtctgccagaagagaagctggccgacctaccatttgttggaggctggccggcctatgctgtaccatggtcggctaggtattgctcctgcagccttaggatgtgtctgccagctttctgtgcctgccagcttttccatgtgcctgcgagctttggtacgtgttggccagtcttagtatgtgttggctagccttagtatgtgttggccaaccttaataactttattgtacaactttccttgtaaaagtcaggcttccttggtcgaacaagcctttcttggtgtgatagccttattggccaaccagcttgtgctcaaaccctggccgacctataactttcctctggccggtctatgaactccccttggccggctagacatggttgtacaaacttcttgacgatttgcttaactcctttcacttgttgcttgacggttttgccatggtaaggaaactttgtcctgctattgataaagctgtattccacgttcctcaatcttgacttatgtggacatgctacattaggtagacaaaatttggaataacattattattttaattattaaaatatttatattaaaaaattatttataccgattttgtcctatacgacaacaaatatagtataatattaaaataatccaactcaacttaatctaatcttaattaataatcaaatcatgtatactaaacgagacattttcacattaatttttaggttactcaaatcaaattgagagttccattactttttatatttttatttctgttcatttgtctaattttcaggagtacatattgataactatttacaaacagcacataaattagcttaatatttttttaggctacacaataagtaattttggatggaaaagatcctccaccatttgtaaacacttccatttcaataatttaatgatacaattttttcttaaaaatgaaatgcgaaccttagaattttcacaaaattgtccctcccatagtctcatctgactctatttctatcttccctcacaagccttctctctctgtatataaataaatgattaaggataatcccataaaatataatttttgaggcaaaaataatgctttattattgcttaatgatggttctatgaaaaattgattttgagacaatagataatgttagcgatgcttaacgatagtcctttaaaacgtgcttataacaacaaaaaaaatgtcaaatcaatgcaaaacgataattttgtaatgattagcgatgatttgcgataaaatttgatgaaaaattaatccagttgatatcattatttcccgagtcttaccaaaaacaaatattattttctttcttaaaaaacatatatgagaatgtatttcctctaatacatgaattacaatttattttttttaaaaaaaaatatgaattacattttacatttttattcccatttccaagccaataaacggccaccataccaaacaacgtcctaatggcctaaaatttctaccaaagttggattgagaaactgacgcatgatgattcatgcacaaacaaaataattaaattagacgcatgatgattcatgtacaaacaaaataattaaattagtccagctacaaattcaaattattataatcttataaactccttcaaataaataatatgtttttataagttgtaataatgtcaacacaatttgatagatttcagaagagaactatttatgtaagataaaattgtatttataacaaagactaatttggaatgaagatatgatttatcattaattaagatatagcatatacataattagtaatacattacaatggggggcagaaagcactgtcctattaaatggataggttcaattcatgaccaaatttcatggtctttgaacagatatttagccccatcagtgttgcaatcaatattgacatcaagaatccatttctcaaacgtacaatttaagaaattataataccctccatggattgaaaggaggttattctttacccggtcttctatccaagggtaagtaagcaaattcaacaatgaacggttgacagactcctaaaacaaaaatcaaaattataagacttaagaaactttctatagtacgagaaagagcttaatttgattaccttctcacaatgcctgcattgctcatcaaaactatggctctgagcaacacttttcgttttaaacttggcaaatttcgctttggtaatccatttgtggataaagctgtatgagaaaaagaactactatctaagccatagttatattatttaagtatatatagaaagcgagtaagaaatatgtaaaatgaagaatgctaggggttctctatttatataaacagaccttgaatttaactcatcttgcatactcatgagggtttcaattcctccacatctactatg

SEQ ID NO: 186794 - DNA, 2798 bp, Cannabis indica
gtgtttaaaactggaacaaatgacagacaagaacttgcccctaaaacaaatctaaagatgcatggatttggaactttcaagtgcagactatttgatatttcaatgataaagatgcatggatttggaactttcaagtgcagactattttatatttcaatgatactgtcagggaacagaggttttcagtaaacagctaacttggttacaaagaaaaaaaggattccaaaagggaggaagaaccagagatctgaggtctgcctcatgcctactagagaagaatttgaatcatgttctccatttttacactaatattatggaaaagtccaaaattcctcaagtcatatggacctgaagggaagttcaaagctgagtgtactgtccgcaattgagaggcactatcctaagatgtcgatttcattgactaaagcatgcaacttttgcaaggtgacaagttttacttgataaacttccaaatctctgcccacatccattcgatatatttgcccaaattaagaggttataatttaaaagttcgaattgcatctatttgtagtagagtacattaatattacttgttaatgcttatgcaaaaaacagaattccaattaaaataagagagattaaattcattcactaaaaaaacacttataatgccaaaaacttgaaacacaactatatgctcaaaattattttcaaacaaaaactttaaaaaatgcatctaacaataaataataaaagcaaccacatacccatatcttcttgagtacatgccaatgaggcaaatacttatataagatcttgatttaaggggatgtacgttcctttatttaaaaaagaaaaaaaaaatctgtgcattattcatttgaatgaaatacaatgtaataggaacatgttaacaccatttggatgaaaacatgagacctaagaaacagcaatgaaattaaaaataataatgaaacagtagaaaaggcagcaactttaccacaagttgttccaatctctaactgaatctcagaaagagactcccttgagacttttaactttataaaccctagttgccacccttaatgtgggtgtatgttcatttgaaagcatatcatgcatccattacgtgtatataatatgaaagcacttgagaaagacagcagccgtcataataattatcaaacagatatgtgatgtgctataaaacctttacggtttttaaataaatgcagtcaaatttaccagctctcatatcttagtagcatgctatctctggctaactaccatatatttgttttttgttaactaatgggaaatcaataggtcaagccagaccaattactgtataatagctgccaaaagaagataacaacgaatgatttttccagaacgtaagtgataaaatggtagacaactaattgtcactaggtctaataacagagtaacttatttttccccttttgtgatgtaaactaccacattttatgttctttcaaattcaataactaatgggaaatcaattggtaaggccggagaaatatctaagatctttatggataagttgcaatgtgtgtgattgttctatgtaaatcagattttcaaaatagatgattatctcataacccatacatttgaacttaacttgataattaaatgaagagaagttgaacactagctccaatgcaattattatgttcattttcagttttccaagggtctaaacttctaagctaaaaaacaagaaagctggcagtgacacaggacaaagaaaaaagccactccaaaaaattcatgcctcagtactgacaaaacaacagaaaaactgcatatgatttcttaagttttgacttcagttttaatacaaccacatttgcaatgattgatgtgtgtcttatatgtcaattgtcaaatgaaaatttattctacaagttgggaaacatatacatactctttgtaaggaagtcgatctccgcataaatgcctcagttcctgaaagttgcttgtcttctttcctgaatttctgccagagtcccaaagaaatgtaagaaacaggtcctgtgtagatcttggttttgcataattaccacatagttaatcataagaataaaaaattaatacatacctccagagttcctagaagctgccccagcattcttttattcctactaaccaagcttggatcttcattcttaggcaataccctcggaacatgctcattgctcgggatatcaaaatcctaattaaaaaattaaaatagaacggtaaacatagttcgaaatctgaaattccaaaagaggactagtatagtgatattaattcaccttcctcattggtctttgattgccatctctcctagaccaaccactctgctgcaaactcccatcagttgcttccatgaccgaatcatcttcattcacgtcctcatttgcttgggcatcctcaacgatctctccatcttctacctactttcaaaattagaatcataaaatttctagaatatgttatatatagaagagtgggaaaaaggacttcccataagtattaaaatagctctttttcttgtaattttatattttctcttcaaccaaacagaaaactaagtatacctaacttttaagataaaccaaaaccaagaacactatcaatacctaaatattaaaaatgaaaaagaaaaaaaaagatttagcagaaaaattctaaaccacgaacacaagacgtccttctttataccttcacaacagctgatgaaagtcgtctttttgcaggaggttcgtcttctagctcagtcctatcagcctattaaaaaagaaaaa

SEQ ID NO: 186795 - DNA, 3522 bp, Cannabis indica
aatgcatatataagaatatgtattatgagtaaggcttactgtcttgagtttctctatttgaagatttcattgaaggaagagcctccaacaagaacgttgtaacagcagcaaggtctacagcctgaacatattaaaaaaagacaaatttacaaaataataataatagctgccttaaaaactaaaaagataggaagctatccgcacacaacttagaaaggaagaattttaaagaattgaatacagatttacacatacaaataatttctaaaattagacttactaagactgacatataattacttgagagagaaattgatgcaaaaaaaattaatgaatcacatgaaaataaacaatcaaattctagtgataaaactgcaacatccagaagttatcctctttctaggcggcaacgattaatatattgaaaagaaaatatctagatcgcaaactgaacatgtataacgtcttccaacatctataatacaaaattctgatttaatatttggaactataacagaattgacatctctatcaactccctcaccatttcaaaacagcaatcaggctgagataatgcaactcctgcagtttctaatatatttccaaggaggcaggcataaccaggaaactcttttgataaatcactaggaagcacattagcatgattttgcacgtagattgccatctgatgaaggtaaaattggcacagacctcttgtcgcaagagcctatatggaatattgcataggaaagattaattattagttattttagaagagacaaaatgtgtaacaatgtagcacttcacatcaccaatcatcacaaatcttgtgttaattaaacatcaaaaaatactttttatgttctcatatgtacctcttttaaaccagagaaaagcttccagagaaaggacagtaagaatttgggatgagaaactccatcttgcatcaatatttgggcaaatacagggattttggccagtatgagagcttaagagaacaagcacttgttccaatgaagacactttgctaaggcaaatatgaacgtccaagttctcctgcaacccagccaaagaatattaagatagagaatcttaatacttttaacacccttgcacatttaatagaaatgtaaagtactctgtgaaaagtttttatttcatacactacactatattctcatcatcaggcagcggtgtgaaaatgttcaaactcaaaaagtggtaacaaacacgtagataggatgcaataaacaaaggatcatacagtaaaataaacacaagctttaaacaggatgttacattcttatcttgcaaagaatgataaaataatatgcatacctttcctgttagaatgatctctctaaacatgccaaatgccttttttagcaatagaaaaccaactgtcttgcaagtccatggaagtttgggatcgatcaaaaggtgcactgtttctaacaacagggttgtgcatgtgcttgactcttcaggtgcggcaaaaatttgactctttaaatgatgtctgcccaccaatacaccaaataagcaacaaaacaaatgtaatatcagtttaatgtctggcaaaagtccgtactcttacatatgatcagtgttcaacatatcgcaatatcaaccataagagactcgggatcaatgtagatatcaacgttactatcttcaaaatttaatatgcataaggaattgaaaagcacaaatctagaaaaaccaaaatcatttccgtgcttatttcataagataccaaagaacatgaggtaattgaattaaaagcaataactagtaaacaagatatatataataccacatatttaaaccctaaaatataaatgtcaaaaaatgcatcaaacctgttttgatgtatagccttaatacataagtatgcaagttgcttcactctgtaatccaccaaagcatgcttggatgagtactccgtcccagcaaataagctcacaatatcccctatttcgtgaacatgtacgtcattaaagaaggcattaaaaacatggagccaacagaatggaaggagaaaaaggtggaaaaaacaaataacaaataaggcattataaatagaatatcagtaaaaaataacaaaaaagggagaggagtgtgacattattacagtagatgtatatctagtatatgtatttataccatttagttaaatatataattcaaaacacgtggatgctgaagaaacaaaatgtagaaatgtaaaaataccactatcttggaccaatttctgaagtattcggcatgtctccataagggtttcaatatctccagcttttcgagcatcaaaaaagtaaaataactggcgtaaaaattctgaatccaaaccaaaacaattcctatggggaaataaaggaaaaagctagttagtttccagagcaaagaaccctgtttgaaaagtttataaagtagtcaatagttacaaacacaatataacccagcaaggctacctgtccacattttggcaaagtttcccaaattttccatagaactgttctcgaaccttagatcgttcagcagccactacctttcttcccctgaagcatttctgtagctagtaatcagtaacacttacgcaaatacacacaccacaacacaaacattgacacttaactagaagaaacaattcaactgtcaggtgtgttaaattaagtagaaaaagtcatatgattatgtcacacaaaatgaatgctcaaaacttacatgtttcataacttctaacaatcaatatttcaatacatggatgattgaatatgcctgcctgtcacatcgatgagtgtaaattgtgtaggtatctaaatcatcactcaaaataacaaaggtataaaattgagtttttggattccattagtactcattattatcaatgacactaggccggaacctaaaccggtaaatgaatcatatgacattgccaaaagaattccgagctcatgccgttgcaaaagaacgtaaatatatttgatcaatttagttaatcaaaaaatcaaccacaatgccagtattacaattgccatatacataatagatatatatatctacaaaacacacagcttagagcaaaacaatttacccactgatcattctccatttcccacaaaaaattgacgaaatgccacaagaatgacaattacgcctaaacttacaataaacaatcaaaacaaaagaataaacaacacacctgaattttagtagcagcaaagttctgttgccgaacccaatatcgcttgttccgctctaacctagcctgctcaagaagcttctgcctatctctttccttcgtgctccggcctcccaaatcaactcgcttccgagtcgatggatcgcctgaaaagaacatccttcctagcggactcaaccaaatacgaacccttataaaaacaaaatacaatcaacaaaacgagttttagaaatctcaagttaactttcaaaagattccgatgaagcaaaagtaagccctactccgagaattgacgaagagatcactcaactattaat

SEQ ID NO: 186796 - DNA, 2769 bp, Cannabis indica
aagcttttgaggaagatcaagaacttcttgcttcttttctcacaagttaatacaagaaaaagggagtaggctattacaattatcacgggactgaacctctatagtaaatttgtgttcttattgcttaattaacattatttaatacttcttaagcacattaattaactcattatcgttggctaagagcaaggtcaatattttaaatctgtcattgagagaaaaagaacacaatcattgttttgaatctttttaagacacataaaaatggttgtaactacaaggaggggaaatcccaacgagaaagctggtccaatgttatggttcttaatgtgaaaacttctaggaattaaagagatttagtaaggataaatcccgagtgctgattggagatgataccaaactgcaaaatttgcaagccgctctaaggtaggtgcaagagcataccaacaccattcaccgtgattagcaagatactcgagtagttgtgaatatttcattcgagcagcaaaagctccaattcgagtagtggatcaacaaatggagatgggagccaagtaggaagaaatctttaatcgctcaaagtagacaaccatgatgattaggcgagcttatcagctaactggatataaatcagtgggaaatactctagctattcaggatccaaacaggacacacacctatatccctaacagaccacggtatgggttagaggaacatccgaccaacaacactaagcagacaaaaggtaatgtgtcatccaagctaaggccacaagatcaacttgtgggccacacggtagatgagcaggtcttcccagcacattatcttggggggaatggtaagtataacattcagacttagacaaatataatgaaccaatcaactgctaaaaacaaccgaataagaatgccaccaagtgtttcagtctttggcagattggaatccgtacatgatttaagagataatctaaatcgcaaaaagggcaagacggacaaccaatccctcttaatgcttagctgattaatctaaataactattttccagtaatgttctaagggttccataggtgacacaggtcggtctacaaaccggtcaacttgatctagtggtgtaggcacaactagatcaatttaagagccttgttcatagcctgactagcaactagcacttgactgaacatgaggctcaccattttcaccagaattcaatgcctttgatttccaaccaaattcaaaatgccaatatggaagatgtacatgggcaagaaagatcctttgtccaacatcaagtacattgaaatgcaaatggacttgtgggtagtgaaggcttctgtacggtgtaaatctttctagcttccttggcagaggtcgcctaacagtggtactttaagttagccccaagaaaatttgattcatggaattctttcatggcagagtttcatgcacagttctccccttctaggaaactcctatcccacttagaagacctggtcaaagtaaaacaaatgtcagcaaagcctgtcgagggattacatcagtagatttatggccaaggccacaaaggtaaaagggtaatttgaagaagggaggactaagccgccatcttaagacgaagtgaacaattgggagaattatgaaaagatattataagagacttattgtaggatcaatgggagagtttctagaccaatttgatggatttataaagcttaaagaagcagtttagcatgtagacacagttaattagaaaaagaaccgtctgcacaacactactgccaatacatctgtcaagcagaatcaaaattactaaaacaataacagtttgagtcaaagtggtaaaaaaaaaattatggcaaccaacgtggtaatgggaagaaaggcaagttcaataatagctccgaacaacatcctagagagaatgccttgaagttcgactgcctttactatccgttactgagggacataaaaataatcttcacgacaacccagtcagtggttctgtataaaagacttctttccataaagaaagatatgagcaagtgggataccaccaaatattgtcactttcatgaggactgcggtcatgatattaattaatgagtgggataatctgaaatgagaaaagaaatcaaattcctcattaggaaaaataacctgcacttgtaagagtatggtaagaccgactaggatcgaaaattgttgatgcccctacttgttgatgaatatctacaagtaattagtgcatgccctcacattagtgcagactcgaataaagcttgagaaaggtatgcttggaccctacactacgaacagaaatcaaaattggaatatgggggattggaaatcaaaattgttctacgcgtttaagatgttaggggtcaggattgacttcaatcgccgaccttgtacgtggcatatttccatacgtagcatttatttttatagcttttgtagacgctaatttctaaattttttatcgcagacagaccggctcaatctgtattggacacatctcttctagaaatcgctgaggttttaagtggccttcccatgcaagatcgcgactggcgtctattgtgtactactgcaaagttgcaagaacataagcttattctagatgacactaagctttagcaagaaccagtgtacaatgagcattctaagaagtaaaagaaaagaatagacaagcgtctatccaaatagacttcgagaccgacatcagttaatgtaatctagtatgttgaatgctattttaccttaataaattttt

SEQ ID NO: 186797 - DNA, 5469 bp, Cannabis indica
ataaataatgaactgaaactgttagtctcacgcacccacctattgtattatttgtcctactcttattcaatacaaaataagtagttaaataaaaattgttgaagccaaaaatacaactgcaagctcaggttttttagtttgttttattttgcgtatatgagactttttttttaaggtattacattaactaaaaacaaaaacatgagactttgaaagtatatttttgtaaataaaaattttaagtggtaaaattataaataaaacataaaaaatggtattttgaaaatttaaaagaaaaatgtatgctttgaattggcggggggcaaaggagtttgtagtcgttggaagattttggcgcgaaaatcctctaaaagacctcagcctgttttggcggtgaccaaacatgacggcggctgaaataaccgacctcttcgagaggctcgcttcccacctcaatggctccccctcttctggccatgaacaagctctgcaactctccatttccaatttcaacctcaaccctcgttctagggttagggttttggataccgccctgtctctcatgtgcttcaaagctccacaggtttttctattattaattcgataaaaattctgctaggtttcagtttcttgatcctcgccttcattctctttctcaggtttttgattcaacagttaaatatttgatggaaaccattgtcagcgttctctcgtcatcgattagctgcaaggtttttcagtttcacaaagacgaggttttgttaatcggaacctccatttctcgccgagatttccccggtttgatcgaagcctgctccgacgttcttcaaaaactagagagacatggtatgagactcgatctcaagcattatttcctttactttcacttgtactattcgatcgtaatgatttttttagtttaattttggtatcttgcaggtactcagtataaagacctgttatactctgttctaagagttgcaatttcatcatcttgctatcgatttccgtatccatcaagacctattctttcagttaaatcccttgatgtaagggccactgcagtttctaagcttctcagtacttgtcctaaaggtctctcctttgacaatagtaatattccatttaggtatgtgctactattatcttcatttcttcccctgtattctttatttttaaagtttaacttagttcatctgtgtccctctgcagattgatgtcctggtttgttgaccaactaactttaaagaatgatattttaaacattttgcacgaatctatggagaggcctttcctctttctgtgcaaagaatttcatgagagaatcgattggcgtgatatcgtaaaatgcttagtactttctcctgctatgtttattgaaacaagagctctgttgcacagatggtttctgttgacgtgagttaatttcttaatcaatttaaatgaccttgtttgctgtaaggaatttcggtaaatagctttggataagattattcattgcttgttcagcaatatgaatattttccattgttcattctcccacttgttgctagttaacagttgaaattgttgaattctttttgctctcttagttatagttatccaatttgaatttaagttcggatacgtttataagttgctaattttaaatttaccttttgtcattaagcatctcaaaatttttgttttggaacaagtgatatgatatgaggtatttgtgtgctgatgttattatagtggacaccacttgtttaacgatagctactattgacaatacttttgttcatttcaactgattttagcagaatgaacaaatatatcttattattaaagtacttgttctgcagggggctgtcttctgtgttagagcttctaaatgcattgtgcttagtgatgctagatgtaatttccacaccaacatggtgggacttctcaatggtcttaggatcaaagcttccatttgctaattctttttttccctatcactaccacttttttaggatcttggctggacccatctctcaagttagtcttctacatttggacattggtacaagtgaattgatgtcttgctccagcaaacagtttgtttctaatatgaagacacctggaatgatggctgaaaatatagatcataaatcttactggtaaattcccacttcttatgtccttgtgaaactagttggcatgagcaccataacaatcctccctatcaacacttactttaatatgtgcataaatatcagggctcttgcaatcaacttcccgaattggttttactttgcttctgctttgctcttctctgacaaaagctttcaagacaaggtatattcgaaatgtataacagacacatccaaaattggttatgaagaatcacattcttctgctgcagcaaggtacatcgcgtggattctgaaccctgttagtatatctgatcaggatttactagccaatcttctggtgaagatatcaatatctatggcttttaagcagattgattcaggttcatgtaagaagaagacagctagtgtcagaaagatactgaaaaaacccaaaaattgtagcaagtataatacttattcagaacaatttgactgtcaactcgttgcactttggcttgaggaattcaaaagcttaaccgcaaagtactgtgacacaaaatcatcttgtgatcttagtatgcggaaaaatacattgttcaggagaatcccattaggtatcttgcttggttgcctgaattatctagacgaggaggtgtgtgaattgctgctgcattatgctgccactgatagaataccccagtcaaggaaaattgagatttcaagtttgaaaaatataaaatctaacaatgaagaaatactcgtgcgggttgataattacactaaggatgaggccatatcaggtgccagtcttgtcttcagtttaactgatattgttgaaagtatgtctgcttcattatttgagaccgaagatgatggggttgattttatttgcctagtgaaaataagagtgggaaaattcttgacaaagtgcatcaataggctaattcaacttaaaattgaagaagatggaaaacaattggtgatggatctctgtgcaaggttgaagcagtggttgcatcaaggtcacagagtattagatattaacaaatatgttgatgaactcattaaagttttgagcaataactcttctctgtaaaagaataaagaagttttgccctatgatttcagctctgccagtgtaatttttatagtgggtcgtaatggtgtaacgccaatgttgaaagagattgcgaggtgaatgtgtaagagaatacccttctctgttgtgaatatttaatactgtatataacaaatatatattttatgctgagaaaatcgttagctattaactattgtaccccttttgaggaacatagatcaaaagtggcaagatcaatataaactttatagtcaaactttatttttattccatttctttctgcaaagaaaaagcaattaattgcctttccctagaatgttacagccattgagactcagcaagttgaggacttactctttactggtaatgtatgtatatgtatgaagctcttttcttcttttcttaatttttttttcttttctttttctgacatacaaaatgtctgtacaaactcaaacatcgtcacactatctacagtttctatttccaggattaaacattgtatggttctgaagttgcgttctgtccatgttgaatcagactggtaaggcactctggaatcttctgagcttcaattattattaatgtgcagctgctagtgaatcaatctggaactttatttttctttttattctttttctttaattttcgtaaattacaaatgttgctatacgctggttggaaattgttgtcctccaaaccctttttatttatttttactggccccctcttgttcttaggaccaaagaaatcccactagggtcgccaccccattcttcaaacacaaccaataagttccctgttgggttcagccatgaccgtggaacgtggtacctgaaaataatagatcatcatcacatactttctacaactgaacaaacagagtacaactatgtaagccataacttagactcaccatctttgagaggcctccccacagttgctccggcacttattctcatcaaaaattccagcataattacaaggcgcacagttgccgtgtgctttgtatgctggccagtggcgtccaatgctccgaccatttacccatacttgtccttttcccatggtattcatgtccaaagcaaatggagcatgaccgcctggtgcattgaaagttgtctggaaatggagaagcaatgaatgaattagccctctatgaagaaattcaaagagtggttaggttttcgtgtttggagctattctctcaccttgtaccatgtcattggttgttttttagccaagagtgcaccttgcctccattcaaccgatgaactcccactaactgtgtgtagatttaatgattctcctttcaaaccaatctgttatcatggacaagtttagtttttagctttctgtgatacttggtcatattcaatttgattgtataggcagaatatgaaacaagaaatgttgactgtcaactaaccttgtatgaccatttccattttgacatatcccatgttcctgagttgacacccctcagtgtgaccgggccaagaacaccagcattccatgtctcgaaatgcagaccaacattctgatgatcaaagaagagcagagggtaaagttcatctgctattatagaatagtgtacggaactaatataaccacaccaataagtaagagaactaaccggcagacccacagcaacacttagtatagcaagcttgttgattccaactctcagatttattttttgactgaatgttagttttggattggccaatgatccgtaagtacttcctgttaaagaaatgtatttagtaataattccaattattgcctggaaatttaagttaaattcggtgcagtttcatttaccagctagttggccattgacgaaaacatgcaaggcgtggcctgctgaaaaaatagtcagaacaggaagttgcccattcttgacaaatccttcatttgaacctattgtgatactgcaaacaagtagaaaaagaaaaatagcaagaggattacaattcgacaaacttaaacaaagttaatattgtcaacacataagaatgtcattgcctgccaatacttactctgtcatgtaccaaagatagtctgttttatcccatgtgaggcttatttgctctcgtaacccttccaacgaaaatgtaccagtactactggaagaagcagtttcttcattgaaggatgcccaagagaatcccttaaccacaggtgtcatttgtaccagtgagtttggagcacctacctgtaaaaaattacagcctcatgttaaatgcatcaccgcagatcagattt

SEQ ID NO: 186798 - DNA, 1378 bp, Cannabis indica
ttgggagacttggttcattaatatttggagtagttgtagtgaaattattaaatattttgaagaccattgctcaaggcttttgtttgaccatgtgctgggatgattaactagtctctgtttcttccagtgacatttttcgtagcatacgccacaggctcaatgttttcttcaatcaatcatagcatttctttttctaacagaccaattttagattcacattcattagtagaatcgagtctttataagaggaactttagtattatattaggtaaaggagcaacaatttcccaaaattttggttccgctaaactctccccttgaattaaaattttggtaaaaaatgagttttttctagaatatagacatccatagttgcacgaaaatgttttgttataggattaaaacacttcataacttttttgagtaggggaataaactagaaaacatacttttcaattcttggttctaattttgcgtatatctttttggaatgtgaacattggcagtgcaaccaaatattttcaaaggttaattagaactaattctagatcttggaaatacctttttcaagatgatatgaacctacaccacttgatacagccaaaccagatcaaaagaaccagagcaataaaacagtgcaccgaaactcaatttcacacagtcaattagcatactcaagccataatatgcatgaccatttgattgtatctcttgaaaggaaagtaatactgaaagtagtcctagtcctactggattaagatgtcgagggggacaccccgatacatgcataccactaacactaacagccataataaaccttttccacacaattacacaaaagcccttcccacaatacatgtcacagcccagcccctatgcctccttggccttggccctcctagagtaagtaaagtgtatatggggcctaacacaagcattctaacagagtattgtattgtaaaacacgtgtgggcaacttgttaataagataagaggcagtaaggacatcatctccctataaattcatgtaaacatatagttctagccacttctaataagtattttttcgtttagctaagtcatttgttcaggagtatcaagacgattgatttaaaatgcctttttgggttaaaaaattgcctaaggttagataaaaattactccattccattatcagaccaccttttatttgtttaaaagaccttttatatctctacttactttcatgaccacatcccttatctggcttacttctcatgttccttttctagactttttttctactatcaaaatataaaaaaaggggtttcatctgtacttcccaatttttctttacatcctttacgccttattctaaggtattatttattctctccct

SEQ ID NO: 186799 - DNA, 2710 bp, Cannabis indica
tttttttttttttttcttcaactaaaaaataagttttcatgtgagcattgcaaaaacaacgttaaagcattattataatcaaaaaattgaatttgaaaacaaacaaatcgaacaaaaccaataaatcatacaaagattccaaaaccttcaaagtgaatactcttgagagttggtgtttcaacggtgatggcaatcttgaggtaatgttctgcaatcgtggggggagagagagagattgttaatgggaggagcagcatggttaaacttttacaaagtggcatagttttgtaactttatgtttgtgtatatgttaatatgttttttaattaaagtatagcaagtggcataaggcatcaaattttgttaaatgttttcagccaattatgtcgtttccttagatagtggcattttgttttaattcaagctcctttacttctatccacaatataaggtagagtcaagtctttaaaattctaacttccttcctagagctacaggtatgtctcaccacttaaattgccagcctttgttgtgttattacgtattgccctcaatatttggagattcatttgttttaatacacaattgaaatcaacacgtcaagaacgttgatattgaattcctccttcacaattgtattgtaccctccaaatggtaaaatggtggagaaggatcattattgaaacttcatcaagtcaaagaatgaattatattatatatatttatattgtgctttgtcgttccatgggaaaaatctaaagacagtccagtccatgccaatccaaaaatacaatcaaacagcgttacattcttgaattcgaaagtgatccaagaatcctaaaatacatgaagttttctaataaagaaatatgaaaccagagctaaagaaatatttataaatcgtattgaataatatcaccaggtatgaataaaatttggtcaaagtttaattagtgtgatgttcacaaaacaagaatcatacacaacaaaatcaaaaacaagaacaagaaaaaatatatatatgaagaacagtctaatattacacaatacagagacatcagaactcaattacgtaccccccaacaacatcaaaaatcttattccccatctctgtctcttcatctcagctccctccaacaaaacatttccaattttccgtgcacaaatgaacaagttcttaattacttaccattcagagttttagacaaaagggaagaacaaatctagaaaagcaacaacatacaggatgaagaaataaactgtatttataataagatttaagaaaattgatcaataaggattatagtaatacccggccggcggccccatcccgttgacctgaggctgaggcatcccatattgcatcactggatatggatttggagccatgtaaccgttgccactaagcttggccaaactagtttgaccttgcattccttctctcgcatactgattccatacttgctgttcctgcactaacaagctttgttttttctccatatcggacatttgcacataagaaggtggtggaattgttaatgaagcagcaaaagggtcctgattgactgcatgaactgtgccactcccatctggagctgggagagccaacacgggtgtgttggtctttcccagcccaggcaacgccacactgctggcgcttccaccgctcatatgggctgtgctcacgtgttgtctgaccacgccctgatcgtacatgccattcaacaacaacggatctagcccaccaccgagatcttgtttttgcaacgacaagttgctagctgactctaccaaggcgagttcccaatctgccttggtgggatcagcggcaggagtctgccaggccgatgttacttgaggttgtccatttgatgagaacggttcccacgatccattcgccttgttttcccctggaccagcaaacaatgcaagagcaaacttgttcccctgatcgtcggccgtgaccgattcctctctcaaatccaccaagtcgtggatcacttcttgttgctgaggcttaggctctggctcaggtggaggtggtggagtgtaactttccggagcagggagtgcctttatctcgttcatatcaggaaccggttcctcctcttgaactggaggagccggaagctcctctctcttctcgggactcttgggtctctttgatctgtccctcacaaactcctccaatgtctctaataacttaccagtgatcctctgaacttcaggatactccgatgatctcgcaacaccggtttccttgcaccaattataaaacccaacgagctcgtcgatctgcttagccgcacttgcataggcatcgaaggtcttaacacaatctgggtactccatgtcaaagaatttatcaagtaaaacagccaaaacctcacaaacgtcggcgtaaagctgaaagctctccctaacaacggggtacaatgcgatcaaaatcatcctattgatcttggccaaacccgtgggtcgacaagccaaaaaacgatcaaacagtctctgcatatgtcccatcttaacaaatatcttctcaggcttcatctccctcaatggagtcaaaacccttttctcctctctctctctcccttctcgtcctgccgattcgctcatatccccaaacgacctcgaccgcctcattccgtagttcccagacggacccccctcacccctggaatccccataatcgtagtcgtactgtctc

SEQ ID NO: 186800 - DNA, 2831 bp, Cannabis indica
tattttaaattttttaaaaattacaatttattataaataattatgacatataagatcatagaaaaatattaaaaaaattcttgaatgccaaaaataaatgatgaagggtcattaaattgctgaaagataaagggactctaccaaaataccagtttagggatatattacataattttgctatgttttttgtgcagtagtatataatgtaattatttagaatttattgaatttgattttagattgagaatgagtacaatacagtagaaagagcttttcatgaaaagggagtgtcttatgttaaatgggctgcatcaatggctgttgggcttcaaactggtgtcccatgggtcatgtgtaaacaagatgatgctcctgatccaattgtatgttttcttttcttctatttattttttttaatttattaagtttttaccttaattaaaattcaaattttataataaataatataataccagccagcatcatcccatttttgattgctaagtttcaaatttgactcaccaataagtgactaaaaatgtgtcataagggcttttatgtaaagtaatccataccactaattttaccaaaaattacaagacaagtaattttttgaaaatatgggaactttttggtataactaaatgatttagctattgaaaggagagacaaccgtattcatttataaaaacaattctaatatgtataccaatgtctcataatatattggagaacttttatttttatggtttttttttttggtaaaatttacaaaaatatggttttattgtaaaaattcaaaagcaaaattataaaaatatagaagaaaaatagtttaagtaatctacctccttactttttttaatgttttttaattttccccataagaaaatccatatttttgcataaattatgtaaaaaattataattttttttttttgtaaaaatgtgatctggatcacattaggacaatcctgagaagacttcaacaatcggtgttggaacctttttataccagcataactcattgtctagcctaatggcatgtttagccaaaccatggccgcagtgttatctttgcgggacacatgagacaaaactgccatcggaaatttagacaataaagctatgatatcctcaaacagcacacccatctcatttgcgaacaccttcctgttattgatagccataactacgaagagagaattagatttaaccgcttttaaggaatcccacacgaatgagcccaatttagtcaagtcagcggagcaaaagtttcagcttgaaaaataataatactacctataaagaaccaaacaacagacaaacaaaccacattattacagtctagaaaacaaactattcacaaactagagaaaagcaataaagatactaaataatcaaataaaaccctctaaccccaatctaaaattacagtaaagcaataaaagaaaaaacaactctaaacaccccatactaaccaaagtccaacactttggttagtaactgacaaaattataattcgtgtacaaactgagcaaggagactaacataatctatactcctctacttagaatcatttggttagtagtagtctttagtgcagtgtaattaaattgtcaaactcctcaaacttttagagatactattgttcactacctgaacacaataaactttaagattaatctacaatattaacatcgtaatgttttgcttaacgcagccattattgtaagatttgctgacataataatggcccctacaccaaataacttagattcctctaagacagcttcatccaccaacaaagtggaaccagtgattgtgaaagggtccccttgagcagaagagtagttagagaccccctcctcactcatagtcaaacttttctttactagctcattcgttaaatcaacagagtcacaaaaacttgtgatccaaccaattatttgcttagcgtattttggaagatcaccgtgagtcatcttatttctcttcgtccataaaatgtataatttttaatcattcactaatatatatgtatatatataatatatatattcattcagattaatacatgcaatggaatgaggtgtggagaaacatttgtagggccaaactctcctaacaagccatctctttggacagaaaattggacaagtttgtaagtaaaatttaaaatttatataaattaataacgtctagattagatgaaagtataatttaatcgagatcaaacaaaaatataatttaatggaaattattaaccaatattttcttaaagcttaatttttgttttggttttaagctatcaagcatttggtgatgaagaatacattagaccagcacaagatattgctttccatgttgcactcttcattgccaaaaagggtagttttgtaaattactatatggtaagatttaactcaaatgtggtatcaaatcaaaattaatcaaatgttttttgtcttatgataaaatgttgttcaaaattttagtatcatggaggaaccaattttgaaagaactgcctctgcatttgttacaaccaaatattatgatcaagctcctcttgatgagtatggtaagtagtttcttaattctttttttagtaattgatatgagatacttattattaagcttgtttttactttgacaggtttaattagtgaaccaaaatggggtcatcttaaggaattacatgctgtaataaagttatgctcaaagactttactttctaaacaacaaacttcttttcctttagatgacctacaccaagtaagatcactaaatttcggtctcttttgacttaacttctatattttttttttt

SEQ ID NO: 186801 - DNA, 1095 bp, Cannabis indica
tatatatatatatatcaaaagtatagagattaggatggaaggagatagaagtagtgtggtagtggaactttatgccttttcttaaaaaaaataaagaaaaagaaaaatagaaagactagttatttttttcttcttcaaagtttgggaattgggagtagtttagagagacaaagagatctgataaagagatttggtccaagttgattgaaagagtaatgttggatagaatcatatgggatgtttgtttttgcaatataagccaattaaaagtatcaaatgtcaaaagtccacttcagtacactactactgctcataataattattaatttttttaattgtggggttagagttgggttcaaaagaaatcgtctaaaaatgacttttattatatatatatatatcctcccactctcctaattattaattatttaagattaagattatgcttttatttatctgagcaggttagttcttttttggggattcaaattcgttttaaacaaattatattacatcaatatgccactatcatagccatgagggtctcccacattagcttcttcttttacattgtcggccattttctagggtcccactaaataattacatgatatatgcatatatatatatattgctagctagcttcttaggtgtataattgtaatagcctatagcctatatacacatatatatatatatatataaataccttagttattgggattattataattatactttagtgtacttatattgattcgtgtcaataaattacataaagaacaacgcactcacagttacatacgtataataatattctagggttatgatcatacttcgtgaaatacgaaacacaaaaagaaaatgttcacattattattaattatttaaattttcagtaagattgaattataatatataaattggcatattatatgtacaaaattgctaaaaattaggtacttaacatatatacttagtataattaaatattaaattctatataatttaaaaaaatataattttaaaaaaatattatatcactattagtctatttattaaaaaagtaggtgcatataattttgggttgatcgt

SEQ ID NO: 186802 - DNA, 3964 bp, Cannabis indica
ctagacatccatagatttttctgagaagaggccaatttcgcaacgagataatgcaaatgaaagagaggaagtagattgaaacaaccaaccaaagaaccattaccattggacacaatcatggcagcccaagaccaagtccatcttcagtggtagccagagatggtgaaagagaatttcttgactcatcatagtcttcacccagaggagactgttccactctgatatcttcaatcatcttagccacttccgccattgaaggcctcttctcaggttgtggaaccacacaagctaaccccacatgaagcattgatacaagctcttcctctatgtttttgtacctcagaagctcttgatcgaatacttcacctaattcaagttaactttcggtcaaataatgattgtaatgaaaaaaacacacacaataataataaaacagagcattgttcattacctgtccactcttccttgacaactgatcgaacccatttcgggaggtccaaagcctgttcttcatcctcaacgcgattaggccgagtactggccggagaagggtactgtgaaggagctcttccggtaagaacttccaaaagcaagacaccaaagctgtacacatcagctttctgagatagtctcttgacctcagcttgttctggagctctgtaacctcccaatctagctatggcatgaactgggttaagcaacagagacaacccgaaatcggatatgcaagccacgccgtttttgctagtaatacattcgacgatttaacattgccgtgaggtatttttgcagacccatactcttcgtggatccgagcaagccccctagctgctcctaacaccaagctgatccttgtagtccaatccaatggaattcttcctggacctctgttccctgatttcatatcatcaatgtacttagaaaatctttataattaaggagcaatagtatataaatttctaagaaagaaaaaacaaaaacagagctttttcattctttggttcattaaataccatcaacaaaatgaattcacaaacagagctatattatagtttctggttcctcaatttcacaaacaaaaagcaaattgctttaagttttagaattttgttaaaaaagacagctttgttttgttttgtttcattcgttcttttcctgtatttaagaatgtactaaccgtgaagaagatggtgcaagctcccattaggttggtaatcatagaccagaagcttttcctctttggcatagtagtaagctcttaatttgaccacatttgggtgtttaagctttccaataacatccatatattgctcgaactctttcctcccacatgggtttgcatccttaagcctcttaacagcaaccgtacacccatcgtctaaaaccgccctataaacagttcccaagctccctttccccaacatctccgccgaagctcggagcaaatcctcaagctcgaattgtttctttcggtcaaaaaatacaagcttgcttcgatccgtaccagtagtaccgtcactatcagcaccaccatttgcgtagaccttcttctcagagccatagctgcttgaactttttctcctcttcccactttcactaccggccatggaactcgagtttctctctttggcgcaatagtgagccacgacgaacgatattatcaccaacaaagccacgctgttggctatcactatagccactacggcgccagggctcaacccttttcttgattccttctttggttcgtcattaacagttgttcgaggtaacgagctaggattcgactgtacggtctgatcagacgggaccggagaagatgggttttctgtaaatgagcaaaccggtaatgggttcgacccacataacccttcgttacctgaaacactttcttcaccgaacttcttcaacatctggtcgggaaaccttccgtaaagctcgttgtttgtcaagttgagttctttaaggttgagaagcgaagcagagagattaggaaccttaccagagagcatattatcctgtagtcgaagagtgaggagccgtgtcaaatgagaaagaccctcgggaataacgccacggatgttgttgtcagagaggtcaagacggagaagtctccggagcgacgaaatcccaggtgggatttcgccggaaaggtcatttccggcgaggtaaacgagtttgaggtttgtgcaattagtaagaggcgtaatggtgccgtttaacctattgtcgtggaggtcaagtagccggagttggtcgagagaagagagatggtcaagagggcctcgaagattaagtgaagggagggagagagagaagactctgccggtcggagagcatcgtaccccggtccaggcggcggcgcaggcatctgggcctgtccagttggagaggagaccaccgtgggtgtcggtctggagacgaaagctggtgagggaatcggtgtcattgttgttgttggtcggagacggagaagaaagaacgagttgagcaaagaagagtgtgagaaaatatggtaagaatgaagagaagatggccatgcgaatgcgatgatgatgataaggcagcttaatcttcctcattagtcctatctttttctctttctctttgtttgtttttgggcctcttgggcgggaagaggagtactataatgtgtaagcaatgagtgtgttttttgaatataaggagaaaaaatataacggatttctctcactctagaaactcactattttgtctttcatgagagagaaatgagaataaaacattttcttttttgtttctttctttatttctttttctttttggtaatgtggtgagtgaggaagggagagggaatgattatgtgaaatgggtttgttttgtgtttcccttataattatttgagaggcatcataattgtgataatagagaaagggaataattaaagtttaataagggggtttgaaaataagaaggattagattagaaagtctagaaagagatagagaggtgggtttttggggagagtggttgcatgaatgattgctgttctccactcctctctaaatgcaatgagtaaattctaaaaaggggttttgagatagttcagtcattccttttcttttcccctttttccctttctttattaaccaattgggcattttgggtgtccctacacactatgcatgttttcaacagatgtggccttaaaagaaaaacaaatgagaaagaagagcaggcatggcttctgaaagtctctgacccaatataaattagtatttaaaaataaaaaattaaaaaaaattgtggattttacgtagttgtcatgattcacttgctaattatatcatgagtatatagccatgcaatgtaagaagaggtagacttatttcacctactaatctttgatcatcttaaccgcaaatcccgaccattgatcgtggtaatcccataattagaattaaccatactatttcacattgatcaatcactaagattttgatactcacaatagtcagcgactatgatgattaagacatatcttaatttatttgattagaactttacaaatgattgattttttttttccacaaaatttgttgaattaaatataaaatttgtgtaaaatttgaccaaaaaaaaaagcctaatattatatattgtctaaattttgcaattataggctaatatacattcaatacaaattaacttaaaaaaattaacaaaactatatatttttttgttgaaaggataaaaagtaataaatataatttgtttctacctaaactattatgacaatccaaattatgctataaagtctcgttaaaaaaaaaatgatgttataaagtgtatcatatataaaatgtatggttactattttttattgtcaatcaattttaaaattgatatcaggtatgttattataagcctcactatattctactttctccacaacagttccacatcattctaaatttagtataatttt

SEQ ID NO: 186803 - DNA, 5542 bp, Cannabis indica
attattattattatttgttgtttgaatcattgtttttgccctttttggttgttgggtttttgagcttttgggttgatgattggtactttgtttatatatatataaatatattattttgtctgtactttgattgaatcaagactcagtttttatccattttctatataggaattttgtctgagaaataatgagacagagtggttgagtatgtaaagggtttttgagcttttgggtgatttaggttgatgattgattggttgtactttgtttatatatatataattatctttgtgttttttgtttgtatttgtttgaatcaagactcagtttttatccattttgtatcaataattgagttatgctttttaccaaagtttgtttctttgatacttttttgccaatttggtttaatgggcatttgttaaagtttgtcaatttgtactttgtttgggaaaaaaagttgatttttgatcattttggtgttatgggtaatttttgtttttgattgggggatttgaatttgaatccaatttttttgacagggtatgatgattcgaaatcccaagatgagaagggaagtgatggtggtgagggttatgtctcctgtatatgagggccaccatagcaaccgccaacagttttcatgaagggagtgaggagggtgactcatcaggtgctcgatcaattgtggcgaaagataagtctgtggagagagtttctagggagagaagtttgaaatctgggaagaattctgagaacaaagatgtaaggattgagtatgttgagtctggaaaggaatctcgtgacggggatgatagaaactcgagtagtagtagcagcagcaggagcagcagcagtagcagtagctcggatgatgaatctcgagccattgagaagaaacaggacttgaaagcaaatgtttccattttggattcgccagttgaatcctcttcagctgaagagaagaataaggttgatgaattgtcctctaagccagtattggtttctggtgtgatcaaacccggttttgaaaatggtgcagagaaatcgtctactgtggaaactgttactgatttatcttcgaaaaaaagtgaggataagagtgcaaaatcatctccaagcaaatcagaatctgtctcgaatacttatgaggttgaagaattgccaccttcaagtggttgcgaggctcaaactagtaatgctaatcaagacattaaaacttctgagactcctgaaccctccgaaaaccaggtattaagcttggcccccatcccctttgaagtttaagtttcacaagtttttttcagttcttataatttactattaaatgccttattctctattgaattttatgcagcctttggttgctccaacgccgcgtcctgtgcaaaaaacctcttggttgagttgctgtggaatttttgatgtgattacaggatccggtcgataaattcaggttggtattgtcttcatacatttgtgttttaactttttctacttcatttgaagtgccaacatgccatgtatgatttagctgtggaagttatgtggattttagctattgttttctcatattcttagtttcactcttttgtattgaagcttcaatattcaatattcgtttcgtttttgtctagtaattatgtctggatgagttgaaaactctctcttgtttatggtatttatagatagttaattggatgaaggatttgtataggaaagaaaagggtaccataccgtagtttggtactcttgactgacaaagttagatacccgagcattccttggaaagttagaattttcattctagcatattcagtgctcctatgaagcattctccgttcagtgtgcttaatgaagactcgaaattgagaatctgtagcagtggaatgaatgctctttggtagccaacatgacaagatagattcattcatgaaggaagaaacttgtcatttggcttccaaggaggttggattttttgaaattggttaggaaattgattatggggtcacttcattgaaatgcatagacagacacacacacaaacttataattgaatttttctgattgggactctcttccattctcttcttgttaatgtgagttttccatctgaatttgaaaatggtaaaccgaaatatcagaaactaatctcatttggcaaatctatgttttcggttgatgcagaaacataagctgaagaaaaattcattggaggaacaacaccctcaatggcgaggaaggatctggttagagtaactttgtgaattttgagagttagaactgcgtaaaggttttaaatttttaaatttttttctctgaagaataatgggggagatagacccgacttgataaaacagtataaaagtttggtggtcggtggttataacgtcgaaaaaattgtaggctaggcagctcgatgtcgtcgctaagctttttacaacatttttacatgttaattttgcagtgtagtattcttccttgtgatgtattcttcctttttctcttttttccccttcttgtgaagaagttgtgggattatttatggtgtcatttttagagtacaattattatcactatttctcaatctcttgcatgatatttcctagtgtttttactccttacatacattcattctcttaaggactatagcaattgccttattaagaagaagactaaaatattgtaacaatagtctcttacttaaggagagattcgaacttgaaatcttctgaaggaaaattacatacacgaacttgaattacgagagtcaagagtctttaaatatttacgagtgttgatataatgacttgtcgtcgtagggttagaatccttgttagtagtctcaggcgatggtgaaggttgcttttagcccgtgagcgatctaattataggaattgtaatagatagggcgtcaatgagtttttagatggtattcacctttctaaatggtaatgttctagttcataatttttgtgtacatatcattactcgttatttatctatcaagggtaaatagttgtttctcaaagtttcatatgatcccaatctcatcaaaattggacaatggtggattgtattgggtattgaaaaaaccataaatttgcaaaaataatttgatattatttatcataataaaccgaatcacacaacaaagtgcaaatactccttagagataagaagtgatagaattaaggtacaaagaaaacaaggaaaaatcctctagatgattaaacaaaacacacttgttaaaattcattctcaaaattctcaaaaacttcttaattactaaggtatgagaacactatgaatgtctactacatatgtgaattgtgtggctgtaaggatgattatgaatgcctccatccattcttctctaaaagaagaaaactcaaaaacagagaaaataaaaatattaaaataattaatgtatttatgcaaaagaatttgtataggactatgttcttaccagcttggtgtttctggaatcgagttcgatctcttaacaagcgaagctacataaacaacaaattttttcgatcagtacacttttttcggttaaaatattcttcgagtttgagaatgaaaatgaacattttaacccatagcaaggagtgtgggagaccaatcaataatggcagaagtatattgggacaaaatgattaggatgatgaaaatcaagacttgtagtgaagaaaaatagtatctttattttcaggttattttgctatagaagtaaaaagagagtaagtgaaagagagagataattaccaatgacaaaaccataatcaatggctctatggagagcattaccccaaatgctcactataataacatacaaaaattaagcactaagagaagtattgcaacgtatttgattggcttattttccaccattttaattagaaaaaagagagaaagaaagaaaatgactagttgtgactgtgtgtgtgaatatgaattgaaagaggtattatattagagctttttaaagaaggttttttttttttttttgttgggttctttgcttgctcattaggacacaaaacaaaagttttcttcattaacaagccaacccaacaaaattgattaattccaatttttaactcttttcttcttaagctttttaccttatcttctttttctttttgacccttatcttcaaatgtggcctttaatccatatatactttattagtgtgtttcaattgttcattaaaaaatacataaaaatttaatttttttttgggaagtgagaaatttagtactaaaaaagatgtaaagaattcattgtatttcacaaataattttatttatttttctttttacaaataaaccaatccaatcaattcacatcacaccaaatcacacaacaaataattgccattgccaatcctcctaacaagattttggctttagaaaagaaaacaacaaaaaagaaaatgtaaaaaattggacaaagaacacaactttaagaacccctttataagtctcaaatccttcttatgaactctcaaatttatcttcttgatgatccaacactatgaatagctgctatgtatataagttgtgtggctgaaaggataatcaagaatgcctccatagttctctacaaaaaaaataaataaattaaaaaattaatacaaaaattataataaattaattaacatttttagactagtacaaataattcggtaaaaatgcggttttttttttaccaatttagcattccttagctcgagttgaatctctttgcatgcaaatctgtgtcaaaataataacaaatacccatattagaacgagagatgctaaagggcaccagtggtgcctagcaccctcttacgtgtcaatatcgctattggtctaactaagtatcgggtcccatataatttaatataatagtttttaggaagtatcgctagccaatcgcaacgcgacatgtcgagaaggtgctaggcaccactggtgcctaatagcaatgctcatattagaactttcaactaatttcattttttcggtaatggtaatggtaatagtaatagtaataaagttgttacgtaccccatagcaaggacagtaagagtccaagcaatgataccagctgtggcagcagctggtaagctctcaacggtccaagaccgaatatggttgactccagccagaatagaggcggccccaacaactccggcaatcaatgcaaaggtgacgaaaaaccctgtcgccgcatttcccatcgggaagtatatcggggagaaatgagccgggagactaaaatcaggacctgttgtaaataaaaattcactcttaaatcatgaaaaataaaaattcaatttatgacatgaaatttgatatttatttatatttataccaattatgaagccatgatcaatagctctattcatagcccaaccaccaatgcccaaaattacaacatacatgcagaaattaagtaccaaaagtaaagaagcaacagatttcaattgcccagctgccattttagtagactttatgtatggactgaattttgatttttttttttactt

SEQ ID NO: 186804 - DNA, 4230 bp, Cannabis indica
ttaaatggcttaagaaccataaaggttgcatgtggggtgtggcatactgcagctatagtagaagttggccagtctgctgttagtgtttcgtctagaaaactattcacgtggggcgatggtgacaaatatcggttgggacatggaaacaaggaaacttatcttttaccaaactgtgtttcttcacttattgattacaatttccaacagctggggtgtggacacaccatgacaattgctctcactacatctggtcatgtcttcaccatgggcggtaccgcgtatgggcaactaggaaacccagcttctgatggaaaaacaccttgtttggtacaagacaaattggtaggcgaatttgttgaagaaatatcttgtggggcaaatcatgttgctgttttaacatcaagaagtgaagtattcacatggggaagaggtgctaatggaagattaggacatggcgatacagaagatcgaaaaactccaacattggttgaagcattaaaagataggcatgttaagaacatatcgtgtggctcaaatttcacaacaagtatttgtattcataagtgggtttcgggtgctgatcaatcagtctgttcaggttgcagacaagcatttggtttcacccgaaagaggcataactgttataactgcgggttagtgcattgccatgcttgtagctcgaaaaaagcattgagagctgcattagctcccactcctggcaaaccgcatcgcgtttgtgatgcttgttatgcaaaattgaaagctgctgaggctggtaatgcttctaactttagtaggaaagttactactcctcgtcgctccatagattcgagggatcattttactagaggagaaagatgttcaaagctattgatatctcccaatagatcaggtgggaaatcatcatcagactatccatcatcatcaatggttaggacttcacaagttccagcacttcaacaactgaaagatattgcatttcccagctcattgaatgtccttcaaaatgcttggagacccgttactacaccatcatcgcctcatcatagtgtcaacaacaacaccagatcatcttcgccttacaacataaggcgaacaagccccccgagattagcagctcctgtgttttccaggggtgttattgagagtatgaagaaatcaaacgaacatctaactcaccaactatccaagtttcaaaaccaagtaagtactactaatcttatcaaatcttgctcttacttagttatgtttgttgtaatattttatctcttcttcttcaacaggtgaaaagtttaaagcagaagtgtgaaactcaagatgctgagatgcacaaactaaggaaaaatgctaaagaagtagctttgtttgctgagggacaatattcaaggtgcaaactagctaaacaacttgtcaacaacttcacacaacaggtttgcaaataattatatgcattatgattgttgtgagcaagtctcatatcatggtgtgatcgagacaatattactattgtgatgcagatgaagataataataacagagaagttacccccagatgattcaaatatggaaattttacaatcattgcaaactcaagctgaagaatttctagacgcagcaaatgcaacacccgaaatttctactttgcgtaacgcagcacgagctgcagaaaaatctcatcatcatgatcatccagaaactgacaaaccatcatcatcatcatcatcctcttctagagatgatggggcttcaacttcacatagctcagaagatgcatcaaattctcatgaatcttcatccacaaacactgagataggaaaagaagttgttgagttatttgaacctggtgtgtatgtcattcttaaatacaaagatggtaattgggagtttaagcgtgtcaaattcaggtactttacaatactcaagtatctgatcatcttgttagagagacttacattgataaatgtgttgaaacttaatactatacataagatgtatggactactccgctcatagtcaattagttttgagataaaacctcttacatcttaccagacccgactcttaagctaaaaaaaatttccgtttaaaaatataaattacttattttttctaaataagggctttaaaataatttttttcctaacaccgagttctttttttgtagtaaacgaaagtttagcgagcaagaagcagaggaatggtggaatcacaacagagaaaggctatttaagcattatagcaaggctaagaaggcaaactatgcctcaaccgaaacatcttccgatacaccagtaccgacaccatcactagcaccagcaccagcaccaacaccagcaccagcaccagcaccagcaccagatgtaactgttgtgtctgaggaaagctccgaggctacatcatcttcctaatgtggacagaaccaactaggtgtagacattcaatttgttcaaaaacaaaagaaaacaagctttaactcttattactatcacatgagaaatttaacttgaattttgttcaaaatgtagggacataaaatgaggttgaagataattctttgtaatctttttcttgagatgctatatacttctttgctgttactcatttttggttgtatagtatatttatactgtccaatattaatagcttttattattattattattattattattattattattattattttatcaagtgtttatagaagctctattcttatatgagttaacatacatttcaaatcaaaataaagaaaaaagaagctctaatgtatcactttattattttaaattataatttcaatttacattgcaaaaatgaaagtgtttttttttttttgaaaaagaaaagagctaaaatgaattttatgatgaaggagataccttgttatttgttatcatttcctttaaattgaaatatttgactataataataaccaaatgtaagtgagaaatgatataatagagattttcgtaccaattaaatatattatattagtatgacattaaattacattattaatattaatcatattgaatatgatggtaaaataaaccaaaatattatatagtagtgtgtgatattatattacacgtctattatataataaagttttggagatttttttactactttcgtaaaaaggtgttttggtatgcctttttgtttcacatatagaattttttttagtttattttttttaataatcgtgtacgttgtaattatttaaaattatctgtaaattttcaaaaattttaaataatttatagtgtcaaaaataaagtttaaacaattacttactgagagtataaaaaaaataatcatgcatgcaataaaatatttaaattttatttttgatattgtaaattattcaatatttttaaaaaatttacatgtaattctaaataattataacgtacacaatcattaaaataaattaaactaaaaaactcttatagatattaaaataaataaacgttgtgccaaaacactctttagtgtaattagacttaccataacatttttatatttttgacatattaatgtaaaattcataaattttaatttagtctcactaagtaattttaagtgagggctaatagcaatttgcaaaattgatacctaataataatgttctactctataaaattagttgagttttcatatagagtgggataatggggacaaagaccattgatggatcacctaactttagtaactgaattcatatcaatatcaactgtaatctccctaaattaattaattgatatttttttttattaaatattcattaacaaaaatatatatttaataggaagtttccttagcaaatttgattacatgatttaataaattctcaccaaagtttttatctttgacatttgatttaaattatatgaccctttctatttcttccccactaagaaattatctatttttcgcatttaacacccaaattaaaactaaaaatccttacttttttcccggaaacttagtgacactttcccgggaaaatagtttttttttcttttttattttccctgggttagatagtgttaaattcgattccttccgacactagtagaaaaaaatttgattttgtttttcctttcttttgttgaaagattagatttttatttcgtatagaatgggacaacagcaatccaaggatgagcttctgtatcagcaagttagttatggaaataccgaagggatcaaatccctttgccga

SEQ ID NO: 186805 - DNA, 2335 bp, Cannabis indica
gtttcggctgatatgcctccatttatgcagatccatgctgtggagtttgcaagaaaagctcatgatagcttagaaaagttcacctcaagaacacttgcctctgctcttaagaaggtaaaaaaagaggaaaaaaatgttaattaaggctaatttatattgctttattgttaaagtaacattggatttgtacacactgatttgattccgtggttgatttagaataaactgaatagtggggttttgtgttttcttcttatttttgtgcaggaatttgatggggtgtatggaccagcatggcactgtattgtggggtcgagttttgggtcgtttgtgacacattctgtaggtgggtttctatatttttcaatggatcaaaagttgtatattcttttgtttaaaactgctgtacaaagagctgattgaagtgtttaataatacatttgagaaaaagttccaagaatttttagtgtagggaagtgagttgaggagagctaaaaataatgctttgtctcctcttttagattgtatattggttacccttatgggaaaaaaagtaatagagagatgattctgttctgtctcctttgcttttttggacatggacctattttaggtggtctagtatatcttcctcttatgattggggtcagtaatggagtagaaaccccttttgataagaggattatttactacctctgagtatgatctatatcatggtaatagttatattctttacatgacagcataggtgtaaaaaaacaaaaatacattgcaatgcattactttcatttcatttatggttaggtagggttgcatctattgattattattgattaatgtatttatacttagaattttagatcagtaggtaaaaaattctgtacattaaacaaactaactagtggatgagctgtgtaatggtccatgggacagcccttctgtttttattttgatgctagattagattatggttaatattactgtacttagaccgaatcacataattaagtgatcaataatagaataagataatgctggtcttttctctcttttattttattttgctagatggaatatgtgggtcatgatgagtaaaatagaagagatgtcagtgtactaaatgatgtaaaatgtcatggattagcttggttttctttctgggctgtttacgtacaggtacagactacagggtaatgccttggctgcaaaagcatttatatccaatagggtgatgattgctgtgccactattataagcatttaagcttatgacaccatatagcatagattaatgctaaagggcacccatagcctagcatattctgggaaatttcatgtggtgagtaaatttgtttggaagtaatagctctgtaacagcattgttttaggtctccagttatttactcctggtggcggaaattggaaataatatttgccactccttggctcctattaacaacatgaaactctatgaaattcttaaaataacatcactgattttacactaaacagaactctgagggtaccatcgcacatggtctttttagtgtaaatttaggctcgttggagggactttgattgaagattgtttgagggttttgcttttgtgctttgcgaatgaaaatgtcctttagtgttatttttacaaaacacttaccaatcaatcttgcccttggcctattgtagagggcaataataccaagccaatattattttgtatgtgtgggttttaattgaactctgtcccaagcaaactatcctatcttaggtactcttccatctgtatttatgagtgtgatatgaattctatatttataagtgactctgattacaatctatatcactagtacaacaaatcggcgaaacatatatatgcaatgtaattttaaaatgtatttatatttcatgagaatgttgattgccttttatactacaaacgtcaaagcgttcaaaataaaaaccattttttcgtacctagggtcctctcataatcagaggacaaggacaaggacgttgtaacacttttaacattatgaaagggtcccttaaaaatattatttaacttggtaggcctttgtgttctgttagcagcagcaacaatgagtgcttctatgatttacgaacccattaataatgacttcattttcccaagagaagataaagaactttaaggaattataatgtcattaaccctcaagatcatttgatcactttgaacccggaggggttggttggcctaggggtaagggcatatgttgagatgttcgggtaagtgccaggtttcaagttccatttctcttagcatcaaaatctgttagtcactacgaggtctctca

SEQ ID NO: 186806 - DNA, 1066 bp, Cannabis indica
acagcacattagtaaatcgtaattttattttctttgtaatcatttcacggttagttagtgggaaagaatattagccaagtataaagcttatgtactaatgtagctctggcaaaaaattactgatataacgtctagtttgatgagaacaacaggataaacattactttgcatcttgtagtaaacagaaatcagaatgcatgattaaatgacataatttgcaaaacagtgatctcgaaattgcatgacctctagaggtatttggaagactattgcgatgctggaggcctagacatctgctgtcccatgttgggaggcggtggaggcaagcgaataccctggtttggcatttgttgacctccaaaaccaaaatttggcattgggttaccggcagggggcagaggaggggcaggtggagctccaccaggaggcataggctgcgggccatttgccataggaggaggtggtggtggtggcaaggatccaggtgggggggctctaggaggatttcccattggtgcaccaggtgcttgagtctgtggaggtggaggtggtggaggcaaaggccttgacggaacaccaggagcacctgtaccgtttgcagcaggagcaggtggaggcttgctcccctctggtggcttggttttgaaatacagctgtaactggatattgaaacatcccatacaccaaatgttagataaaaaccaacttaaagcatcaaatacttataatacaattacaattacagtataaaagataaatcccttccaaaactaatataaacttagcaagagttgatggactagcacattctagtatttcaaccaccactgactcaaacagccaagattcaattaacggtaaagaacaaagtggcacatagtcagatcaaggaactttctgttttctcatggttataagaaaattaaggagtgaaccaagtgctgaaaagactaaccgtgaacattttcgagtctggatcccaatgagagaagaacttaggtgtagacttgtctatctctgtgctcggaacctgaaatggaaattcactaaaattactctaaagaaa

SEQ ID NO: 186807 - DNA, 4135 bp, Cannabis indica
cttttttgctgatatttacttcaccatttttttacaggatcacagagagagtgaatgataggtgggaagtttgtgtgagccttagtgatgggcaatttcaacaggtatatgaagttctatgttaattatagtgctttgatgctgtcctgtacttttataaggtagtgagtttcattctgattatttttctgttgttaaaacaggttagctttgtaaattcgattgccacaattaagggtggaactcatgttgatcatgtcacgagtcagatcactaaccatgtcatgaccgttgtaaataagaagaacaagaatgccaacttgaaagcccacaacgtgaagaattatttgtgggtttttgtcaatgctcttattgacaatcctgcttttgactctcaaactaaagaaactcttaccattcgtccaagtagtttcgggtctaaatgtgaactgccacctgagttcttaaagaaaggtttgtgggagaagttctttgtttgtttatgtagtaactgttaccagtgtttatctgtgcatattatttatatttgcttttcttattcagtggcaaagtctggcattgtggatagtcttctttcctgggctaacttcaaacagaacaaggatcttaagaaaacagatggaaccaagaccgaaagggttcacaacatcaataagctggaggatgctaatgaagctggaggaaggaactctgagaaatgtaccttgattttgactgaaggagattcagccaaggctcttgcagtaagttcaatttttttctcatcaattacttcattcataatatgaactgaactagatttcattttaactcacttgtgttcaaatagatggctggactctctgttgttggtagagaccattatggtgtttttccattgaggggtaaattgctcaacgtaagggaagctagcgcaacccaagtaagggataatgaggaaattaagaacatcaagcggattctcgggttgcagcaagataagcaatacgccaacgtgaaatctctcagatatggtcatctcatgataatgactgatcaggtttgatttctcgagtctcttattttaaataatatcgtttcaatatttttttgctgatcctttatgtttttttacaacaggatcacgatggttcacatatcaagggtctattgattaatttcatccattctttctggccatcacttctgaaaattccatctttcttggtggagtttattactcctattgtgaaggttggtgtctttatgctctgtgtttgggtttagtttatggaatacctgtttttgaattatgaatactaactgatctgcaattggattttacaggcaactaacaaaaatggaaatgaattagcattctataccatgcctgagtatgaggcatggaaggaaagtttgaggggaaatgcaaatgggtggaccataaaatactataaggtttgtgttattcaacttataaagtaaggcacttctataattatagaattttatgaaccatcataattttctcgttttttatgaacttaacttattatgtcttacaggggttgggaaccagcacatcaaaggaaggaagggattactttcaaaatctggacatgcacaagaaagatttcatgtgggtagatgagaaagacggtgaggcaattgagcttgcatttagtaagaaaaagatagaagagagaaaatgttggctcagaaaattcgaggtatgaaaagggaactttatatatttttctttggctgccatagatggtgaagaaatttttaatcttttttattgttgttgttgattttcagcctggtactcacctggaccagaaggaaaagctcattaagtacagggactttgttcacaaggagcttatcttattttctttggctgatctacaaaggtccattccatcaatggtggatggcttaaagcctggtcaaaggaaaatcctcttctgttcttttaagaggaactttgtgaaagaagcaaaggttgctcagttttctggttatgtatctgaacattcagcctaccaccatggtgaggcaagtcttgccggtaccatcattggaatggcacaggattatgttggtagtaacaatatcaatcttttacaaccaaatggtcagtttggcacacgtaacttggtaaatgagctctgcccacttgtcaaagtttcaatctttatttaattatttttacttactatgccaatttctttactatcagggaggaaaggaccatgctagtgctcgttatatctttaccaaattatctcctatcacaagaacacttttcccaaaggacgatgacattcttcttgactaccttgatgaggatggtcagtccattgagcctacttggtatgtgccagtcattccaactgttcttgtcaatggaagtgaaggtattggaacaggttggagttcttacattcctaattataacccaagagacatagttgcaaacataaggaacttgatcaatggtgaggaaatggttccaatggctccatggtacagaggattcaagggaactattgagaagtcttccaaggatggaagttacaataatagtggggtgttagaggaaattaatgagacaactatcagaatctctgagcttccagttcgtaggtggactcaagattataaggagtttttggaatctgttactcgtggaaatgataaggcaaaggatccatttattgaagtaagttagttagcccatgttatgatctgttttaaatgtcttgaaaagagctttagtttctgattgtttttatgtttgctttcaggggtttacacaacacagtgatcacagtactgtggatatccttgttcatatgaccgaagagaacatgatggcggcgaagcaagacggtttgttgaagaagtttaaattgacaacttcattaaacacaagtaacatgcacctgtttgatgctaatggcttgataaagaaatatgatactcctgagcaaagtaagcatttattccaagatgatgttatgtcaacactggctaaccgttaatgtttttatacttatgttttccttttatgtttcttgtgcagtccttgaagaatttttccacattaggcttgcattttatgtgaagagaaaggtattttactggtcctgtagtttttttatccattagtaggatgtgcagctatttacataaacattttattttatgaatgcagaaagttctattggataatctagagttggacctattgaaattggagaacaaggttcggtttattcttggtgttgtgaaaggggagattgttgtgagcaaccgaaagagagctgatctcttcattgagctgcaacagaaaggttttactcctttccctaagaaaactaaggctgttgagccagaggtagctggagcaaccgatgcaacagatgataacgaggatgatgctgaggctgctgctaccgaagttcgcattggtgattatgagtatctgctgtctatggcaattggaacattgacactagagaaggttcaagcattgttggccgaacaggataagcttaacagccaggttgatgaattgcgaaaagcaactccaacgtcattgtgggctaaagatcttgataatcttgagagcgagctgaatgtatgaatcttgaaaatagcaagactatgttatcattccccaacatttggagtttcaactgactgttttttttttggtttactttcaggatcttgaaaaaagtgatgcattagcagaggagctgaaaaagaatgcaaaaggccaaataaagaagggggcagtggctgcttctaaagtttccagagcagcaccgaaagccccacgcaagaacaccaagaaggcggcgaatgctgaagctgttgaacaaatcactgaaacatttaattctgcaatggatattggtaagctggattagttagttacaagcatgaattttgattttatcttcaacattgttattctaatgtaatatttatcattgtgtatttcagagaaacctccagagaaagcgaaaccaaaagccagagcagccccaaagaaggctgctgctgctaaaaagaaggtatggcttgtttctttcccatgatctctcaaaccttaacaaga

SEQ ID NO: 186808 - DNA, 1375 bp, Cannabis indica
tcttgtctatggaggtggagatggtaatggtgaggttatgctcttgcttgaatgttatgttcatttttgttgtaataatggtgttctatcactctattttttattacggtttttcaaagacgatctactttgctatgtatcagtctaaggttaagatttatcgaatatacctattttgctcaaattatttatgtttatccttctaggggatgttattattatcgcgttgtatgttctctctttataattagcgtaatttattgtttgttcggttatctttatgagatttatgggattttatttttgtttaagttatagaactttaatggatatatttttttttattattaataaaaagaaaaacattaaacactaaaataaatgtagttagaccataagagcacaaccaaaaaaacatatcaaaaccaaaacttagagaaagatcaaagaaccaactaagtgttgatatgctcacaaatttttcatactaaattattatacatacttatgtggcaaatttttttttttccaataatcatattgatttgagatggatttactaaattaagaaaatctttctctaaatatttgtgaatctgtatttttgtaagattttatgtttttcatataattttttttttaaaaagtttgagattttttttttaatgggggcctattccaagtttaagcccaatttttttagaggacttaaaaccaaagttaagaaatcttgaaacaaatgtgagagaataaataatacatagttttggttcaatttgtgataatagatattaattagcatgattgataactagcttcacatctaaagcttacattgaatagaaggatacattatattcaatttccatataattaaataaaaatattgttacacaaaatatcatttttggtttaacattatagggtcaaaataatttattttctttagatttttacaatttccaataatttttattttcaattataattttatagagtcttttataaaagtactatgagaaatacataaaatctactagaaaacaacttgaaaaagcataaaaacacaataatatgaaaacaacagtccgtatttttgtaaaagaaaaattgatttttgtaaaaatatttaaaattttgtactactatttttgtattttgttttgggtaattatggaaaattccttaaaaataaaattgttataatgtgtctgtattattcattaatatttatatgtaatattttaagaaaaaaagacatcatagtgttattagagaagttaattattatcataatttattggttgcatatgacttcaaacttgaaatttgtagatctaagcaaagataatatacatatatatacattatatat

SEQ ID NO: 186809 - DNA, 2780 bp, Cannabis indica
tatatgtatatataaaaaaaaaattgggacctgtttggtttaatagaaaatgagagggaaacagtttcggtgttaagaaatgaagttgtaagtgattagaaatattcatattattttagcaacagctatatatactaccctggtctcaggtgaatttagatgttgttgaactcgtttttgtgttcaatcaactgttttgtttgacaagtcataataggaatgatattcataatggagcgaggagcgtgggtttcttgaagagtttacttttggtggtttgtttattaatgggttccactgtttggtacttttagacatggaggctcggaaagagagactaataaatgaatctaggaagattgtggagaacataaacgcaatgtcgttgataaatttagatgagcaacaagctcattcactcatgatgattagagaaatagcacaaggaattattcataacagagttgaaagggtaagtgacagaggtgagcctacaattattttttcttttttctttgatattgaaaagatggttagaaaatatacttttattggcaactagttagcattatttcagtttttcttatggcactagaattgagcaggtgggttggtgcaaggatgctaatagcaatagcattctgacaaagatacctggcgaaggtatggatcgagatcagacagaatctgtgtcacaaatgaaagcaatagtgtcgacaattgtgactaaacaagttaaaattgcgactactcggcattgtgaatcagtatggtgattaatcagaatgttggtcttttttccttctttcattttttttcactccattaagctgatttcacttcaaatgtattgatattgcaggttagggatggagttgatgaagagacagtggagagtgtgatccctaaagatagggatgctgaagggagtgaaaatatatttttagaaaatgtaaggactggaggtagaagttgagatgagaaatgattgtctaggagcatgggagaagtaggctaatatttccattgcttgtaatattatgtgttttctattgcttgtactttgttattttttttgtaaagaactttgacaacaattttggatgtataaattggcataattgctgtctatttgctattaggatacacatgagcagccaaaagctgaaggctcctcttcttctgaagctagctttggagcttggatgagctctagagtagactttgaggctttgggtattcctaatcctccttcctggaccattcatatggtggatgatgctggcgttatcaaagatgtccaaattccaagggcacctgcaggcgttgtggtagaaggcctgcctctatcatcatatttgccggtaaagcaatctgtttagttgctccttttaccccttatcactgggtctaaaggtctgaaaattccacttttccccttgtaggaacctcacaagactgcatttgagtatctcttagagcttattgctgctttgaagcatatggtttcaccaagagtgagttgcttattcttttcccttgctgtttactatactaaaatagtgacatcattgttgttattttctgttgtattagcaggagactcagaatggagctggataacaatataaaagcttaccattgtcgattgctgctaacaaaataacaggatatgtattaactccttatgttttggaagctgttgcaatcgcttacagtattcattgttaaaagaatgagtagatcatagtttcaagaattggctcattgcccttgaatgaacatcttatctagaaattctgcttctttgtatatgatttttgtgcaaaaatgtattggaaagatagaaaagaaaagtaattgtctatgctacttgaaagaccaaatttgcctagttactagatcagattaccaagtttattgatgttaatccaattttcaattaattaaatcaattaaagaatcaattgaaagacttcaagaaaaaagagacaacaattttacaagtttcacctgcctagaaacacattttaagcgactagtgtttggattccccaaactaagataatgattccgctaacatgttttgcaaatttataatttcgagttttgtacaatcttgcaaaatccttatagaaatcaactaccctaaacagccaaaatctttggcggcaaaaacaagattcccttacttcaaatcattgaactcccgccaatgatttcttcaatctaaattcacttcaaatataatggtgaggaagcaactaaaatccctttagttcgaattcatcatcttgatcaacaattctgaatcaacatctacgaagttcttcgatcagacctgcaaaatcgagagacaaaatggaaaaggaaaaaccttcgaagcttgatctaaagaataaagatatatcaaagtcagttaccacaataaatagtagtagcttatatattgagagctaactaaatataaattgaaataaccaagacagttgtgacagaaataacctaataatatctgacgtggacaaattaataaaaaaactttctacttatgatagtctaataagctagatgcgactagacataatctgtcatgaaaacacacttttatcgcttatttgtttggtcagttcaaacttcaaaatttagaagtgaagttaaaaagaattaagaccaaattggtttagttgtattcttctaattattatatttaatacaaagtatcattggaattgacaatttttaagactaagaaaattgagataaatagattgcattag

SEQ ID NO: 186810 - DNA, 2455 bp, Cannabis indica
aaaaatattattttattttgtactctaataatataattttattacttaatattaattatttgatttgaagcactgctttttattatttatatatactaactataattaaaatgatgagtgagaaaatgaggtaaagaacaaaatgttaattacaaaaaaggccccaaaagaagaggatttcgtgtaaagccaccagaaagcagatttttctcgtttcccaaaaccccctctctataatacctttcaaacacagccttcccaaccttcgagaaacctattgtgtcttgtgaatgtgtgtatatataatacggtatatctacacacacacaccactatatatctcctcatcttcatcttcatcattttcatttccaaatatctttcttacacttgttcaccattactatttactactagagttaggctaagctaagacatataagctagatagtgaaaaatggccactgataaggtggttgagacagtgatagtaggaaattatgtagagatggagactgaaggaaaggctaaagatgtcaaaacaaggctctcaatttcttttggcatggtggctctgtttatgatgcttggtttagctgtgcctcaaaccaggtttatattattctcaaatttaccatcttttcaataccatatgcaataaataataccacccttattgtctagtttctaccagttgattaagatgatctttcttttttaacaggtggctcaagttctgcttacattgccatactcattttcccagctgggaatgttatcaggaatattatttcaactcttttatggcttattgggaagttggacagcttatctcattagcatactctatgttgaatatagaacaagaaaagaaagggagaaagttgatttcagaaaccatgtcattcaggtaaattattattattattttgacaaaaacaaatctatatatgaattaattttaatatatttacattagtttagtccaaatctcacatgagtatctgtatctctcctctctgtttttatcatgtagtggtttgaagttcttgatggtctccttgggaagcattggaggaacgtgggtttggcatttaactgtacctttcttctgtttggatctgtcattcaactcatagcttgtgcaaggttctttcttcttacacatctctctgaccctctaactttaactcttatccttacatttttatataacattaataataaagaattcgtatatatagttactttatgttttttaactggggtatcttttaatttttaatttttattttcacagtaacatatattacataaatgacaatttggacaagagaacttggacatacatattcggagcatgtttgtgccaccacagtttttattccttcttttcacaactacagaatctggtcattcttaggcctcttaatgaccacgtacactgcttggtacctcaccatagcttccctactccacggccaggtaataatacaaattcattgttggtatataagtttagttttattattatgttaataattaaattaagtttggcaatttattatgtgttgtttgtgtgatcataatatagattgaaggagttaagcactctggtccaactaagttggtgctatattttactggggccacaaacattctctatacgtttgggggacatgccgtcactgtgtaagacaagcataaattgataatataatgtctttatcgttatgttcaattttttttcccatatgttatctggctttggtcttctaagttttgtttcattcatatatgctcttatgtatcgtccctagaaaagggtttggttttgagcataaaacgtggtctaaacgtcatattgaaagtgactaaaccttctttttttagacaagacctgactataagatctaattaccaatctttaatcaagaaaataaagttaaaaacatggacaaatattcttttcttttttttaagcgtggctggcaacatgtccttttcgttttttttttcatggcgaaacaacttgtttttttttttttttgtttaatttggaaaagcgaaaactcttttctcttaatttgcttttgcttttatcatgagaaaacaccaaaaggaatcatgtttttatattcgaaggtcctccaataattacaatattccctttttacaggggaaaaaataacaataataattattatgatcatgagccaaccccatctcccacatttcgtattcaacctcaagagtgtttgaccatagtattatgcataatacagtagaattaatgagtaaattaattttggttgaaacaacagggaaattatgcacgccatgtggaagcctcagaagttcaagtcaatttatttagtggctaccctgtatgtgctgacactgacacttccatccgcatcagcagtctattgggcatttggagacatgcttctta

SEQ ID NO: 186811 - DNA, 6520 bp, Cannabis indica
taataatacttaagttataatcattaaatcatattcatgaaccatcaaccaattatatataaaaggctaattaagatttttttcccgaactttcatatctaccaaatcaaatcatgccaaaaaaattctaacatggataaaagtttagagagaatttttgacgaccaaagaaatttaggggacataatttggtacatttcaaagttcgggaaaaaatcgtaattagcctacataaaacggcaagtcgtttaacacaaaccccattcaaaaccctactccactgcccaactgtactccttccattccttcggctctttcgttcttcttcttctgtatcagtactcagtagcgggggttgctggtggtggtgggcggtacactatgtcggctttgtccagaggtggtatcatttcccgtttccgatatctctcactcactccggctacaacgtcctgtactagtagtagaagattctgtagctctgattcattggtagatgcccatgaagccactcgtattatcgaagccaagcccggcgtcatgaccccaaattcaaggcgacctggtctcatcgccatcaagtgtggtatgacggcgctttgggacaaatggggtgctagggttccaatttcagttctctgggtcgatgataatatcgtctctcaggttaagactccggaaaaagaaggcatcatttccttacaggttttcttcttcttcttaattattactattattaccaatggaaaattgaaaggaaaaagaaaaataaaaataaaaagtcatttttatttttcttattctaatgaagcttgtttcggtagttagatcggttgtggacagaagaaagaaaagcatttgaccaaagctgaagtgggtcatttcagagctcaaggtgttcccatgttaagaaaattgagggaatttcctgtaacagaagatgcacttcttccagtgggtacttcattgggtgttcgtcattttgttccaggtcaatatgtggatgtaacaggaatcacaaaagggaaaggtttccaggttgatttaccataaccattttgtaataatactaatattaattctgggtttggatctgttatcaaaagttttatgctttgctatactttgttgttgttgttgttgttgttgttgagttgtgaagatcaacatttcttaatgggtgtttttttgtgtcttaaaagggtgtgatgaaaaaatatggatttaaaggaggcccagcttctcatggtgcatcattatctcatcgaagtcctggttccaccggtcagagggatgctcctggaaaggttttcacaagttcatattttaaagcctcatttctgattcagtattgttaaatatatcaacacaaactaaaacagttaccttctttttgtttcctctctttggatattatgaacaggtttttaaaggcaaaaagatgcctgggcgaatgggtggccagcaaagaactgttaaaaatgtttgggtttacaaaattgatcctgcaaggaatttgatgtggttgagaggccaggtatattttcttgtgcatgtacagaatgaaaatcttccctatttatatctgatgatcacaatggaaaacataaattgtattataagcaattcattggagatgtttgtgtggttatagacactgaaaccgctttcattgtactaagtactttgatatgttccacaggtcccgggtgctgaaggaaactttgtatttataaaagatgctgtttataagaaacctgacatatcacagcttccattcccaacatacttccccgccgaagacgaggagacagcagaattggaacctctggttgctgatcttggggaagtagatccattcatggtggcagattaatctggatccaagtgttaaaaacaccctgaagaagtagagtcaggttggtcagcttgattagcttgtgatcattgcttttgtagtgaaacatacagtttggcagacttgttgtgagagcaatgtggaaggtggctagagggaatgtaatcttcttatgttttgagtggattcatcctcagaaaattttgaatgtggctaacctttcattgaaactgggtgaatgaaataagtttagaaagttgttgatactatgagttgaacattattttaggtcatgcatattgacaagttccttcaaattttaaggaagcttttcaagttataagttttattttcttatgtctgcataagacaaccatgccttggtttgtaaccggaagcgagtagacaattcatcatcctatatttcccccccttttttcggtatttctttcatacagtcattcatttactaagcatagttaaaaaataaggaaagtttatcaattatgaattggcaaaatgtgagtgctcatgatccatagaaacattgtttgatcttgtgcttttgtataagtttgttctgttttctcattcatttgattctatcttgttgtttagaagtgttttgaataaattagtgaaaataatataatgagttgaggtaaaaggttgtagtgtaaggtgcacatcactattattttaaccggcaaagaacatttacctcaaatgatagggagaagatttgggccatttgggatatctggaaaaaaaatccatgctcatgtacagaatgttgtttgttgaaatggactgctaaaatacaaagttctaattaccatttaatcacttatatgtgtatgtatatacattaatggataactgtatttgttatctatgcaacttgatcactactattgcagtcttcaacagtgaccccagataattaacgcaggcctttttctgccataggaaaaatccaaatcaaacagttttaactgcataacaattattcagttcccacacgcaaagaaaattgtacaaaatgcaaagttgtatctatagtatcaccatgaattgttaaataaggccacaaagaatgaaagaaagaatgggataaagattgagctgaccttgttagtgttagaaatcagaacgagaaacgttaatcatagtacttttgtttagttacatacttgttttagtagagtactattgtattcattctccacgaagttacctgcttctttccttatatgtctaatccatataacgtttaaagtttaaccaactaagaactcttcattctttctagtttttaaggcaaaattatcttcatacttatgtatgattatatgaatgttatgtttcaaaagcaaggtttttgacttcatcccagatagattaactgtatgactgtgactatgaggatcaaaagttttcttcttgcactctctatgttatcctcctccttggttttcgctgattcggataatgggtttctgagaataagtctcaagaagtggcctttaagccttaaaagattgaaagctgcaagaatcactcataatcaatatacatccactgaaaataacatgcaagctgttatatatttgaaaaattatctagatattcaatattatgcagagattggtattggttcacctccacaacctttgactgttgtgtttgatactggaagctcaaatctttgggtcccatcttcaagatgcattttttctgtgagtgttctctgttctcatgattattgaattatgctttgtctagtcaagtcaagtgttttgacaacttttgtaaatgttttctatgcagattgcttgctatcttcattctaagttcaaagcaaggctctcctctacctataccaaaattggtaatcttctcatgctttactattaatttttttcttataagtgtgtgtcaaatattatcatatttattttatttgatggtgtaatcaagtcaatagtataagactcctatttattattaaattgttggttttcattttttatttaggaataccttgtaaaattccttatggttctggatccatttccgggttcttcagccaggataatgtaaaagttggagatgttgttgttaaagaacaagtgagtttttttgcttaatgatccatcttagtatttttcttgtatataattgtttcatctttcatttaattaatgttatgtatgttttggtatttccttcaggaatttgttgagatcacaaaagaaggacttttagcattgttaggggcaaagtatgatggggttcttggacttggatttcagaatatcgccgttgatcaagccacaccagtctggtatgtaatatgtatagtttcggttatagattgtgtcataagattttgtagtgaacacaaacacaaagagacttgttgatttcggtatataggtataacatggtaattcaaggccatatggtccagaaagttttctctttctggataaatagagatccaatgtcaaaggtgggaggcgagattgtcttcggaggtattgattggaggcggtttactggtgaacatacttactttccgattactcgaaagggttactggcaggtactttttgtaatgaaggttttgttctctctttattagtacttcccagttactaaacagtttaattagttatgttcttgtttccagattgaggtgggagatgtgcttgttgctggccagtccacaggttacattgactctctaaactttcatatttttcttcctatttgttgttagggttgttcatgcaatttgcaatcgctagttcctaaatctcaaccaattcagacgaaactgtttgagacaggatcaaatgaatctggtgttaatggtttggtcaatctagataacttatgattctcttattcggtcatggtttaagaattttcgctagcggtttaaactaaatcaaaccgtataattctttatatgtacttgatatgtttttttttttatgatgaaatattgatatttgggataatcttagatggaatattgatattgttttaacattatttttgagaatattacaattgttatttatgtgttataaattttcagtaaagacaatttaattaaaaaagaaacaattatataaaaaaattagaaaaatcacaaaattcaaaacatggtttcgaaaccgtaataaatgatttggttcggaagaaatgaaaatctggaccaaaccaatctgtaaacaacccaatttgttgtataatatgtatgaaatttcaggccagtgtgcagctggatgcggcgccattcttgactcgggcaccgccccttgccggtccaactgtaacaatcatgcctcaaacttaatatctcttgtttaattactcttctttaatccttaatttaatagctcttgtttcatttccaggcaattgttgctcaaaaaccttgctattggagctgaaggaattgtaagcttggaatgtaaaaatgtagtttcaaactatggaaatttcatatgggaatacttagtatcaggggtatgtatgtttcttgcttataatttcttatcatttaaagtaatgaataaaatgctttcatataattttcaaatgcttattgcagttgaggcctgagttagcatgtgtagatattggactgtgtccatataatggatcaaaatatgtgaggttgttatcaactttcccttctctactttcttgtaaatctttattttgatgttcatgacaagaacaagatttcttcttatgcagaaaaaacattgagacagtattagttcataatggaactcgatcgggatcggttaatgagactcccttatgtactttctgtgagatgattgtgttttggtttcaagtacaacttaaacaacaaaaggcaaaggacaaagtattcaaatttgcaaatgaggtaagttttgacataaaggttggagctgatttttcaattgtaaatactataactaattaagaatcttctctctcaatttcatgatcttaaagttatgtgaaaggctccctaatcctttgggaaagccatttatagattgtgataagattggagtccttccagatgtaacattcaccattggaaacaaaaccttctccctttcctcggaacaggtgtgattcgttcgcctccttttcttacacacataatagttgttaggactttaaacttattcgataccctgtatttacgagaatacagggtaccagataagtattattgaaaatacagagtaccaatatatgagtacacacactcgaatcaatgttgatttctattgaaaatgtatttacatgtttttcatttcagtatatactaagagttgaagaaggttgctctactttttgcattagtggatttgtttccttggacattcctcctccacaaggccccctctggtaagtcatgtagaattcatcgaaactgataaatgtagctcgattcggtttacattattgttgttttatagatggaaattacaggattagtatgtacaattgcagggttcttggaaatctgttcttgggagcgtatcataccgtgtttgatttcggaaattcccagataggattcgcaaaagcagtgtaatgacagtaaactgctaagctaaggccatctccaatgggaca

SEQ ID NO: 186812 - DNA, 1733 bp, Cannabis indica
tcattaaataaaaaaataaaaataaaaaaaaaaaagtgtttttttaagagaaattttttgcagacaattgactcactgtttgagacgacatgaaatcgtgtattgatttttaatgcctaatctgtttttcattttctgattctaacttctcccattcagaacatatatatatatatataattacaacttcttggtgtaaaaggaggatgaagctaatacaatcgaacctggttcgtcgtctttgtagtttaatacattctcaatcataccgaacgattcgtttcgacggagctaagccgcggccccaaccagaaagacgtcggccatcttcgtctaagattcgcaatccgacaccttttgtgtccgatgttaaacaagtaaacgacccaggtgaagctctgtctctgttccatgagtacacccaaatgggtttcaaacacgagtactcttcctactctgctctaatttataagctggctcgttttgggaacttcgaaattgttgagaccattctcaatcaagttcgagaaaggaacgttcggtgcgaagagaaacttttcattgctttgattcagcattatgctaaggccaatttgatggagaaagcaattgagatttttgacaagattccatctttcaattgtgaacggacgcgtcagtccttcaatgctctccttaatgttcttgtcgatggtggtcggttttctgatgcaagagcggtttttgatcgttcctctaagatgggttttcgtccaaattcgatttctttcaatataatgatcaagggttggcttgaggaaggtgaatgggaagaagcgtgtaaggtgttcgatgaaatgcttgagagaaaagttgagcctagtgttgtgacttataatagtttaattggctatttgagtaaaaaaggtgagttggatagatctttgggcttgcttgaggagatgatcaagaaaggaaaacatcctaatgttgtgacatatgcaatgataatggaaggtttgtgtttgttgggaaagtattcggaagcaaagaagatgatgtttgatatggattatcgagggtgtaaaccaaagcttgtgaactttggtattttgatgactgatcttggaaaaagaggtaagattgaggaggcaagagctttagttagtgagatgaagaaaaggaagtttaaacctgatgttgtgagctataatatattgataaattatctgtgcaaggaaggtaaggcaatggaggcatataaaattttgatggaaatgcaagttgaaggttgtgaaccaaatgcagctacatacaggatgatggttgatgggttttgcagggtgggcgatttcgaaggtggtttgaaggttttgaatgcaatgctgagaactagacactgtcctcgtttggaatcgtttagatgtttagtgataggtttagtgaagtgtggtaagcttgaagatgcttgttttgttcttcgggagatgagaaagaaagatatggaattcgattgtgaaggatgggaagctgtggttgtagaattgtgtggtggtgatgtggtttcatgtagcatggtaactgaactaatttctgcagcctaggagtgtgacatgaatagaattttagtttcactaagattactaactatgtttgcaagaaaaactcatattgctatcctttggcctagatgagtgttacaaagatggatggaacttttgattagtgatgtgaaagggaaaagtgataacaaa

SEQ ID NO: 186813 - DNA, 1178 bp, Cannabis indica
ctctctctctctctcttttgttggtgggtgggttggggtggtgggggtaatatacattaatgtgttaaaatatttgtgcgagtgtacggaaagatgatggaatagtttttatatctccagaaatctcccaaagtttatgcagtttgacatctaaagaaatttatgaaatcttcttcctttgatttgggattggactgtaatattgttggtactttagacttagatctgcaggtgtagggtacatataaattttgaccctttggaagttttccactaaagcttatttcctcgccaaaagcacatatgattgatggtagaaataactgttttgttgtaagttttcttaagaagaattaaactgtcctctctgcaattttaggtacacacatgcattataatagctatttgaaccactttgaacttgattagaggttcccaacatgagtgctgtcgttagtggactttcaacaaaataattaagacttagttatccttgcttataatacgtacttgtgatttataaacagaaaaattttaggattctagccctaatttgttcggtaaatattaaataatactgattctggatctgcagatggcaaatggcctgacttaatgtaatttgacctgctgtgcaggaggtggatccatgtgaggacttgactgatgatgacattcgaactgccattcaaaatgcaactggtcctaaatctgcattgtttgtgccagaagtatgttttcttcgttttcctcttctatttggatatctccagtaaattaatatatcttttattttatttgccatcctctaatttattctattatgtgctgtttgagcattttgtgaaacctttgtatgcataggtgccttttgaagtacttattaggaggcaaattgctcgtttgttagatccaagtcttcaatgtgccaggttcatatatgacgagttggtgaaggttgtctacttccatacaaattgtctctctacttccatacttctttggtttgattctcgactaacaattttttattttcagattagtcatcattgcttagtaaatgagttgcaacgattccctgttttgagaaagcagatggatgaagttatggaaacttcttgcatgaaggccttgagccttcagagacaatgattggacacataaattgagatggaggt

SEQ ID NO: 186814 - DNA, 2605 bp, Cannabis indica
tgatcgtcctataaattacagccccctgtcacttacactttcactctcatctcatcccaagatcatatacttttggatctctctctctctctccatttatatatattatatacacaaattcatagctcaagctatatattaattccaaataatcatggatcaactacagaaatgcgaagcaaattacgtgcctctgagtccgataacattcttgagaagagcggcaacctgctatgaaaaccgtacctcagtgatctatgaaggcactcgctttacatggcgtcaaacctatgagcgctgctgccgcctcgcatcctctctccgttcgcttaacattgtgaagaacaatgtcgtaagtatcaattacttactatttttctcaattctttcatcaataaagtgaattaaatataggtgtataatatatatatattcaggtttcggtattggccccgaatattccggccatgtacgagatgcatttcgcagttgccatggcgggagctgttctcaacactatcaacacgcgcttggatgccaagaacatcgccacaattcttaaacactctgatgctaaggtgttctttgtggattaccagttagtccaggttgcaggagaggctctccggactctaatggaggctgatgagccgtctaacatgccattggtcatcgtgatagacgacatcgatgtgcctacgggaacccggcttggtgagcttgagtacgaagacttagtccatagaggtaaccccgacttcgttccggttgagttgaacgacgagtgggatgcgattactctcaattacacctctggaaccacatcgtcacccaaaggggtggtttacagtcacagaggcgcctacttgagcactctaagcttggtactcggctgggaaatggggacttaccctgtatacctctggacactgcccatgttccactgcaacgggtggactttcacctggggcgtggcagcacgtgggggaaccaatgtttgcctccgcaacacaactgcatatgacatgtacagaaacatctctctccataacgtcacccacatgtgttgtgcaccaatcatctttaacattcttcttgaggccaagcctaccgaacgcctgaatatatcatctcctgtggagatccttactggtggcgctcctcccccagcaccactcttggaaaagattcagtcacttggcttccacgtgactcacgcttatggcctcacagaggcgactgggccggctttggtatgtgaatggcaggcccaatggaacaacctcccaatagaggaccaggctcgaatcaaggcccgtcaaggaatcgggattttgggcctagccgatgtggacgtgaaggatctgagtaccatggagagtgtgccacgtgacgggaaatcgatgggcgaaatcgtgctaagaggaagtagcatcatgaaggggtatttcaaggaccccaaaaccacgtcccaagtctttaaaaatgggtggtttttgactggcgacgtcggcgtcgtccacccagacgggtacttggagataaaggacagatcaaaggacgtgatcatatcaggaggtgagaacattagcagcgtggaggtggagagtgtgctgtacaggcaccctaagattttggaggccgcagtggtggcgatgccgcacgcaaggtggggtgagagtccgtgcgcttttgtagcactgaagagtgactgcggtggtggttgtagagatgtgttggagaccgagatcttgacctattgtcggaagaatatgtcgcactatatggttccgaagaaggtggtgtttgtgacagagctgccaaagacatcgactgggaagattcagaagtttgaattgagggctatggcaaagacatttactgtcatggaaaaagagagttgtcctaagtacgacactagccagatcattggctcttccaatacaggggatgctgttacggggtacaacgtgcaagtcatggccttgtcccgtctatgattcttatttttcagcctttttttctagttaagggaaaaagttatggttatggtttcgtgatgccatatatgtgacaacttatggtgctaatttacacaatatagggaataacagtaatccttattcaaaaatgatttctgtatagtcaatgtttgtgtcggtgtgggttgagtgggtgtaagctttcatgtagcaccattgttcttttacaatccacccttataatttacaaagaaattacaaattaattatagtatttgtgtcatctctagaaaatacacttgatgttgatacgtggtttgctaaatgtaaaattactcaaaataacataaaactggaacataaaacctattttaagtacttcatgagtttccaggaaaacaaaaaacaaaagtacttcatgagttggttttaaaaaaaagccccagtttttatattccctataaaagatcattaacattgttatacataaaataagttttttttgttcgatatccataagataagtttcattcactaaactataccgaaaaattaaatatatttatagtatatatacaaaaatatatactagttcaaactgcacatgatattagattccttct

SEQ ID NO: 186815 - DNA, 644 bp, Cannabis indica
tttcatccactttacaagttgaagaaaaaagtagctatcaacacccttatgacatttcggatagatattctaataagagaaggggatctctgtcatcgcttcttcttactttggtaatgactcataaccactgttgcaaagactggaggatacatatttaccgtcagtggtcaaagagcaaataaggtatttagtttaaaaattgtcacaactccattcaacaaccttgattaatttaatacttttttttttggtctattttacaaatttaaatttttatttgttattaaataaaatttggagagctctccatttttggcttgctactttggagaataaaatttacaatactttaattcctttacactcttcatatactactttgtattcatgttgtctaaatgatcaaactcactactcttttatttaggcagttttctttttccttttaatttcacaatctaatccagtactccacatttacaagtagcactaatattcatattgaaattatttttcacttaatagttagaactttgattgtgtgtaaaaacttgagggaacatatatattttatttataaaaatatactcataaagttttaaaattacaataatacacttttacaaaaaaaaaaaagtaaa

SEQ ID NO: 186816 - DNA, 4644 bp, Cannabis indica
gtgattctttttgggtgcttaatttcatttgcattaaccaacatttattataagagaagattataaatgatatggaaagggattccattttcaattccaagattagaaacaattattttaaattttacttcatttttattcttatattttctattctttttaataaaacgtcactttaatatttatttctttgtttagtgcattataaagttttaaaatgttattccaatagaataatttttttatctatttggtagaatgaatattctattttaaaattgaaaaaaaaattaagtccaataatagatgaataaaagaaatcataatttttatgcattttaattttttttttcaattatattcctattttatttgtttatttccatacatattctatattctttattcttatgtttgtatttttcattcttccgaagcaaacctatgtatccctaaattatgcattgtggcttaatcgtatcatattagatatcattcaaatcaaaatggagactattgagtatataaaagtatatttaatgaagaggtaaaagtagtgtatgttatttttaacattttggcaaaatgatacttccatgctaaattgctataatgttagatatgtgttaaatttgaccgccacaaaatataatatggactatatttgtatcataataaatattatcttttttatttaatattttttgccattaatgaatataatttacaaattataactttttaatatatatttaaaagaatatatatatacacttatataaaaaaaattaaataattgttttcgagctcccaaatcaattgtaccatatatatattggagtacaattattaaagttggcccaattatacaattagtttattttttgaatcaaaattgactcataaataatgattaaaaaattgcttaaaatatgttgggattttatctttttttttttaacaaatttatttattttgattagtgctgtaaatatagatcgagttttttgacatgacacgaaatcggcacgagcccgagaagcacgagcatgacccgatacgaaaagaatatgtgtttaggtacaacacacatcacaacatgaaaaaatataggcttagacacaatacgatacgaaataatatgggcttaagcacgacatgacatgacaagctcaaaagcacgacatgtaaacattaatagattagctcgaaagcataacacattaaaatatccatatcaattaaaattatattaattataattatttttatatgattgtgtgtaattattattgaaaaatatataaaagtgactaaaattataaaatacatgtatattttagtatttagttcattaattgtaataaaaatataaaaatatagaacacgaatttaagctcgcataaaaaaaacaagtttgtttatttaagaaaaaatatcgacatgaataaagcactacataaattcaagcacgatacgaaattatcgaacttgtgagccatgtcgggtctaccttataaaattattattgcacggcacgaaacgacctggcgcaactcaatttttttatagtccggcacgacatgtattttaaaaagcacaaaaaatatagaccgaactagtatggcgcaaacgtatttacaattttaaattgcatttaattattttcttatgtgacaatcaaagcaatcaaccccgatataaaaatttatagtgctcaatatattttatggctttatgtgtagtagtagctaacaacccttctagattttagttatttttggagaagttgtcttaggcttttaattttaagtattggaaaaagaattgaagatatccatcaataataagtggctatcaaacaagtggctttcaaatcaagtgaagtgggagggcaagtcaaaataaacccacctttgtttacattattaccatcaatagtaagtaaaacaattaaatcatagatttttattaaacttaataattctcaaaagcacctttagttgattcatcagcatcatgtttcatgatacctttaactcttccataaaactgatcattatgagtgagtgcctagccaactgaagaatcctcaccgccattgtataattcatgttttagttaatcctttcttacactataatcccttataaataagtctcccatacccattacaaaatattacagaaaaaaatgacctttttttctacataattaagttgttaaatcgtaaatttcattgtttgaaaatgccatattaatacatgtccttttttaagctttaattttaacacaatttttttcataaccatctttgtaaaaataccccactaaaatgggccaaagcttctacaaaaaactgaatgatattgaatatgttttatggcgcacaaacgaaaatctctatgaaaacttatccaattttcatcaagtgaagaagaaaaactaatagtggaaaagaggttatagaaaaaggctctctttcataatattgtataaatagtctagttcttattatgcatatagataaatagcagcaaagacactaattcttccaaactatcttaaatggcttaaagtttattccaatttctcatgcggtgaaaccctttttttttcacacactcatatggatggattaactctataaggatagacagaattcaaagcataatattaaagttaccaacttcaatatgaatcaacaaacttaaaacccataaacatcttacaaaccagctgaggccacagggttcagtgatttgagccttctctttcgcagccgctctgcaataatgaaggcgagctccagcgactgggaagcattgagccttgggtcacaatgggtgtggtagcgtgagcctaaatcattataagttatagttcttgagcctccgacacactccgtcacattttgccctgtcatctccagatgaacaccaccagggaaacttccttcttgatcatgcacgtcgaagaaggctctcacctcattctattgtaaaaaaccaacaaaagttatttccaaacgtgtaaaaatgtaatttttgatacaaaaataattacataaaagaaaacatccattcaatctttaccattgtagcctaaattttcattgcaaggagggaagaatataaagcgaaaaagaaagaaaagacatttatagtccgccaaaacatatacatggcatgattacagaaaatcgaaagaagacgggatggaatacaaggaccagggatagcaaaagaatcatactacttatatgaagtcgtttctcaatgaaatttgagggttcaaatccataaatataatgccccgctaaagtaaagttccatgatagactgtaactaaaagacatttctaaggattaatttattaatacagcaagattttgtctcatcttcagtctaccacattataaaatatgatcttacttgaagcttaaaaaacacctctaagaaagtgagatgaagtgagaaagacttgaagatgcaatggctgaaagatttatgtactttcaatgaaagaaaattattttttcctttttgcacgtctgttcttcaaaaacgaaaattttcaagttcatagtgaatttaggtatcataacctgattttgagcactaaagacactaggacataccaaaattttaatggacctagaatataaacaactatacagaaatagagattgcgagtattaaattgcttgtaagtcataccctgattgcatcaaaagagcgagttttgagtccacaaggtgctttgatggtgttcccatgcatgggatcactgacccaagtgacaatctgaccagctccacgaacagccttgataagatgaggaaactttactctcaaattttctgctcccattctcacaatcactgttattcttcctggcttgttattggggttcaaaatgtccacaagcttaacaagctcgtttggatccatcttatcactcacctgcatcacattcgtgtttattttaaagccttaacgtcacaaaatgaaaggtaatagtatgtatataacatgaagttacgaaccaagcacactaataaagacacaaatcttgtgcgcaaaagtaatttgtgtccaattaagttttatagtaatagacaaagttcaatgcaatacattaattaataaaaaataactgtaatgaaaataatttcctgtttcttgcaaattaatataaaattctacttatagtataaaaacattcatatacctttatcccaaggggattagcaactcctctcaagaattcaacatgtgcaccgtctagttggcgggtgcgttctccaacccacaccatgtgagcagagcagtcgtagtaaagcccagaagtagaatcttccctagtaagtgcttgctcgtaaggcagaagcaagcactcatgagatgtccagaattcagttgtggtcatttattgggtggtcaagagtaagtccagcagcagccatgaacccaagggcctcatcaacccgatgagccagttcacggtatctgttgaggcacatcaaaagcattattaaatgacccataaactattgcaagccaaatattgatgaagatacacatacgccccatcttgacaacaaccctattcatccctttacaaacatttactggtgtgttt

SEQ ID NO: 186817 - DNA, 2816 bp, Cannabis indica
cctaccttcttgataacatgtcaaaacccttggaagtgtcaaagacaccagattcactgcttaatagaggtgatttatttctttctcttcaccaagtgtcaagattctgcttattttagacacagttttattgaacaaagctatcgttttcggtaaaataatggtataaatatctacaggatccgttgatgaaaacagcgaaaacatccccatcgatgatgtcgacgaggatgaggatgaggacgagttggaagaagatggaaaatgaagcttcagtggtaaaatctcccattttaagtaaaaataatagcgttagtacattctagttcaagtagattgatttttgacatggtattttttatacaacttgaccagagaatgtcctttttactgaacttgttcctttggccccattcatttatttatttaaaaaggaaaaacaaattggtgtacacgttaactaactttgtctgacttaacagatgggactaaaccaagcattgaaggtgagctaaacacctacctaaacaaggcagaaccacattacagaagctgcatgtgtcaacaagtatcatggtatgccattatggggaaagaaaagatatcaggcatggtcattatgcattttgtggggttagtccattattttaatggtatagctgggaacctcattctttaaagtctggctcactctactactacttctactttctctgctcatgttgacttatcctaggtcattaaagagtgccatttttgtttttctgggtgtgtgtacaactggccaaactgaccttgccgacacgttttggactcaaactttaatgattaagtttgatggttttgttcctgacttgaagaatttgtatgttaatgttactctatataagccttaaactttctgaaactaagaccattgttttgtggtgtttttctgttctaaaagaatgaaacaagaacataagaagattaattagaatttttgcttttcaaattttgacatgtaccaagttatgtaactttttcaagttattaaaaattctcctcgaactattgatattgttagattaaaggacttctatccaattttccttaattttactaatgtggtgattgttcatgtatcgaattatgctccccgaacggtaagatgtatcaaatcgtgctctttgaattttcatccacgctagatttctattagtaaaattggacaatttttttaatttaacaatttcaatagttcgggagaaatttgaaatgacttgaaaaagttcggagacatgatttagtacatgttaaagtttgggaaacaaaaattttaattagccaaaaataaataactaaaagtgaatttatttttactagaaataactgactcttttttattgtgtttttagtatctttctcaactaaaaacacaccccaaaaaacttgtgattaacatcaattttagtcattatcatatcatagtcttttattatctttttacaagttttaaatgagttcttataacttatctctctctttcttgaacatgagtctaattaatcaaatagctataactgtgatatctactactttatgatctcaactaactaattaaatgcagatttaaatgcattgtatacttccaattcattacgtataagagtattatttatcattattattatttctactttctctcaatgatattcaagtttttgaaaagctcaacttttgtgtttgagccctcctaatggagaaaaaaactacaggttccttttctagaccaaaagtcctatcttattattactatcttattctcttcttcttttgtattattatatctccttctccttgttgtggggacctctcttttgggttctactcagcttcatgtccttctgctgagtttatgatcagaaacactgtcagaacagcctcttcaagagacccaactgtccccggaaaactccttcgtttgctctttcatgactgctttgttgaggtaaacattatcattccataagctttatcatgagtgtaattggatggtgtgtcatgatggctggtttccgagttttagctagttcagagctttctagctcgaaaactagctcatcacgctcttaattaggtggcgtgtcaaaaaatgataacgtatgatcttttattttgacacaccactttaaatccaacaaacaaacctctctagctcgagaacaagcctttgtactcgagctagatagaactattttttcttaagtacttttgcatggtttttacagggctgtgatgcatcagtgttgctacaaggaaacgggacagagcgaagcgatccagcaaacacatctctagacgggttttcagtgatagattcggctaaaaaagtacttgaatttttttgtccagagactgtttcttgtgctgacattttggctttagctgcaagagatgctgttgaatttgtgagtgtttttatcattatgtttttctatgtgttatggttgagtttttaaattgttgttattaatgtgattgtatagactggtggaccagttgttgagattccaacaggtaggagagatgcgaaggtttcttcagcttcaaatgttcgacctaacatcattgatacaagctttacaatggatgaaatgactaagctgttcatctcaaaagggttgtctttggatgaccttgtcactctttcaggtacatatttacaataaattttaatcttaaactcattattatgacactagttactacttagttactagttaccagttaccattaccaattacgagttacttttttaataaaacattgaacta

SEQ ID NO: 186818 - DNA, 1774 bp, Cannabis indica
tttcaattaagaattttagatatataaaattgaaaatcagtaaaataaaatattccatgcttaaattgtatgcattgtaacatataaattcaaattcaaaatccaaatccaaatacatactaccacatagcaaagtttgattacaccaataatcaagttatttctacttaattacctattcttaaaacatactaaatgatagagcaattaaaaaaaacataaatgtatttatatggctatgtttccaattatgagtaagttatcaatatatattttcttcaagtgaggaggcaaaccaaagaaaaccctcaacaaatcatgtcttgtggctaaaacattgatcgctcgaaaaatatttgtgtcgcttaggttttttattttgttcaactcgctaccgagtctggcttgtagatcagttacatcttcattaattttcaaacaattcgtcattccattaatttttcgttccaccgcctcaatcttcaactttattgcatcaatcttgctttttaattcgtggatgctaccttccattgctgtaatgttagacaaatactcaaattatatatatgtttttaaataaagaattattatttgaaattattttatgtgactgagtattaacaacattttttcaaaaattactttttatatttatatatgtgaaaaaatcaattgatacaactactcttttaagtgtaaaactattacaacaagattttttttaaaacccaaattggattagaattttatacatgcatttttaagcatgcagcaaaactaaaaatcacttatatatatgagcaaataataaattattcttccaaataattaaaataatctatatattaatacctagtgcccatatatatatatatatatatcatatattgatatattataaactaaaaaaatacaaaagagagaaacatatttcaacaaattgaacaattaattatatatacataaataatataatatatatatatatattattgtcaccataaaacaaatagattttaagtgggagagttatcgaaatcactatattactctcaaaaagttagtaatttttttagtgaataaattctaaggttttgtttgaaaaaatatgactttagatatacttttcattaagaaataaaaaaataataataaaaaagaaatacttcaatggtactataaatttaaataaccaaaggaaaaaaagaaagagaaaggaatattaccagaggtatagatgaagattattttcttttctgtggaacttttactaaagagagtatgaacatgtaaaggtctaaatctaaaatatatatagataaaattttctctgataattaataagtaacattaaaaaccatgcataattacatttattaatattcaaaaaaaaaaagggtcacattaaatcagaattaacttttggcacattgttatgttaccaatgccctcatttaattacacaagaagaaaaagataatgaaaagacattttattaaagagtgattctactgtacattttattaatattcattatagttatttaagatgtatattttataaaatattgagaaatttaaaataatttataatatatataaaaaaataaattcacagtctattttatacacgtataaaataaaataatcacgctgtgtaacatactatttgaatgtaatttttggcgtgttaaattttgcagaatatcttaaataactataatttacatgatcgaaaaattttgactaaaaaattatttcgaaatctaaaa

SEQ ID NO: 186819 - DNA, 6982 bp, Cannabis indica
agagagttatttattttttattatgagagtctttgtttatagttggattttttttaaaatttcactcctattctagttaagacatctatttagagagcatggttagatatgtttattttaatttgtaaaatatttaactctctgattttgtttttttttttttaaaaaatgctaaaggacatccatgatatttaatactcttgtaaggcgcttagcagccttaaaaaatgtaatatcgctatttatttaacttaatattgaattttatttattttatttttaataaaaattaataaaaaaaaactcaagacaccacctcacagcaatgcaagacatattggaatatcccataataatgcttttaattttttggtggcaataaaataactcttaactttattcttgtttgcaaatataaggtgttagttaggctaataaaaatatgaggcgtgtatatacacaatgacaatctcaattgacatttattcttaaaatttaacccacacttgattcatatttgcaaattgaagtgagatcaagagggtattactgcgaaaaacaaagatcataaggttaagaatatacaaactaaaacaaaagaagattttgccacaaattattacctatttaattattgaatatgtatgtatgtataggttgcaatagaggtttcttcattctcgaaatgtgctggtttcacgggtgttcggctgggttggacgattgtgccagaagagttaaaatactccaatgggtttcctgtcataaaggattttgatcgaattatgtgcacttgcttcaatggtgctgccagtgtttctcaggctggtggtctcgcatgcctttctcaagaaggttacaaggtaatattaataattaattaattgcatttccatatatattatattataattaattaattaattagttgcatgatataatattgtattaaaattggaacaggcaatgatggatgtggttaagtactacaaggaaaatgcaaaaataatagctgaaactatgagatcacttgggatgaaagtgtacggtggaaataatgcaccttacatttgggtacattttccagggcagacttcttgggatgttttcactgaaattcttaacaagacacacataatgaccattccaggtactggatttggtcctgctggtcaaggctatatcagactcagtgcttttggccatagacaaaccgtgcttgaagcctcccaaaggctaagaaatctttacaattaaatactatactagtactagtctatatacataatattattcttattgtcataaccactactctgtgtgtaagtggtcctgtacagtgtacatggctcaataagataagtttcccatatgcaattaatgtaataagatttttctattgaaaaattaaaattcatactatttttgctctctagctagaatatctccacctactccaataaagtactttaatatatttctatatattatcacatctcaaaagttcacagttcttctaataatgttgtaaaaaatattgtatgatcaaatcatttttcttttatcaagaaaatattttctattaatcataaagaacgaattacaaatcaagagaaattcctcacaaacacagcaattacaactgtcaagtaatatttaattattactgttactgttagttaggatctctattttttgtaactttaactgttttatattattagttagttaaaatgtacactcttgtatcatgtatttatagaactcattgttcattgtaaatattcaagattcagtttcactatattcttcttctttttcgttctctatctttctgttcaacatggtatcaagtgcattttttttgctttcgccattttcatccatgtgattgtgtctgctttcttcctcttcgttctgattctttgcttccatggctgctccaaacactcaagcattcaatcccgttgtctctgctgacaaagtttctgttaaacttgatgattctaactttctgctatggcgacctcagatcttgtctgcaatccgaggtcatcgtctacaagattacatctctgaatcctttcaacctccgtgcaaatatctcacataagaagatgaagttcttgatcaagtaaatcctcgatcactgagtggaaggtccatgatcaacttctgtattcatgactactgtcgtccatattcgatgttatcctcactcgaatagttagagctgaaacctctgctcaagtctggaaaactttgaaggtatattttataactcaaacttctgccaaaatagatctctatactactcaattacagaattgtaaggaaggatctctatttgtcaatgaatatcttcttcgaatcaaaactcttgttgataaacttggatctattggtcacaaaatctctactaaagttcatatacctgcaatctttaaaggattggcttctctctatgatacctttgttatctctgtcaattctcgaaatgacaattatactgttgctgaaatagagacattgttattgtctcaagaacacataatggagagtcataacaaggatctcgattctgttaatttagctactaatcgtggttttagaccaaaaccacaaagtactccacctttttccaataatccagatactaatacttctcatcaagggcgcggatcgtggaatgcatatgctgtctcgtccagatctgcacaatctcactctccatatcagaacaacagttccaatcaaggtcgtggagtttcttctccctcttttgctgcatctccaaatatgtccatgggagtcaaaccagtatgtcaactttgttccagaactggtcatcttccagctcgttgctaccaacgtttcaactttgattttcctggtgttggtgctgccaatgtcaccaaacaaacaactaacatagcaactgcagacacagtcacagatgaagcctggtgtccagactcaggagccacttctccttgtactcccaatgctgcaaatttctcttagaaacaaccctactttggtcaagagcaggtgcacatgggtgatggtgttggcttttctattcaaaacattggtaatactctcttctattcatcaaattccagcaaacctttgtttctagacagaatgttacatgtaccacacattaaaaaaaaataatctttgtgtctcaggttgctactgataataatgcttattttgagttttatcctgaccattgtctaatcaaagatcaggtttcaaaggagacattgctggaaggtcaacttaggcaaggtctcaatgtcatagatccctcacaactcaccaaatccaatcccattttcgctgtcaagtccaataaagtgtacactgttattaatgcaaatgtagcttatacttctacatctttgtgtaatctattttccttatagcacaaaaagttagctcatccctatgctagagttgtatctgccataatggcccaatgtaatatctctcaaggaaataaaagtgtcactaatttttgtgaagcttgttgtaaaggtaaaatccataaattcccctttcctagttctaccactgtgtacactaaaccccttcagctagttcacactgacattttggggccctctccatgctatcatcttgtggttataggtagtatattcactttattgatactttttctaggtacacttgggtgttccttctcaaagaaaaatcaaaagctctaccaacctttatcaactttagaattcaaatagaaaatgaactcaatcaacctatagtatctgtccaatctgattggggtgaatttcaagccttagaaccctacttaatcaaaaatggtatctcctataggctctcttaaccaactactcaccaacaaaataatgtagttgtaagaaaatacatacatttaattgaatctggcctcaatttgcttgctcaagcttctatgcccctttcttattgggatgaagctgcgagaacaacctgttatcccacacctatcatggccaatgacactcctcttaataaattgttccataagaaacctgactattccacacttaaagtatttggttgtgcttgctatccaaatactagaccatataataaacacaagttggaattttaatctgaaaaatgtacattcattggctatagtttgaaacacaaaggctataagtgtttagcttccccaggcagaatttttatttctaaagatgtcttgtttgatgaatttaattttcctttcactaatatccctattaataattctgttccttgctcttgtgtttctcctaatgcctcctccaccatcccaatctctactgaagcaccaccaccagcagcacctgtcttaccaaaccagcagcaagctcactcaagtgacagtttagatgagtcttctgttgttgccgactcatccccatcagcatctattgaacctgttaacaatgatggctccccacagatgtctgatactgcatcatcaagtgagcaccacacaactactattgtaccaagtgaaatgctacttccacttctgctccaacttcaacagtgcagcatgctcctatgatcaacagtcacccaatggtaactcgtgccaaagttggtacctacaaacccaaagttatgttagcttcacaaactcctctcatattagctgttgctcttaaatccccaatgtggaatgcaactatggataatgaaattactcctctaaaaaggaacaaaacttaggttctggttcccctgccttcaggaaggcaagcaattgtttgcaaatgagttaatagggaaaaagagaactcagatggtacagtagcaaagcaaaaagaaagactagtggctaaaggtttcctgcaacaatatggatttgactttatagaaacctttagccctgttataaagtcaactacaatcagagtcatcctaaccattgctctctcaaatgattggtctataaggcaacttgatgtcaataatgtctttctcaatggagagttaactgaagaggtttacatgactcaacctcctggattcattgatcccgactccccacatctgtaatgcaagttaaacaaagcaatatattgtttaaaacaagccctaagggcttgatttgacaaactaagaacatcattgcatacctttggttttacttcaacaaaggcagatcaatccttattcttgagagttatagagagtcacattaccttcatcctagtttttgtggatgacatacttgttataggcagctctctcactgaattatccaatctcatcacagctcttaatgcaacctttgctctaaaagatttaggtcacattgattacttccttggcattcaagtgactcatctcactgatggtcttcacttatgccaaaagaagtacatcattgacttgttgcatatagccaaaatagattgtgcaaactctcttcccaatccaatggtcagttcagagaaactgtcaggttttgctagtgaccctgttgctgatccaaatctatacagaagccttgttggagccctgcaatatgatgtgatcacaagaccagaaatggtatatgctatcaacaaaagtgtcacaattttatgtcataactctcctttgagcctcatttcaaagttgtcaagaagatacttaggtaatcttaaggggactcttgactatggattacacttaaagttgtcaggtcttaaaaggattttgtgatgttgattgggcatctgatcctaataatagaaggtcaactttaggcttctgcatctacttagggtataatatgatctcctagggttctaaaaagcaaaaaacaatgtcaaggtcaaggtcaagcacaaaagctgaatataggagccttacaaatgccactgctgagatggtttggctacaatctttacttgctgaaattggctttgcacaactcgttgttccccccatttggtgtgataatcaaagcactgttttaatgtcagccaaccctgttcttcaatccagaacaaagcacattgagcttgacctttacttcattagagaaaggatttccaacaaacaacttcatgtcaagcacattgagcttgagctcaggatcagattgcagatattctaactaaaccttatccacttctagatttcaattcttaagggacaaactgagcattgcatccctgtccctgctcagtttgcggggggctgtcaagtagttagttattactgttagtgttaactaggatctctgttttttgcagctgtaactttaactgttttctgttattagttagttaaagtgtacactcttgtatcatgtatttatagagctcattgctcattgtgaatattcaagattcagtttcactattcttcttcttcttcttcgttctttatctttctgttcgacaacaacccctttataacattaagtacatttatatctatactagataattttcattcaagtattaagtctacttttttaaactttctttaatactatcatttatacatctttgactcaaatatttgtttctcatatatacatgaattttggttttaaccatatgacatatattaaacctgctaagacagcatagaaaacaatcctaaagaagtcttcttggtctctttgccttaagtcaaatctgaagatcctcaaaagagttaggccaaagttgacttccaagccaactcttaattgtaagactctccaagaggaagaggagtcaaaaaaaataaaatgactatgtgactcaaagttccactcacatacagggcaaatctttgtatcaattagtatgtgcttcctcactaggttatctcttttaaggaagttgttatggagtgattgccacataatgaatctgtgcttcactgagagcttacaccaaatagctgccaaaaactcaaattaatcaccacttataagcttgttatatatctgtccaatttttaacttgtcatt

SEQ ID NO: 186820 - DNA, 2254 bp, Cannabis indica
aatataaaaaaaaaataaaaaaaaaaaaaaaaaaaaaaaaaaaaaaacctaaacaggtgatggaagacaaaatgaaaatgtaacttgaaatgaaattataagtcaacactcacaatgaaaatgaaactaagtccaagcaataataaaccaagaacataaagacaaatagtaagtttttaacctgaatatcgctctcattgacagtatgaacaatagcttgctcaaaatctctatatgcttcccatatcttacttccttcagaaacatgcaaaccagtggctgtaagagcacgttcgaatagatctcttgccttggagataccagcaggtgaacaatcttttactgaagcatcatattcttgaatgaaatctaagtagtcagaccaaagagaggcagactacatcaaaagtaatgcagttaaatgttaattctccaataaacatgtgaaacattgaaaaaggggggatactaaggacaagtaaaaaaactactaggctaaatatgtcactcgtaaaacctctcttgtagattgcataacttacatttaattgaaacttcaaagactagagaacccaaacataacaaataggaaaaaaataacaataaagtaaagccctgcattataaggatctaccaaaggccctttcaagagcatcatgttaaatttatgaattcaatttatttatcaaattaaaaggcaaacattgtcctgtactcctatgttgataatgtacattaacataatcacattttatttacttttaagttttgactgttatggttatcattttcatggtgatgtaaactaaacgatataaaagcaattaaatattcaaatgcttcggaaatatatattggaggttttgacaaggacaaaaaccttcatgtcagaaaacagtcgtgacaatggcaagaaaagtgttacatatctcattctcaacatttacttatatacattaaaagaaatggttgagcttcagtggtattttagtataaatttctaattttttatcttcaaaagatagacagaaaagactcaagtacaaaacgaaatatgccatcctccagtccatggaagatcttttcacacccttttgctttctggtatgcaaagcaaatgaagataaatttaatccgattgtctcaacaaaaagcagtactaaccagataatcggatactcctcgctcgtaaagcttttcaattgcaggaaatgcctcagttctaacatgtaaacacaaacaaaaaccagacccaaattaatatatagaaactcagggacgtacatatatgacaattaactctacaatgcatatctatacacctatcggaaagtgaaaattttaccacaaattgtaaagggcagataatgaaaataagaggaaaatggcatgcatcaccttgagataagagaagattcatctctagcccattcctgccacataacagggatcaacgggaacaggtcactcatggcttctcttgctcttctcaacttctcaatgtcacccgttttcctaagaaggtttatgtactggaaagcattgacaacatcagctcaaaaaaaaaaaactagaaaacgaacttataatcaatcaaaccacgatattccaaaggtcaatattttctagttctggttttcctttcaggtcattctaggaaaccagacagagaaatagctatataaagaaagagaagggtccaaaaatgaatgaagtacctgaatatgagcgtcgtagttggaaggattagttgagagctcagtttccagagtttgaagttgaaggttgtcccgagcatcgtcgtcggagtcagaatcggagtctgagtccgattgagggctttggtgagccatgtccggcatcggttcgtctccgtcagttggcagctgagattctaaggttagggtttcctcctccattgctaattaattattatttttcacttaacttcttcacttcacacacttctcttcgccagaatgggcaagactcaaactcatatttgtaatttgaggccaaatttcttgaacttgcacaatttacaattaaaatttggcaccatcaactctttagagctatttaccattacatttttaatattttattattaaactagaaaatggaactgcgcttcgcccagtattttataaattacaaaaaaaaaaaaaaaaaaaaaaaaaaaaaattgaaataggagaaccataaattactccttcaaagtaccaaaattattaagtaacattattctattgac

SEQ ID NO: 186821 - DNA, 1524 bp, Cannabis indica
aaaaaaaaaaaattacaaatcataactttaggatgctaaatttgaccaaaagtacttagttttacatttaaagttaaattattatatgccttttttagctggagtaatcaatagaaatgagcacctttattacagtaatattatctaaaatgtgtattttggtgtcatttggaaagaaaagaaaacactttacctaatttttccaaagtaaaagagctaaaagcctgagtagtaatttttaaacattttacatattcatatcaaattaacaagtatttaatattatacattacattgttgagtacagttgttacaatgtcacaattagattgtaattaatcacaacaaaatcttaaagcctgattagggctgattttccagtatgccattattattagacaataatgttcttttcttttaaatgctacttgtcacactacataagatttcaacattttcttaaaataataataaataaaattatacttatttgtacaattgtgagtttttatatatataaaaaaataatatagcaaattaaagcttcaatgaaagtcagctgaagcttctgagtctgagagtgacaatgcatctgccggccagcaatacgtcgccgttttgagattaaaataaagtagaaaacgaaaaagaccttgttcacgcttcacacgcgcgcttcatagccacgtgtgaaacttgctctttttttatttgaagcttagcgtagaactgaggtcatttactgatttgtcagacaccgacggcttgcctttcagcttcacctgcttctgttctggctcagctacaatcggctcggctcagcctaccttattctccttggactccactctctagtattattttcattctattaattgtttttagttgtcaaattatttttatttacattaaattaattttattattggaagactagtagagaaatatgtgattgtccttgttttctttggaaattaaaaaataataaagattaattataatttttttctatttgaattttgatatgtattaaattttgttatttgaactttttagtcgttaaaaattcgcctatttaaattgttagatttaaaaaattttgtctaatttcattcaattttactgtttcaatgattgtttgtgtactacattatgctctccagactttgatatttatcaaatcatgtcgctcaaactttgatatactaaatcatacctctaaactttcatacatgttagaatagttttactaaaattagacaaaaaattattaaatttaacatctcaatagtttaaggagaattttcaagagctaaaaatatttaaggaatataatttaatacatgtcgaaattgaaagaaaaaaaatcctaattaaccaataataaaaatatgctaactatcatgagatgaaaaatgaaaatgaggattggtgtagaagaaagcataaatggagaagataaataactatgatatatatttctttcagtgcactcaatatataattccattttttttttaaaaa

SEQ ID NO: 186822 - DNA, 2752 bp, Cannabis indica
tagagtggtcattgtagagctcattctcccattctcccactcactgaagtgggctgaataatctattagctaggtggcatttggttgggaagaataaaaatataaaaataaaaatgagaatgaaaataggagtaggaatagaattgaataaaatttaaaatgcataaaaaattaataaaaaaaataatttaattaattttttcttaattatgcattagcatgacttttctttccatttgcaaccaaacaaatagaatgaaatgaaaattagtttcatttctattctattccatttcattacctcaaaccaaatgccaccttatagtattaggagagtgagctcttcaatgaccactctggattttactctacaagattaagtgtataaaaattaaaacatatataaaggggtttcactactaactatccattaaaatatatgaaacttaatattgaattgctcaaatatcagtattacatctcatgtggtgttatataattttattgaataaattatgcaattttattaatagtaatgctaaaataatattctcaatctaattgggacacctcttccattggagacatgtcatgatcgattagaattaaaaaacgagctaaataatcagctatctaattttcagatctttgaacaaaaaaaaaactaaaaataaaatcagaaaaaaagttgcaacatcacatttaaccttaagaacacctatattcagtttcatccaccacttaaaagacacaatagtaaaaactattgtagcaagttcattcaacctcgtagcttaagcactcaattattgtgcaaggtacgtaactgcactactaacagctccttcagtcgcaaaacttgttataatttccaaccactaacatcgatttgatggcgagtcatcaaagaataaagaagaaccaacaaaaaaaataaaacaaaacaatcatgttacacagacaagactaaaacacttaaaaccatatcacagagacaagactaaaacacttaaaatcatgtcacaaagacaagactaaaacactgaaaagtatatcacagagataagactagtcgcagtaagaaaattcaatcgcaatagcaaaacacaaccctggccaaactgcaccaatgcccaggaaagactagcgggcttgactgaagaaaaaaaacaatctcctgtgtagctataaatttagaaatgaaaaatcttaatgttttaaattagttcacaattccataatattgatacttagagaagtgatataattaatttttgtttctaaaaagggttaattaataaaattatctcatgtggtgttatgatcatactcaaacacatggtagatttttggttttaagtaaaagaatagaaaattaaaatacggaagtaaacaagaaagtaacaaaaatagtatggtttttaatatgaaatgtgtattatagaaagaaaaaagtacaaattataacctttttattagtactagtataagtatttaaaatcatatatatgatcaaactgaataatatatctcatcatctttctcctctttgttctggtgttagccctcctttgccgcatttgggacagctcttcaatccaaatccttgacaatcgaaacatctaaaagcaccatatatatatatatgtatatatatattatttgattcatataaagaaatgtagcaattagaacaaaaatatttatttatatatataagcgaaatatatatgtaacaaaatataaaacttacttccagcgctcgaatatgttcccattctttttatttttccccgttccctgagcaagatggttattttaatttaatatggttaattaataacactgtccgaaggtctggtaattatttatatacaaataataagtacgtattaataacctttggtctatccatattttttctaaaacaattgtatacaaataataatacaaaatcgaaaaagtaattactaaggacagcaccttgcatccaggacactcaatggcacctttgccactacacgtatcacatcgcttcagtatctgcatgtcatgtgtacatacatttatatatatttatatatatatatatatataagccggggcagcaatcaatttgtggtaagttaggttgaatatgtgagcaataattaatatgatcatattatgactattattatcatttataaagcaaatgttttaaggtaataattttcaaatctataactaatataaagattaatccattgaaatatatgtgtatatatataaatcaaataaatgatctccaagcgtaattatggtagtacgtaaatacgtacggagttgagcgaaaatcctcctgtagccaaaactggtgttagtcggcgccggcgccttcactggttgtattgattcacgtaaatcaatattttattacgtccttaagattaccagtaagttatattgtagagaatcttgattgttatttccactatagaagtcagattcatttattgttttgaggatacatctcgtatgatgtattatagagtttcatagtaggcctagagttcagaattacagtttcattaggccattaagaaaattttgcgataaattcagctacaatatttatggctaataactctaagagtactggtcgaagctagcatatcgacattaagtatttagccataaaaaggcgtgataagtggtcattaatcacgcaaactgaattgggtgatcgcatagatccttgactaaaggcatg

SEQ ID NO: 186823 - DNA, 1383 bp, Cannabis indica
aagcttggggtgtgattttgagtgaacaaacacctaggttgaatcataatgagatttgatcatcatttaatcatgtagaacgagaaataaaaagattgagcctaggagtgcactaagtatttggctgggtgctagacatctagggtttaagcccacctaggcgccctctaggtgtttgttgagataatactttcgtttgattcccaaatgcttgtatcgatacccactacctcaatatcttattacaagtgtttggttttcccattttcattgggaatcttggctatcgctcccttgttcaatgtcatcctaagaaacctagggaacatcttcttcaatgctcccctattccttgtcattgcaagaacaaagggagaatcctcatcactgcccctactccaagtcatcatgagaaacagaggtaaattcatcgtcactgtcccttgtccctgctttcgggagaacgtgttgtttgatgatcatttgagttaaaaactaatctagaaactagttctatcaccaaaacatagtctattggctcagtaaaccacctgggtgccaagtgacctggagaatgctcacttgggcaccgagtagtgtttgtatcccttctgggtgccagatgtagagacacatgtatacatatcgttccttgagtggtttgagggaactacgacacaatttgacccttgaacttaataccctagttgtcgtatgccaagggagtaggatgctcacctaggtgttaggtaccaccttgaggcccctaggtggttctcacctctggtgatgattctggggatcgggactagattgtggcttccttttgcatacttaattgcatttgttcttgtgcaatcaaatgctcatcgtgttgagactttgagtcaaaaccactacaaactagggcaaaaataactcatctgggcgctaatagcttacctaggcagccaattgtgttgacatctaaagtttttaaacccaatttcggtgttgtcctgacctatttgcttagacttttgaagaaaacaattggaaacaacatgtcgacattcaagctactcatctagtgcccaaagtgttcacctagacgttgagtgtttgccaagcatacattgtgcggaggtgatgaggctaccctactcagggttttgggagcccaaagtcgtttgtagatgaacaaaatcaaatgtgttccattttattttcagatgtaatgatgtaattttgtaagtggaatgaaaatttcaatgaaaaaacaaatcagccttaatccaaaaattaaggcttgctagttcagacaaaaattcagttaccagattaaagtcaaatctttagaaggatagatacgtctttaaaatgaacatcaaaaaaaaaaaaaaa

SEQ ID NO: 186824 - DNA, 4485 bp, Cannabis indica
gatcttttcttacctttcccaactcaaagtaatgatgatgatggtggaaatgtcaaaggtgtaactaagtatagaatgttttccatatggctaattcgtttatagtttaacaaaactttttaataatttatattttattcatcccaaagcatatgcatcccattcttcattattcgtatccaattatctaaactaatttgtaccatccaattcaatttaattggcaagatttttatataatttttttttaaaaaaaaacaaaaaaaaaaacaaaatggatgacatgtccatgtcgtctattgaaaaatttatatatatatgtaataatataaatctaaagccagctaattaattattaagatacataacacatacattattaaatataattacatatattcatgcaaattaatcttgtctagatgtcttttttattcccatctcatcaaaactacttaatctttttgtttagtttcctgcttagaaattaaccaaccagctagcctagctagctagctaactcttattaattagaacatgtacctagccaaacaaagacaccatacatttttaattaactattaattattgacaatatatatctatttatgtaattttcccatatatataaccatctatacatgaacccatatgctctcatactcaaacacaaatcatcaaaaacagagagaaagaactcattattaacttaactagaaaccttttaagttcaaaacatgatgaaacaagctgtctacttctctttcctctttctcactttcttttgccacagcaaaggagccacattattagctcactctccagcccaagctccatcaaaacaagtagctgcagccccaactaaagctaaggccttaactccaaccaaagcaccaacatcattgccagtgccagcagtggagccaccatctcaagtgccactcgtccaagcaccacctcacaaagcccttcacacacctactgatgtcaccaaaatcctcgacaaagttggtatctttagtgtctttattcgcctccttaagagtacttcagtaagcattcagatagagaatcagttgaatgtatccaacacattgaccatttttgctccaacaaatggggcctttggtgctctgaaacctggcactctcaacacactctctaatgaagacaaagtccagcttgtccaataccacattcttccctctttggtttcactacaaaactttgagactcttagcaatcctgtacggacacaagctagtaataccaatgatttccctctaaatgttactgtggaaggaagctctgttaacatatctactggaattgttaatgctaccatttctggtactgtttatgaggataatcaacttgctatttacaaggttgataaggtgttgttgcctttgggaatcttcggtccgaaaccgaagacaaagcagcacctagcgccttctcccacaccattgaagccatctaaagatactaatgtgtcattaccttcttcctctactgaagaatccattagctcggatgtggatgaaggggacaagtcctcaaagtcgaaggctgctgtacttatgaataatggtgttgtaaacattggagttgttatgattgttgtaatcactatgtggggtcatttttagttttatctgcatttgttgaagtatggtactatttctgttttcatgtgagtgtattgttttgagttttaaaaacatgtttattttatgtaatgaaattcttgattttttaacattaagaatgtttttgaaagtaattgtgcaatgtaattactagatgggtaattatacagtctaataattatactttatttaaaaatacaaaattagttaaaaatacaaaattagtttggagaggtgataattacatgaattcttaatatcttatttgggagaatagttaataattacatgaaaacataatattttttagtagttaatgtttaaaattgaaaatttttagtaattacacaattctcacgaggtcatgagaattggagagtgaaattgaaacctctcaattatctctaattacacagttatagtttaattgaaatgttcagacaaacataccaaattatataattacctccaattacacttgactttccaaaagcgccttaaaggtattttgtgttttcttatatatatctcagccaactgtttcggtattttcctagaaaaattgctgttatttgatgccatagaaatttggtcctggggagccatttgataaacttattggatgggcgttctccaattgatattgatttcgatggaagaacttttacttggtaaaaaggaagagatgataacctcatttttgaaagatttgacaaagtgatttacaactgggattcgtatagtgtctattctattgtgtggaatttcaggctccattttgaaataacttggatcgatgaggattgaagaaaattgtgagctgatcattaagtataatttcatgtaccatcacacttggcttggtattttcatctttagctctatagcaatttgggctcatagatgagcaaaattgctcatttgctttagcttcaaatcaaatcttccatgtacaatcaaacctagcttggagctaatagaaagagtttgttatcttttgttcatatgccttagttcagacagggttgccttccaattgtcattgctttactcccttttatgaagttcccatttcagaaaagaaaaataaaaagacaaaaattggtattttactaataagttcagctcctgacagagtatactaacaacaataatagtacaagaacacaacgagagtgcttcctaatcactaggtagcaaacaaaacagaaaagttagtttgataactataaaatttgggcaaatttgtaccaagtacgccttcaaccgcttcctgctgtcccccgtcatcggaagtgagactctctagcaaaccagctctctattttgtcctcaaggctcaaagaatggcatgctttccttatcagttagttaatttgttttccagttactactaagctgcttcagcctccaataactttctttcggccaaagcatccacagcttttactttctcaggtacaaaatctacaaacatttcaagacaatacatcagagagaacaataatggcataatagtggaaaaaaaatgtttaaaatcgtctatgaaaagtataaggtacctgaaagaaaatcgtatctcttccgtttgctcacaactgatgctgaaaaaacaaacttgtacttaagtactgctagcatataaatgataaaaattgttttgtaattaattgtaagaaacaattagagttaagagtaccaagttgcctaacccctctccacagtataagctgagcataaataactggtgatcctctcaagagagagaatacataataaactgtattcctagtaatagtagtaaacaaaaaaccaagcccctgtttcttttaatgtacaaagttcaaaaagtatatgccaattcttataatgacagacatttagcaattgatgattgttatcagagtataagtacacaaacagaacatctgttacaaccacttggtaaagtcactcccaaaagctagcgtaagagaggagggtgcccaagtagttatatactaccaccaaccaatcccatacttagtcaatgtgggatctaacaacctcaaactaaatgtcccagctcgattatagtacagcatattacataaaaaagttttataccatttcagaaccaataacatacttaaccaatttacactatgataggctgcaacagttcctcttcaacctatacaatttcataactaagttattatatagccaccaatttaaagcaaaatcatgctcactaccgtatccgtgttacgagaaaaggcaactaaatttagctttcaacttcttacaacaacaaagtttgcccaaccttccatactctatttcagtaatgtgcatattttacttagcagaaaactcctagattcatagcaatacctagacaatgaataagaattcctctcacatgaaaagcttaatttacttgccacactcgacctaattatcttaaaattctttcaaagctcgattcacctaaatcaataaaaacaaccctttattcaacttccaaactccacagttcaattaaaaaagaactagctttcccttgctaacttcatcattggcaacaaacacattgtaaaatttgagcactaagaacatggaaattaaagaatgtatatttatacaagctaaattcttaactcgaaatgaatcattttaaaacaggaaaagaagaagagaacacttacagaggtgtttgtaagcaagagccttcttacgatccttaatagcacaagcatgtgcatcgccacagaatttttcaataaacttctcctgaattcaaaatcgaaaaccatactcaatttacgaacactaatcacccaaatttcaa

SEQ ID NO: 186825 - DNA, 1442 bp, Cannabis indica
attaattatggaatgaactttattgactgttatatctgttttcttgatggtacaaaatggtacttctccggtttctatggtgacccaattatttctcaaagacatttcacttgggaacttttaaagaggttagaagatacaactcctcttttgccttggctgattttgggtgatttcaatgaaattatctctcacaatgacaaacttggaggtgctattcggaatgaaactcaaattgatgctttttgggacactattaatcattgttgcttgactgaattggagtttaaaggagaaatatttacttggcacaataacaacttaagaggctctaatgtgaaggaacgtttggactatggtttcattaatgcaaaatgggtcgagctttgctctactcctatccttactcacttggacttctttgcttcagaccacagagttttaatggcttagattactcacgaagaccagcaccgtatacaacacgttaaatctcgcttctgatttgaaaaattgtggttaaaagaggaagattgtctacacgttattgccaaatattggaagaattcagttgctagtgatcccactgctgatactttaaataatatttctatttgtgcctctcatttacaatgttggcatcgaaataagttcggtgatctctcaaagaagattaaactttctcatgaaaaagttgaggctattcaaaattcatacaacttagactaggaacactttgctgatcttcagataagtgagaatattttagacgaacttttggcgcaagaagaggaatattggcaccaacggtctcgtatttcttggcttaagtcaggtaattccaacactaaatattttcatcaaaaagcaagtagtaggaaggcgactaacaagattacaaaactcactgatccaagtggtttcgaacacacttcagtgactggcattgctagtgtaattcagaatcatttctgcaatatttattctactgagggggttaacattgcagcaacacaacaggttttttctgttgtaccttgccttttttcggctgaaatgaatatggatttaacacagccgtatactgctgaggaagtgtttttacctctgaagtccatgagtgaagatggtagtccgggtcttgatggcatgtccgtgatgttttaaccaattattggcatattgtgggtgagaatgtggctaaaacagttctgaaagtgctcaatgatggtggtgatccgagctctttcaactctactctgatcacactaatcccgaaaattaaaaagcctcaaacaatgctccatcttcgacctataagtttgtgcaatgtgttgtacaaattagtgtccaagtaccattgttctaaggatgaagcctcaccttaactcagtatatctaaggctcaaagtgcttttttaccatctcggttgatcacagac

SEQ ID NO: 186826 - DNA, 5284 bp, Cannabis indica
gggatattttttttaattagagacacaatcagaataagaattaaaaaaacaaatcaaatactcattagtctgattctcaaatcgtttgacaaaaaaaaatcagatgaaaaaaattgcaacatcacaattgaccttaagaatacttatattttattttatccaccgcttagaagacacaacagtagaaactcttgcaacaaattcaacttcgtagcttgaacactcaaattgtataaagtacgtaattgaactactaacaacctcttcagttacaaaaaacttgttattcccaactagtaacagtgatgtaatggcaaaaaaaaaaaaaaaaccaacaaacaaaataaaattaaaactttgtattttaatattatcaatttattatttaattaattaaatacgaaataataaatatggtaataaaatagttattttgtaactacaaaatacaattctataacggcaaaaataaaaaaaaaaaaaccaaacaagaataaaaatgcattacaatgaaagagcaatattttctcatctgattacatatatgtattacatttagagaaaaggaaaaggcaacccatcatggcttttatcatattcctttcctaccacatttctaaaatctcaacagactgatcaaaactaatatcacattaataatcaaaagctaattttaattatgcaaatattacattagagaatttcagttccaattgtatataaccaagttggtaatggaatggaaattcacataacttagatatttcacatgtttggtttacataagcttctctctgaaacttgccatgtttgttttgaagattgttctgaattattactcattttggtctcaggtaaaacgttttttaaacagatgatgccgcttggctggatctttgggcttattgctcttgagctgtccttgcccagcaagtctgcgtccagtactgtgtaacgcaacacggtttttataagaaaagaggaactaagataggaagaaaacacaacaccacaccacatggtgtcattgctccaccaaaatacataaaaatcaatttaggcttcaaaaaccagcatacctgtactccatgtagaccattccatttgcacctgacatggcactcatggatcccatagaacgacgggctttatggagggctatgtcatctgcatcttcttccagttgctctaacccaactgcatcatcaccagcactcaacacctaccatgaagaaacatatcaggaatttatacctcaaagcactaaaaaatgaaatgtgaaggaagcaaaatagatgaatacttttgagagaagagataattgttcttcaaggcgatgataactcaactcaggccctgtatcagctggaggcaaactcgtgatcacctttaagagtaaattaaagtaaaaattagtaaatttgcaagatccaataatcgtcctagtacataaccaataacatgataaagtgtggtaagctgacaaaataaaatacaaaattattaaaagaaaaaataaaggataccttgaaactataaccttgatcgatcaagaactgctgtcttttagttgaatagtacatctcctgcatagcattcaagctaaatatgttgggactaaatagatgatatgagtatgaacatacatgagcgttttagagtaaataacaaagtattatctagtagtggtgggctaggcttaaataaaaaatgagggaacaactaacctgtgtatcagttgatacaagtgaataaaagaacgcattgtactcttctttacctcctgccatcctatcctgaagcttaccctgttgatcgcaataattcatcaaacaaacataattacagtcaccgtgaatgatgccaattagtaagtactgcagtcttcacggaaattaaaaaatgaccatgtatcccgtaagctgaagaagccatttcaaagtaatttaaagaaaactattaattaattgttctgttaatgtaatgatagaagatgcaaatgtgtcacccaaaacagtatgaatacaaaccttagccctaagaatacgacccaaacgctgagcctcctgacgccttgaaccagcatgggatgaaatctgaatgatcacgttggcctcaggaatatctatggaattatcaccaacctgtaatataaaatatcaatcaccatccgggaagaaattctaagcttatctactgtttccagcttataataaactaatttatttagaatataaaatgattgatgcaatgcaactatggtaaagggtaggggatttgttgaaatagaaaagttattcaagcctaaaattaaccagacaccaatttgtttgttgcttggtttttattccttcagtttttaagaaaaaatgtataaacctcctgaagcaatgccaactaaaataaacattccaaaaatataattttaaattcacaaggaacaaaaaagaatcatggtaaaagtaaatgacaatccaaatcttgtattttgaccctttgttttgcaaagcttactaatttggatccttcgttttgcaaagcttacaaatttggaccttttgttttgcaaaacttactaattgtaccttaaaataacaatccaaatcttatattttgcaaaatggaacgtaatagtacctcaaacgcaattttggtcgaacttctttcgagtaaggaatagaatagacattgaaccacaattgttaagagttagggagtagaaaggtttacggttaggaaggtgaatattttagagttaggataaaaaaaaaagttcgaccaagctcaaggtattattatgaaaaaacacaggatctgaattattattagcaaaacaaaaggtcgatgagtagcatttgcaaaacatggcatttaccctaaactatgtattcatttcatattgaaatcgtggagtaagccaaagtggagtacctttgagagaaagatggtatttacatcccgactagttttgaaagcttcaagaatttttgtcctctccacgtgactgcatgaaacataagtacattagcgaaagttagacacaaaacaacacccattaaaatgcaattcatagaggagaagttatgtgcgtaaaaaaagaacctggtagcaccatagatcatgggtttgcggagtttcatagcatactccgtgagtgcaaataggttgtcagcaaaaacaattatcttatcaccacgttgttgttcatgaaaccgaatgagaaattcacatgccctaaacttgtttggattcatcacgtagagtgcctaaaaataaataaacccattatcctgcgggttttgtaaagttggtaaaaaattaaaaatttataataaaagaaaattatatccagaatccttgagttgattactaattaccattatagtctacagatatagctgggggaacatgtttgctatacataatccattaaacaattcattttcatagaattacataacaagttaacatagcaaactcagaccaaactctccagataactcaagattaaacacgataggtacatagcaagagtaatagctcttttatttcggctattaccagcagagttatcaggctatcaaagaaactgatttagtgaatcatcattaagagcccgaaagaaataatctcttataatacatgatgtctctcaccaaggaccagatatgagctaaggcaggctaggcgcaggcctagggcccacccagcccaaaagcccgaaaataaaaaaaaatcattttaaaaataccacatttccttttgaaaaaggtccaataattttattgctacctaaggcccaattaatctcagggccggtattgctctcacggcaaagaaatcttgcaccaagcaaggaaaatgaatatttaaaaaatcaaatacctgttttttcttggagttttctttctttaaatattccgcaaaaaactccttcgtcattggacaccacacttcagcgcactgtacattcgcaataaatccaccttttaccaaatccaaccaatttgcttcatacaatttgggaccaataagaaaattcaagtctgtaatcctctcgtcctctctcaccagtgtggctacagtcacataacaaaatttcacttccaagccaaaagaactaaagtctgtgtgttagtgtcctctgcaataataaaggtacacatacataccagtgagcccaagcttgcagtgagatttagtgatactaatgacctttctaaacatgtgtgctggaacaacatgcacctgaacaaaccaatgtaagttgatgttttaaaaggctttaataacttatttagctaaaaaaaattacaaggttacctcgtccataagcagtaatccccattctctgtttcttatttcttcaataatcttttctgattcttctgaccgttttccaccaaaagcaaccatgttatatgttgttacaaccactccagcattaccacggaatctttctttgctatctgatgtaaaacgacaaatttgatcctctcggatggttgaccagagcctaaactgaaatgcccattgatccacagacacggcattagttgctagacagagacaactctttttaattcggctggctgcagaaacaccaactaaggattttccagcaccacaaggcaacacaatgataccagatcttgctcttcctgcaatattccaaataatgaacttgtatgaataacttggattcaaagtagtatgactatgattaccaaagttagttgacaactctgagaataagtatcaaagtgtcattcatttatgcttatcattgtcagaaatcaccaaaaaaaaaaccatttagaatattaggcaatttctaagttaccaggaatgagagagagcatgagcaagttgaaaagattcccaatcaatctgtgtatgattttattaattactagaaattaaatgattaaacttggaaagctaattataccatttccaaacattttactcaagcttttctcctgatatggtctgggttgtgcttgaggcttcagctccatgtcaaggtccggattgacctatagtaccatatgagcacatggttccgtatatcagacatacccaataaatcagagaaaatctctcacttgtacactgaccaccacagctatctaaagcaaggaaaagatcttgtaaacttacagtatcatttctgaaatcatactcctctaacatgggataatttagagcatttggcaagcaacgttgcttgacattttcaacctgccaatacttaaatccttactaaaaaaacaaaaaaaaa

SEQ ID NO: 186827 - DNA, 4055 bp, Cannabis indica
taggaataggaatgagaatgaaatggtttttctttcgattttaaaatgcaaccaaacaaaagaatggaatgaaaattgtttctttttcattccatttcatttcattacctctaaccgaacgtcacctaagtactttgcattacaatttgcctaattccacactccactcacctttttctttttgatcaaattttgtgtttagggtgtttaaacatgtctgcagagatagctaataactggttcttatcctcttcagatgacaagcctttgtaaaagaatcagcaaactttcatgaatctagtgagagttacctctgctctacagcacaggttctttcactcaaccttagcagcatcttcttcagttcaatggatctccccacttcagctttcaaaacctagtccccgaaaacaagaccctcctccaaccgattatgcaacttcttccatagatggtcggaggaaaagcaaatacatttctcacgaaactgcaatcgagttgatcatacgtgagaaggatccacaacgtgcattggagattttcaacactgtctcggaacagaatggtttcaatcataacaatgcaacctattcgactatacttcataagcttgccatgtcaaagaagttccaagcagttgatgcaattcttcgtcgaatgacttatgaaacttgcaaaattcatgagcctatattcctaactctcatgaagcaatattcaaagtcctcatcggatgagaaagtgctcgagatattctatgccattcgacctattgttcgggaaaggccttcagtcaaagccatcagtacttgtctcaacctcttagttgaagcaaaccgagttgatttggctcgacagcttctcattcattcgaggaaaaatctgaacttgaaaccgaatacttgcattttcaatatattagttaagcaccattgcaagaaaggggatattgactctgcatttgaggtaatgaaagaaatgaagatgagcaaaatttcttatcctaatttgattacatattcaactttgataaatggtctttgtgaaagtgggaaacttgaagatgcaatcaaactctttgaggaaatgatctcaaaggatcaaatccttcctgatgctttgacatacaatgttttgattaatggtttttcccgaaaaggtgacattgacaaggcgaagaagataatcgagttcatgaagagcaacggatgcaacccgaatatatttaactacacagctatgataaatggtttttgtaaggtgggaagatctgtagaagctgaagaagttttcgatgagatgaaaaatatcggtcttaaacccgataaaatttgctatacaactatgattaattgcttttgcagagttgggaagacagataaagctatggatttgcttaaagagatgaaagtgaataattgcaggcctgatgtagtgacctttaatgtgatacttggaggactttgtagagaagctaaatttgaggaatcactcgaaatgctcgaaaaacttccttatgaaggtatgtttttgaacaagggaagttatagaattgtgttgaatttcttatgtcaacagaatgatcttaaaagggcaactgatttgttggatttgatgcttggaagaggctttgttccacattatgcaacttcgaatgagttgcttcttcgcctttgtaacgggggaagggcagaagaggcagccgtggccttgctcggattggtggaattgggatttaaacccgaacctgattcatgggcttcattggttgaattggtttgtagggagagaaagattttgtctgcttttcaactacttgacaagttaatttactagttagtttttttctacatgaactggttttgttgcaagatttagattcatattgtcatatattaatttgttgtattattcagttaaaaaaaaaagaggttcatttgaaaagagtgatatattctgtttcgagcctatatctttgcttttctatcaatttctaattctaatccttctctccgatctgagattatggtgtcggtatagactgaaattccgttatgatacaattctgaccggtagtagatatcaggactttacaaatttttaactaagtggttaaataaggtaatttccttaaaaacatattttttaagttacattttctatataacacaacaaagtaaacaaaaattgacaattttttttctaggattccaagccaaactccataagatcaggtacataaccaaatgatcttaacaatttggtcaatccaatcaatgcaccataaatttcatctctttgaggatgtctctcatcaaaagaataaaactcaattacactatcattcacctcaattaagctcaatcctggcaatttcttaaaaccagtatcccttatagcaactttcaatcttgacacatctttccatctaccaagatcgccataaatattcgaaagcataacataattggatgggtttcgaggttcgagttcaatgagtctctcaagagctatttcggctaactcaatgttcttgtaaatcttacaagctccaagcaatgcagaccaaatcacagcatctgcatcaataggcattgtcttcacaaaatcgatagctcggtctaattgaccagctcgagctagtaaatcaactacacaaccgtagtgttcgatctctgccctaatacaatactcatttgtcattgactcgaaatatgacaagccatcttcgaccaaccctagatgcgaacaagcgcaaagaatgcctatgaaggtaataccgtcgggtttttcacccgtgttcttcatctcacgaaacaattctaaggcatcatcacctcgaccgtggatcgccaaggcacatattatagaattccatgtgatcaaatctttcatttccatggctttgaaaacttcaattgaattttcaatcataccacattttgcatacatgtcaatcaaagcatttcctataaaaacattacctttgtatccaatacttcttgcatatacatctatccatttacctaaatcaagagcacctaatcttgaacatgaagataaaacagtcactaatgttgcatcatttggacacacatcaacctcaatcaacatccttttgaaacactttagaacatcaaaaaaccgcccttttcgagcataccctccaaccaaaatgttccaagagaaaacattcctacccgggatctcttcgaacaacaattcgcaagcttcaacatctccatttttcgcatagccattcaacattgtgttccaagacataacatctctactaggcatctcatcaaagagctttcgggcagcaaccatatcacccgattcaatataacccgaaacgacagtgttccacaacacaatatcgcgctctggcgccaaatcgaatagacaacgagcagaaactatatcaccacacaaaatgtagccattaatcattgatgtccaagcaacaacattcctttcaaacatttcaccaaacactttataagcatcaccaattgctccaccacctgaatacatctcaatcaaagtagtacccacataagaatttgatctaaaaccacacttaatcacatcacaatgaacctcttcaccttcaactatagcattaagtttcccacatgatttaataacataaggaaaagtaaagcaatttggtataacatccaaactcttcatcttaccaaacaagagtaaaacctctctatgcctttcgtttttaacataacatctcatcatcgaattccataaagcgaaatttggttcgggaatttgatcgaacaccttgcgtgcatattccactagctttattttcacacatgatgtgattattttcgggttaatgaagctattgtactgaaaaccatgaatgattatctgggtttggatttggtaaagatgttttggaaaattacatgactgtaagagtgaaatgaatttctcctctaacagcctttgtggtataatttgtaaaatcatggcaatttctttaccaactaaaatgctagcaaaatggtttcagggtctgaaaggattgt

SEQ ID NO: 186828 - DNA, 1336 bp, Cannabis indica
gtatcagagaagtccattttggctgtaaacatccaaattaacctgctcaggtaatccctagcaactactgctatgcacagatgctcccttccaatcctaacgtcgcaattaattttgatccagtctagagggggcgggttccaaacagcaatggccaatgggggtcggggaggatatagagataatggaatcttgtaatctgcatacggtttgggattaaataccatggaatcaatgaccacaattaaacgcagacaaaattcttctcctatattaaataccaggcgggattaaatcgatgccctgttgcaaattaatattcactttttatattttatatttatgtacatttatagttacatttccaatggaaaagcatatatatgtttttggtgaaaagatgatctagaaaagaatagaaagaagtgaagaaaaagaaaagaaggatgagaagacaagagacataaattccatggagtatactaggtgctacatttgttgtgtaacaaaatgaagtgaaaggagagtcttgctaattaaggtgaatatatatatacattttataatataattaattaagaatgtaccttagttcactttgcttgttgtgaaggggttggaaagttataattaataaactaggaaaactaagaaagtactctctcaaaatctaggagttcgatacacaatcttcgtgttaaaggactttgtcttttcaacagaaattaattctttattttaccaaacatatataaaataactaatgcaccatacgtagtgtcttttttttcaacagactagttgtttacactatccgaatagtaagtgtaaaccaaaatctgtacagaccaaataattaaataatatatattaataaaaaataataagaattaatttatagcactacaaaaatataaataagcaaaatattacattttaaaaaggcaagtctaagaaaattcaagagcgtaatgatgaatttattatagagttaaataacaaaataaaattagaaacaaatccattattaaaaaaaaaataaaagaatagagctcagtgttaccaagccttatacttattaatccgatagtgtaaataactatggaatcgaatataaataatcatatgtgaaaaaaggagttagttatattcttttcataatatatttaaataattttaagtgacatgtatatgaaaaaagagagagtgtgtgtgttcatgcccatgcacaacgtttataacttcaataatttttaaattgacaagggaccgaatctctaatcgaaacaaaacaatatatatataatatatatatagaattaccaagaaaaaaaaa

SEQ ID NO: 186829 - DNA, 4705 bp, Cannabis indica
agtttgataggaatagaaaatgtacaaattaaatttaaatttaattgagttaaaggtttgtacttctaagtgtattttaatttttaaattaaaatagtataatcttaattctctccaacacttgaattacatatttcatttaagactatttctctaaccctactttttctaactcaaactcacataacaaacacactctattaatagtgtttggttagaaagagtaaaaacataattataataaaaatgacatttcaataatttaaaataaaataaataaaagaacaaataaaaattgtatttttttttattttattcgttttcacgacatttagaaagtgttaagcactatatgttcgtttttacatttttctttttcaacaatttattcaacttttgtaaaataatatacatctcaatagacctttcaaaaataaaattattaaatttagaagtgtgagaaattagattttgtgtttacttctcatattcagaccacatcaatattttcttactaattttacataccaccaagccacacgattactgattagttactacttacttgccgtatccgcaattatgtaggtacttaattattttgaaatattttattattgtgcctaattttggtaactatttaccataccatgttattttcatacaaatcatctcgtagttgcgtgataaattgataatcatatctattgctcgattttatttcaagactaagttgtttaaactaacacaaaatcgtatatttatttttaactgacttgtaaacgaaattaccagttgatatattgatgatgtaataatttcaacaaactacaaacaatcgaaaaagatgagtattatgtcttgagtaaaattcttttagatgtgtgtcattttgactagtgtgtaagttgaaagacaaaatcgtatgtttagcaaaagtctatatgaggttttccttgtcaaacgtgatcctaattccaaatcacacttgacaatggtcaaaaacatttattacaacaaaccttccttccctacaaaacattccatataaatactagatgtaaagcacaacttaggccagatattccagctttttttatttattagggaaaaagaagacagatttgcatatttcacagtaataataagcttcacatccttataacaagtgctttgcataagaggggaaaaggggatacaagtaatagagagagatgcacaaaggagaattattattcttcaaaatcgatagatgacttggtattctctttgaacaaaaggttgcatgctcaggcagcacagctcaatatcaatctctgcaaggaccatttaaatgtacaaaattggtactcaatagtattatgcttttcacaattacaacaattcaatcattatcatcccaaaatacaaatgcaatacaatacatggatggaccacaaacaaacatctctagatcgaactacgtgttgtggatatcaaagcaccaaggccaaaggcttccatgcaataattatcagctaacaaaataagtcttttcctcgtgtcatatcatatcacatggtaacaaaatatgtgctattaggtgccttcgataaaagatgagaaagtagcatatgcaaatggaacgttgaacaaatttgaaatctgtcggagctaaaagaacattagccaaatttaactatacatatttttgtaaacttaattgacatagatttgtattaaataattttaaagacaaaaaaacaaagacaggctcaaggtacaaggacaataaataaatccatggcctaagaggaagaaaggccctctgaaattgatgtttatggttagcattcatataataattggggtgcttcgtaattttacctctagatggcaagtatatacaattgagaaggtaagagtcaattccttctgcattccgatgccaacagccccattccttcggtgagattattcatatgttgtgtatgatcccatccattctccttccctaataaaaagtcctcatcctgcgtcatttcacaatctacagaacttgcattaatttcgtccacatcgccagtgagtgggcttcctgtaaaaaattgctcccagaaaatatcattgattcctgggagcttgggaactccatcatgagaattgggagaaaagtcatcactttctacatgcattgagccatccaaaactactgacatatctccgccttctgcattagtagttccagagttcaccaaattcacatcagagagatcttcagtgctttgcagctgagtttctatcattggaatgaaatcaggcaaagtttcgtctttgtgacaactctgcacattaacttcttgcaattgagctgccttcacagaactgctacccacaagaggtgaagttataatctcggaagggggtttagaagaagaaatgacaagaaatccagggtctgattgtgcagaagtttgtggaacctctgaaagggtcacttcagaaatcctactataggtatcagtactcccactatctaatgcattggaagaaggaacattgtcaatcaggaaagcatcagggttgttcatcgagggctcccgtctaggagatgtgttcatcttcaaaatctgccggagcattgcttttgccgcctcgttcattgaaggctggtacttcacaatttgtccatcaggagaataaatcaaatgctcactagctgagttttcttcttcttgtcttggaagtctccttttcttattgcctacagtgatgtgcctgttactttcattttgctgctgtactagctgggccaacaaaccaggtctatgcatagcctttgcgaggaatgacatcatttgctgctgacgctgctccatcacctgaacccgttgacccacattttgcaattggtgatctgtagtttgctgttgctgcctcaacctaacaagttcctgcataagaacatttttgtctcgcttaagtctttcaacttcctcctccagcccaaaatttccaagttctacgcatgctccaacctgagagctcggagcttgcgcttgttgatgtggatgagttgttttcctcctggtgatactcttcaaaagatgtttttgacctcttagaaacccctcattagcaaattcccatcggtctggatcaacctttttaaaaccctgaaatcaatgaatatttactgtcaaccaattacataaaaacaatcaggtgaaatctgcaaaaaaaaaaattacaaacactaccaccaaccaattacataaaacttaaaagcaaaaggcaggtaactagaaggaacccaatcctagaccttatgagaggatataatgaatttgaccacttgacctacaggaggttaacaagcacaacaataataccacaatcatgactatctacccaaccactagcagccaaatgaattgataagatttttttttctcttgtgtatttccaagttgaagtaaagattaactctttgaagcacaagaaacacagacagtgacaaacaataatcgcaggtaggtaggtaggtgccaaaacataaaatccagcactctaccaccttgtatccagtatgaagacttgtggtcaatcaatctactagctttatttacaactcctaatgtagaagttacttacaaactaaaagatttcaaacaccttacataagtttgtatttaaacttctaatataaaactcatgaatatagattcaagtacaaggttttggatgctatccgagacgagtgcaatcaatggttggcatatattttgcagttagtgagatcaccacctaaaacatttcttaagcaaaaaaatgcaacaataaaatattgtgctaaaatttagtactaagacacccgccaaaaaacaaagggggtattcgcctggaattatacctggcacaagaatagaaaaaacaataactgacattcaacgaagctaaccatcaatatacagctggcatggtcagaatcacatggaattatagctgcaaacagtgattaaactacacatgctctttacaaaaaatatattcgaagtctcaataatacactaatcacatcctctttacaaaaaaggaaaaatgtcactcagagtgagaataaacatgtacgagaataatcatgaaaggtttaagttacagataaaagtgaagaaacatatagtcatacagcattctaatacagaaacagaaaacgtagaaatgtcaatagtcagagatgaaggtccataagtagcataacacccttaaatgtaacaaaggaaactcttaattacaatgttcttgcatttcttacttccatgtaaaagagcaaaagttcacaaaaattccagtaagagataaatgtgccaacactacctccgcccaccaagtgcatttgtttgtattaattaagtttacaggcaggaccatacactgccagaagatagaaagaataacacctttcaactgaaaatgccaacatattacatatcctgactactaataccaacactatctaagtaattacaagttacaacactgaaaaaataatattataactttcttaagcaaaaagggcatagaagacctttgaatcagtctaccattttcacttcataaaattggagaagcacaataactatggttagattacatcccagtactcaaaaaaattaaaaacgtaatttctcctattacgcaccacaatttaaaaaaaaaaaaagaa

SEQ ID NO: 186830 - DNA, 6185 bp, Cannabis indica
catccaacccatcgagccaagttccaatcaggaggaaggttttttgcaggacctctgtaagctcacctccgctctttcaatcttgcgtaagcacttggaccagtgaactgcagtccccatatcaacacgtaagcccagattctatcatttctctacagattgaaagaattccagagtaaatgtaagattcagcaacggcagctcttgacaatagagatgtcatcaagcagtggtaaacagactcggccggttgcaaccctgcttgcttcatctcatcaaagcatttcaaagctttctctggaagtgaagcacgtgcccaaccatgtatcaaggtagtgaagttttaatgttcggtttcactccaaaggcttgcatttcttcgattgtttttgtagctctctgcaccacaacagaaaaggaaaaagaaaccataaactgaattgaagcaataacaataaataatcaagaaaaggaaactagaagaaacataaagttttatttactttttaatccgaaaaaaagaacttcccaaaaagcataccagcatatctccggctttgcaacaagcacttataaaagatgtgtaggtgtggatatcaggtcgaacgccttcctgggtcatttgttgcatcaggtcagcagcctcccaaacatcacctcttcgagcccatctacacagagaacaaacatacataataaggagctaatatttgcatttcaacagaaagaaagaaagataacctagcaaagagagagatatgtagatcatgactttgactgcagtacacataacactaagattattacaatccatacccgtcgattaaaatattgtacacaaaggtgttccttggaatcttctgattactcatttctttggttactgctaaagcactctgcatcctccctgccttgcaacatgcctttaacaatgcctcgtatataaacacatcaagctcaaagccctcatttcgtaatttagtaaagtacccaaaagctttcccagtgtcaccaagggcagcatagccattcattatcgttgtgtaagtatgttcatttggatttatgccagccagtgccatctcatctaatatttcaacagccttctccatctgcaagacatacaagtcacattggtttatctaagaagcataaagggaaagcagaaaaaagtgccatgccaaacataccagaggtcgcacacaagtaatttgacccttttcaaatagggttactgaaaaggtaaaatctaggacgttttgcatctaaagatctaccaagtataaaccgatcaaacttatcctataaacatggctatgtcatttgactagagaaagttgttatattttcgctttcttatgcgggtacaagtgagagggaaaattggatctatgaagcaaacatttctttagagtccttaagcaatcttggacatcacataattctatatcatactgcaattttggtgtgatgcgttacctgacacttctcaacaaggccaagaatcaacgcattgaaagtatgtacggtaggaatgcatccactcatcctcatcatatcaaaaatttctaaggccttgtccatatcgccagatcttgcaaacgcatgtatgatgggcataaatgtgcgtgttgtaggcctatgccaagccttctgcatttcttttacagtgcggatagcacgatccatgtttcccataccgcagaatgctcttataatgttattgtagagaattacatcaggctttagaccatcctttatgacatcttcaaaaacagcaaatgcattagcccagtctttcaatttcaaaaatccattgattaacatggaataggtcttcatgttgtgctttatgccaactgattccatttttctgctgacttctaaggctttggaaacttttccaatctgaaaagaagtacagagttttcaacgaaaatctaagggtatcattcagaaagaaatatttcctgggtagtattgaagtataagagctaaagaaaataaaaatagctaatggaaaagagagggaaaaggatgttaaccttagtataaaggttgatcaaacatccatagcttataactgatggtgtaaagccacattcctataaaaaatgacagttgctcatatgagaaatttcattaaatgtgatgacacagtggaagaaatttaattagttgcttggaagttggaattaataactctttaactaaacagacacatgttatcctgagaatcaatctatcaatctcaaaatcatcattacactgttaaaataaataaacatattaaacttggacagcagaaacattatcaccatactaccttgagacggtcaaatacaaccaaacatttatcttcgttgccattcattgtgtaaccatccatcatggtatggtaaatgtcaattgaagcatctatgccagcttcttccatctcccgcactagtgcttccgctctatccatattgtgtgtttgactgaaatatatttagtacataaacataaatgacgagttcagagtgtagaggggaatcaaccaggctaaacaataatacttcaagattagtagaaaccaacatgatctggaatagacttgatagctagcttagcttacagtgttttaattttgggaattcagctatttgtatacacagtatctaattaaaacaatagaacattggttctttccaaaaaggaaaaaactaattaaaataataaaatgaaatatacttgagaatacccaccaattcgcatatataatgtttccataaattatagcatttaaagttgtgtgcgtctctttggcctccttgaaccagtactctgcagctctttcaaaaaaaagaaaaggaaaatcaaattaggtaacgtgaccaagttaatcaaaaccttacacgtctaaaaaaaaagcataaattccatagttttacacttgtaattactataataaacttttaaaagtaaaatgcaatttcaaagtcactagcaagatactatgatggcagctaacgacataaaactttaacaactaaattagaatcacatgcatgctaaatgttagaattttggataaggtgaatggagtttcatctcaaaaccaattggcaatgaaaggagtagtccattcattccatcggttttttttgggtaacatgttagaatttgggataaagtgaatggggttctatctcaaaaccaattgacaatgagaggagtagtccattcatcttatatattctattatcttttcacacattaacaatgtggaactctctaacactaaatatgcatcatacccccaccaaaaaaaaagactaccattgccaactgctgttagaaaaagataatgtcaccataaaaaccactaaaggaatcagaaagcaagtataaaatcgactcatccaaaatgtatgaggttcacttactcagaattgcccacttttgcaaatccgctcactattatactataggtcaccaagctcatctcaatgccctcctctttcatttttctaacacaagataatgcttcttccatgtctctaccaactgcataagcgtgaataaggctgcatgtaatacaaattcttcaatgtctgcagataatctcaaacacaatcctaaaacccacatagaaaccaataaagtaggagttaaatatacttcatcatgaatatccattttcatttctttatgaaaaagtatttaactttggacacaggtgagacagaaacttaaatgtactagcaacttaaaactcgtagattttagtgcatttgcttctacagtaagatgttaggatttttttatttttttcaaaataattccaggtcaatggcatgggtgatagaaagaaaattttatgcaatgctgccattacaaagtcgctagcaagaaactatgatgacagctcacaaattaatctttagcaactaaactagtaatcctatagcatgtttgatatgaagtatgtatcaattatcataccaaaaaaatcatggttaaaactagtagaataaagaactatgatggcatagcccttcaaaaaggcataacaatagttaacgagtgtatgaaccataaattagaactcatccggagaagcttcttctgtgcaaaacttataataatttaaggtacggagaaacatccaatactgtcaatgcacttcatattacttctcacttcaaaattcaggacaaattatgaaaattattactcttaagggtagccaaaaatgaacgattctagaaaatctctattgaattataaatacaaaatgcactaccagacgttaataccttgaatagacatgagatgatggctctattccccttgctcgcatactctcaaaggtttcgcgcgcatgatgcatgtctcctctccttgcatagtactttaccatcaggccatactcccttctagaaggctagtacatagtatatacaattcatagcaaacagaggaatcatcattctttttcagaaacatggacagaagcatttggcaaagattttagcttttcccagcccaaagctacagatcaacacgtcattgcatgtacagcttattcaagtaataagattgaacacaaagaatgaaaatagtagataccattagtcaaaatctatttttttttttctcatccaaaatcctaagcaaatagcattagcaataaattaacgagtgttattaatgaagtcttaccttcttaattctctgaaaagactcaacaactgccttccaattctctggttcagtttccaccaccttcttaaactccatacgcgagctctccctctcttcatgccacttagtacgatactcaactccatcgtgtccatgaacccacctctccctctcctcccttttccctttaagcctccttccatcatccaacttcacagtcaagattctcccgtggaactccacaccatcaaattctaccgccttcaacgcggagttggttgccgtcgagccctcgtacaacacaaaaccaaaccccgcatttctctccgtatgctcatgagccttaatcaaaatcacatcctttatcggcccaaattgcctaaaaaactcggacacatcgtttttcttaatccagctgggcaaattgcccacgaaaatcttcccctcttgccggaattctactctggacgagtctgaattcccttcgcccccgttctcttcgtcctcttcttcctcgctctcctccacagtttgtaaatgactagtaggagctggtgtttgcggaggtggaggaggaggcggaggtggagagagcttgctggtaagccagagcttattagtgacagagtgtgaattatcaacactcttggtcggaccgcgaccgcgggttacgaagttcttgagcgggttagatgggatttcgggggcgggtttcggggaaggagaggatgttttgacggttttggggcggcggaggttgccagagagaggagataatgagttggtggagttgtcggaggcaggtgacggaggcggtggagatttgagggataagggaagaaatttggtaggcttaatggatgttgtgaggtgtttgccggcggtggcagtggcggtgaaggagatgggtttgttgggatagtgaggggttgtaagaggaacatccattatccgttacgggctgagtgttgtcccagtgtgtgcgtggtaataatggaattttttaccaacatacatggcccaacaacaaaataccacgtgttccaatagcaacacgccacatggcctaatcaacacctgcaagggttttatacatatactgctttaattaagtcatgaatatataataagttaattactaattttttctcccgaactttaacatgtactaaatcatgtcttttggacttttttggctgttaaaaattcccccggaactattgagattgttaaatttaaggacttttatctaattttagtaaaaaaattctaacatgaatgaaagttcaaagggcatgatttagtacatattaaaatttgaagggcatgatttagtagatataaaagtctgggaagcatggtttagtacataaacaatcactgaaacagtaaaattgaatgaaattagacaaaagtccttaaatttaacaatctcaatagttcgaggggaatttctaacggtaaaaaaagttcaagaggatagcaaaattcgggga

SEQ ID NO: 186831 - DNA, 8336 bp, Cannabis indica
tctctctctctctctcgttttcctctcttctctgtcgagcagcaaagccaggccaaacgttgggcgttcttcgctcgtccttgcttaagtcgatgtctatggattttggtgattattggtttgattatgtttgattggtggcattgtgttttcaaattaaataacaattaggtttgtagtaatttaagttcggctattggaagtttttccattttcttctacttttaacaatcttcatgaaggatttattagtcatgaccatgtggtttatatcctcattactttgaggagttgtttgatataagtaattctgattcaacttctacttttatattgaattctcatttacaggtgagggattagtctaaagagttgggagctgccttgccaaaggagccttaaaaaattggtaatctcctccatttcttatttctttacttatttttgattaaatgtactgtactttttttatagtacttagtatatggaagtgtaggctataaataagtgcataaatttgagattgaagtgtaattatgggagttcgggtggaggactaggggcaagttttgtaaggtataaggaaaatgtgaaaatgataagtaattgtgtaaaggggatcgacattgacaaatactattatttggtcttggtcaagattaagtttgaaccaattcacgtggaattcttgactctgttatatacaaacaaatgagttctcacttctagtttatttataacatttaatattgctttactagttgaaatttgtgtcttgtttgtaataatctagtctatgagactatgtgctattttgatatttcagcaattttttttagaaatgtcctgatatctactgggagagcaacatagctttctcaactgcttttggttgagaaaagttattgaatgtaaaaaacttagaactaaccttttggttgggcagtagtgccaacaatatttagtaatagtgaagtttaaaaaatgagtctatagtttttgtgattcttagcttgaatacaagccaaaatgtacactactgagtttattcacatccaccttttttagtttggtttcacttcaatcatatatatgttattattatttttattattattattatgtaaagaagatgatactttccttgacagctcaaagtcgacttagatctatatggaaccgaaaacagtgctccaactcacaccctactcatagctaattaactaactaactaactcatacctattttgttacaagttaagtagtcttttgtgaggagatcagctatttgatcgacagataactgcttggcaagaatttaatctctcacaaagtgcaagtctatctctatatgttttgagcgtgcatggaaaactgggttggctgcaagggcagcagtactctagttatccacccagattattggacaattcttcaatttgatgtgaagctcatgaagtaggaaggtaatccatctaagttcagcaactatatttacaagtgagcgaaactcactttcagtacttgaacgagcaaccacctgttactttttggcagaccatgatataaggttgttgccaaggaagatgacatagccacccgtggattgtctatcatctatacatgatgcccaatctgtatcagaataggtggttaatgtgaaatcagtagctgttttagaacaagtccttctccaatggtgccattgagatatcgaagaagccttttgcatgcttcccaatgaagcacagtaggagcttttagaaattggcttaacttgtttataacaaagggaatctcaggccgggtttgttgtaggtattgcagagcaccaattgtgcttctgtagagtgtaggatcctcaaaaggctgtccttcatgcagagagagtttggaagaagcactgattggatttgaacatgatttggccccttccatatgtaacttgaccaacaaatccgtgatgtatttagtttgaattaaatacataccagtggagtctctatgaacctccccaaaaaatagtgtacttctctaagatccttcaaggagaaggatttgttgagatctttgatcagttgagatatgagagctttgttaggacctgttactaatatgtcatcgacatacacaagcaagataatcagtgtttgtccacttccatacacaaacagtgaagtatcagacttagaaagatgaaaatcccactgatgtaaacagtattttaatgtgtcattccaaacaccaggagcttgttttagaccatatatagccttttgcaagaggcaaacatggtctagtttcgaatgatccacaaagcttgggggctactgtatatagacagtttctgttagcatgccatttaagaatgcattgctaacatcaatctgtttgacagaccagtcaaaagagatagcaagactaagaacagttcaaattgttactagttttacaacaggggaaaatatctcttcatagtcaattccagattgttgcagaaatccttttgcaacaagtctcgatttgaacttgttgagagaaccttcagcatttaatttcaacctatgaacccacttgttgctgattatatgcatgccaagtttgtgtgggacaaggctccaagttttggtagccttgagagcaaggatctcttcaactattaattgtaatcatttgggatgttgcagtgcttttttgagtgaggtaggttcggtgggaagtagaaactcgggtaatggatgtttggtggcaaggtatgcctttggtttgacaattccactcctggatctggtttgcatatgatgtgttcttgctgtattttcctgtgggatgttgcttgagactgtagcaggtatgggtaggggtggggtgtttgtagatggttgtgtgataggtggatgtgtggatgattgggggagaggatctggggtggggaatggggaattaggggcagcattttgttgctgaggttgatctagtgtgacaagatctggtgcagcaggtaaaattgctgcagtggtggtaacaaggttaggttggattgttctatttggtatgggagcatcaggaatgatagtgtggttgggagcaattgagatggctatttgtggggaatttgggacaagaatagtagcatttggttgatgatttgtctcaatagcatcattattgagtgaaagaggagcactagtacccgcattagtaaaaaaaaaagttgcagtgggaacacatagaattaggcagagtttgtacctttgtaatgtctgtttgtctgtggccaggatagtcattttcattgaaaatgacatttcttgctataaaaattctccctttgtcattttcatatgtcttccccttgtggaagggtgaatacccaagaaatatacactattgtgatctgaactccattttatgtgagttataaggtttaaagtgtggaaaagatgaacaaaccaaaggatcttagaatggtatagtcaggttttttgccaaatagacactcatatggggtaaagtagttgagaacaggggttggtaatctatttatggtgaaggtagcactctggaatgcatgccaccagtaggtgagatccaaaccagagtgagctaggaatgtcaatcccatttcaacaatatgtcggtattttcttcctacttaccattttattcatgggtatgaggacaaggatgagaaaaaaggatgccttgatctgtgaggaacttggcaaatggtttgtattcacctccaccatctgcctgaaccgattttatgggcaaaccaaattgtttttttgccatacttttaaacttgatgaacatttcaaatgcctgagatttgacagtaagggggtaaatccaagtgaacctgctatagtcatccaagaaatggatgtaatatctatatccatctttggatgggacatgacaagggccccataggtcagtgtgcactaattcaaggggctggctggcatgactagatgataaagggaatggtaatttgtgactttttgcttattgacatgcattacaaaatcaaagtgtgtttatagtttcagtgtgtggtaagagtctaacaagtgtagaatgggcaggatgatccaatttacaatgccataaattgacatcacgtgctatagtggtgtgaaagatagatgactcttgtaaaccagaaaaaaaaaattattacttgcaagattattacaattgttctgagatatatcattctcaatattgagagtacaatggggaatacaagaatcaagaagcaaactagaagtagtggctaggtgacactgcaaggcagaccttggtcgaatagatgaatcaccaagaagatacagtccatctctaaccttacctttgagtagcacaacacctgtctctttgtccttaacaaaacaataatgattgtgaaactcaaggaagacattattgtcctctgttagcttagacacacttataagctttttagtaatggctggaacatgtaaaatagatttgagttgtaaagcatttagattagttgaagaaggtaaagtagtaaaatctatatgtgaaataaggagcttcttaccatcctcaacagctagagtatctgacccattgtatggttgaaattcatcaagatttgtattgccagaggtgacatgagcaatggcacctgtatcagcaaaccaagaatggtcatctccaaaatctttcaccatagtggaagtataggcttgtggatcatagtcaaactccagctcagtgagaaatgcacggttctagttctggtttggctttggacgaacccagttcttcttatatcgataacgacacacagtagttgtgtgtccagttttcaggcaaaacttggcatttgaccttagtggagttgaaccgaaagagacccctgccacgaccaaaggtttgaatgggatattcagttgcaccgaatctttgattgggaatgtatcgagacacattgccacggccagatccaagagcaagattggcttacatcttgacagtaagatcggccatggtgttgtgatgttcaagtctgctttcatgagagagaagcagggcttgaacttcctcaatagacagagcatcacttcgtgatgtgatccctgaaacaacagagtcgaacttaggctcaagcccatttagaagttgaagcacaaggtcctaatcaataacaggggatcctgcaatagtaagagagttagaaatggatacaactttgtcaatgtattgagagatagtgagactcccttttgaacatttgagaattggcctttcagttgtaatcgtcaagctctggtttgagatgcatattttttctcaagagcacgccgcacagcagaagaagtgggatagttggccatagaggcaagaacactctcaaacatggaagaacgaatccaagaaaggaggagttgatctttctttctccattgctgaaattctagattgggaccgtcgttgactaatcgttcaggtggtggaatactagtgaaaaggatctcatcgagatcatgaccaatgacagtacgcacaacttaattgagatttccaagagaggaaatttttcggtctaattttactgtaagggacgaggtaagggagtgagagaaggggttccaagaagatgggggagcagcgttggtggcagcagtggccggtggagcagtggcagaagccatgggagctgtggcagggctaggatccgaggttgaagacgacatggacgtgagtcaaagacttctgataccatgtaaagcaaaagaaagtagagcttgaattttgaagagagaaagaagaggaagcaaaagacttgatttcattgattaaaaaaatacaacttatatacaagtttattacaataaagaaactgttagaaaacagttgtaacaaaaaaaagtttaactaactgtaactaacacctaagtgacagcaaaagtgttagccatgcatataataaaatcaatttttccttacataatctgtgtacacatatcattcctcccattaattaattaacttgtaatctcttcaacctattttgtatttcgaagtgtgaaggggggcctaattttctttttctttctttatacctctttcttcctaatttcatataaaatcttatccatatagatattatcatttaaaaaatacttagctatccttttcttcatttatattttaataaacaatattacattaattgaaacatatatatcacaactctgtttatttatttatttatgtttcacacatatagtcaacaagaatgatcacgatggaaaaatctaattttcaaaataattcaatgatataaattggtctagtatatgttctccataatcttattactaattaatcatcaacttccgattaataatcccttaaattatatttagtaatatggatcattttaaacacttgtttttgacaataattaaaaagcaaaaatcatttcatattcaaaagtaaaattgagaatttatgatatttgatgatgatatatattcacctagctaattaatcctttttaattaaatcctagtacataattaatattggctgcggctctcaataatttcgttttcactactgaattttcactcaggtgtatatatatgtattatgtatggcccctaactctcccaattatcaacccacttttaaaaaggataaagttctggagttttattttttaaaaaaatatttatatatttatatgaaaatatatagatttgatagaaagaattttattttcatgtgtaaagacatgactagtccttatgaaatagcagattcgatatgtttcttttatttttttttttttatttttgttttgttattactacttaaattgatggagaaaaataaattagaatatttttgagagaaaaatagaaatttatattaataggcttagataataatatattacacgataatatatcattcaaaaagtaaataaataagataaagctcgaagaatattagatattcaatttaataaacaatatgatacaaattacatctattaataattatattattagaatttggtagcttaaaatcagctcattcacacgaacaaacttacaattattattttaagaaatagatattatatagctattaaatttatgaaaaagctttcatattattcatctaaattaattgatttactatatattctttcaaaaacaaaagaagaagtgtattgaagtgtgttaagaagagccatattattaacctagtatatttcacaccttttggatacttgatcgctaataaattattactttcttagctgagattgttgttagaatttttttttcatgttattgtaaacagctttctatgcttatttttataattttgcttttcaagttatattttcatgtaataaattttatccgatttacttattaatataataaatattttcattttctgtctctcaaaaattaaaaaaaaaaattagccattacaataaaaaccaaataaaaatttcatgaactatactgtttttgtttatttatttatttatttgggatgaccaaactttccaagaactttcttgtagtctagaaaattctctccaacaactcttacaattgaattcatttttttttttacgttttgttttcacaacaaaagttattgtggctacatatatatagtacaatatttgtttatttataaataaataaataaccaaaatgagatgtgactaaattactacttatgctacatgttatatgttagcaaattgtgtaaaaataattagtaaaaatgatgggcatattgattgttcagagtgaatttttgtgaacgaattcgagaaatgaatcatttttatcatgaaaaattgggcaacaaaattttataaaccttccaataagttataaagagaggatatttttattttatttttttggaaaagaaatatatacatgcgtatatatatttattaacatagattatatttgggtccaaaagcttagatgaacccaaaagaaagacaaaagaaaaagaatgtttggaacatcatgattaccttgacaatatttgacaaaatcaacaaattataataaattttgagtggacaaataaaatttacataaaattccacatctgactaccaaagataatattcaaaagtaatcctgatcagctgagtcatgactaagtagtaattaataatagtgactaattatgactatcacagccagcctagcccagactcatatttctacatatttgtcttcgaataaataatctatagataaaaacaatacaatatccaaagttgataaaaaagaaaaaaa

SEQ ID NO: 186832 - DNA, 2200 bp, Cannabis indica
agagagagagaggtgtagagaaaactgggagtttgaaaaatgagaagagtagttttaagtttaatgtaaagtagacctatttttaaaattttaaaatacataagtttaaggattaatttccctcattagtatgcataaataatcaaatcccttccaaattcacttaaatatatacattgattctactactgaaaagaaaaaaaaaatagtattctgtttttgtctccaccttagattcattaactctcttgttagcaaaagagaaatttaaggcaaaattttccaaaaaattcactttggtatatatcttaaatattgagaaatagcagcaatagtttccaaaactatatttcttgtaagtctgttagttattattttaacagattcgtttacttattcaaaaataccacgtgtcgaaatattattagtacaaattatattttaatttaaataatataaaaataaataaataaataaattatttaaaaagtcttaatttttttcttattttctttttgttattcatcttcttcgttcagccacccccaaccctcatgacagcctcacccaacccgcacaatgaacggttgtgctccgacaaccctcaccctaaatagaccactactctgtttacccaatgcccgagaacaccaaagtcccaaatcactttctcattcttcctctcctcgtcagagcgggaatgttcttctatcatcgacgagatttggccagacaagctctttgctacccaaataaggcggaccacctatgctccccgttgacgagatctgaacagctatgttaagttatactatatttgtgattgttgaactgaccagatggcggagaggttggctgtgactggaccgtgatgttggagagggctcgccacatctggattgtgacggtgagagaggagtctgacgattgggttcagctagatgtaagagagagggggagagggaatgagtgagatctgaggagagatcgaaagggtgggtggtgggtttttggtagctggttggatcggggcttggggtggaggcttgaatgaaccgttggaagatgaagaagacgaaaaaaaaagaaacccctgagaaaaaaattatgatttttaaattatttatttattttcaatttttattaaataaattataatttggaccaataatatttcgacaaatagaatttttgaataagtaaacggatccgtcaaagaaaggactaatgaacttacaagaaacgtgacattgaaaactattgtcgctatttctcaatattggggactaatctacatcaaaataaactttttggaaactttttggtaatatagattttaaaaaatgagttaaaaattaaaagcatcaatttaaaagagttatgtagtgtaattttctcacattgtaagtgcactctcatcaacttctctaatctattatttaaaatacctcactaaaatcttactttttgtattttacctcacacttttgcattatatcatatatcagcttttttatttctttccgtacatcatttaaatattatattttacttatataaacaaaaaaaattaaaaaatattaaatgaaaaaataaaaagaaaagagagagaaattattaaaatattgtttgaaaaatgaataatacttctccacatattttactttttaagctattttagctcatttcttagaacacaattttaatacatattcttcatattttaccttttgaactagtttaaagatattgttattgtgagtgttttaaaaaagattttttattttataatacatgcggtgttttataaaatatttatactttttttaattaatgtcatctcgtatttctcttttatctattcattaaaatagaatattagtgaatttgtttgtattatatatgttactgatatgactttttactataaactattgtaaaaatcccacatagcttataaattattgtgggttttatatttgtttatatattaaaatacttaatttactcaaataaataataattatatctttttaggttgggttttaaaagaaatttatagtctattaaaccaaataaaaaaattacaataaggattcttcgtaaagccattaacattagtaagtggattatattagcttgtgtcttgcaacaatcttcaaattcttcctataatacacatcacttaataggtgcctaa

SEQ ID NO: 186833 - DNA, 851 bp, Cannabis indica
tttttgtgaaataatctctatttataaataactcaaaaccaatacaaataaaattacaataatatcatgttaggtaatattactatattaaaaaagtcagacattacaaaatacaaacaatttgcatacaattttattgtgctaaattattaattgttacatcactaatcatatgtttatttatttatttttattttttaaaagtgatgagaaattcattaagccaaacaaacgattaatcatatgtttatggaaaaacctctatgagtgactctaaaccaaatatgggtgtaattttatagcgagtgaaaccagctttgaaaaagagattttcccattccttttgacttctttctctcccattgaacaaaaccatcatcatcaaatcaaaagagatcttagcttcatttacttcatgttcatcttttttgctatttattaccacatctattatcacaacctttcctccttcattgctcggaatagcttctctacatttctttaaaatcgttacacattcttcgtcgctccaattatgtaaaatccactaaaagaaaataaatataattatgatgtagttttacttatttttttatcaataaaaaaaactaatgtgtatatatggttagaatgtatagatgtgcttgttagaaagtaaaatatgatgtgtatggaaaataagaagcatacaagaggttccatttaaaaattaatgaatcaaagtagtacaagctcttatcattggttttcacacactatcaatgaagactctataacatctctcacatattgattattttgcaagttattttttgttttttactctccttttgtagggtttgaatttggat

SEQ ID NO: 186834 - DNA, 3253 bp, Cannabis indica
tttgttaaattatcctggctgttgttgaccttttaaactgttgttttactcttcagcattatttgtaacaattcattcatttctcatgttggtttattcttatgtaatccatacaataactttcttgctaccatagaatagaaaccaatgagtaaagaatcaaaattattaggaaatgaagctactaatttgcagcacacagaaaatgtatataaatttattaacagtcacaagagatactgttaccaggacctccctagttgaacgatgaaagaaagaagcaaaatgaaaaatcaatcttttttttttaagttacaaaaagagaatggaatgttaccgaagaccataagttaacaatgcactactacttgcaaatttcagcagcaactacaataataccccatgatggtgatgatggtgatgatggtgatgatgatgaacccacctaaacttgttactttcacatggctaataactaacacaaagcaccacccttcctcttcgattactttctactcggtcccctcttcattcttcaatgattttggggtcagaaaaggaatcgataaggaaatagtatgccaaaccatttatagtagtagtcgcttgcttacgtcctcttcataagatatcccaaaattatgccaagcaagccaataaagatgacaaacatgattgaaataccaccactgctgcttttgctgctttcacgtctcagaagttcctacacacacagtaatcttgtcaaaaaaacgacccaaaccaaggaataatctgaagatatattgaaagaaaggacaatttactagtaaatcaaatgggcatacggtaactagaaagaagcatgtattaaagtattacatattctcagatgcaataccagaaggatgtgacactccgattaaccttccccacttccctttacccaatgaaatagttcatgatctacaacagtaaaccagtgcttggaaaaaatatatgccactaaacaaaaaaattccctcccaaattttcttacaagagtaacaagacatgatacttgtatttcttatgcagattgcccaagttgtaactgttggcttgattctaccataacattgataatctaaacccattcttaggaagaaataaacaagtataatttagccatttcgagaaatatattaatcatgtataatcctcttcaaaagaatatgcataatagggcctcaccagttcctggcgaagcttgttattttgttgaactgcattgttcttttcctcagtcaatctcgaaataagaacttttgcctgcaatttacgtaaacaattgtaaacaaaacaatatcgtgtagcacattattaaaaataaaatacagagcacaaatgaaactgcaaaaaagcagcagcatctctctagaagtatgctgtatactaaccactctagcaacacttaaaatatgctacgccaaagacaaaaaactacggtaaattatgagaaatacacatacttcttcatctatgctgatgtagcagcttcaatagagttaccacttaacatgcaataatttcattttcaaaagtttccccatttacaggaaagttaaaacataaaaatactacttgtgatgatgaacaaatcagccattacctattaaagccaattttgaaaagaaaaaaaaaggtgaaaacactcagctaattaaaataaatggaataatcatgttttctgtcactgtcaaagtcatactcaaaaagaaaaatggcattaaacagaaagaagaagattaccacaataaataccgattctctatattaatatgtatgtgtctggtgtgtaattttgcttgcccatatgcaaagaatttgagtttttgcttgaaaaatataaaccaaaaataattttacaaattccaataatcttctttctctcctcttaagtttacctctaaagatttttcttgaaactcaggccgatcagccaatgcccttgcagcctgtgatcaccagtaaaaggaatgaattcattaattatcttttaatatgagaaacaaaacataacaactcatcccaaaaatatttgactagagcaccactaacattggaaaactcagcaccattagaatttccattctccgtaacagatcccctcggtgaagatccctcttccgaaccttctgccaccggagacggtggttgaggaggagaaacataaaccactctcaatttgcattcctcgacaatgtgccctgcttccttattaaactacaccaaaagaaaagtaacaccttacattatcgaatcgatcttatagctcataattcaaaacataagaactccctaaaacaattaccatttccgcattaatatccttggcagctacaccatcatttactttcacgctctgcaatagaaacttgtccttgcattgcatatcagcaggggcctccttttgggcttgcattgtgactgagccaaaaaaacaatcattacatgattaaactcaaataaaaacaaaaactctaacagaacaaaacaaaacaaaacttgtaagtaagtaggatgaatatgagttgaagcaggcacctataacatcacacgtggaacgtggtaagacaactccggtgttgggacgaacacagtacttcttaggattcgtagttttgacctgaacatgaatcacatgatcaatcaaatccatgttataatcaaaagcatgcaagatccaagctttattgtaccataataagaagatcaatcaaatcctgaaatctaataaataaattcgatataattcgaattctaatgctttcaccattaaaataaaacccttaattggaacaaacaagagggaatcaaatttgagctaaggtcccttcccaaaaaaaatctaataattgatgcgggtgatcttaggttttgctacattatatagatagagaaaacgaaaacccagaaaggaattaccttgaaagccacataactatcggtcttattggacaattgtaatgaacaagagatctgcttcttcaattcgactaagaaaaaaaaaacagtgaaaattagaaacaaaattcaaaacctataagaaaaacaaaccaagcgaaaggcgatccagatgaatgaatatgaagcccccccaccttgaatcgattgaatccatggtgaaaaagaaaaagacttacagggaaacttgagctcaagagggtcgatgctgagaaggtctcctgtgctcattgtgccaagctggtaagaataagaataagaagaagaa

SEQ ID NO: 186835 - DNA, 3680 bp, Cannabis indica
tttgcagaaggtacaaggaaatgctttgctataaatagtgctcttatgaatactaaaatcaatgcaagtagtgtgtatgaaattcacctaaaagctgtattcaagacccactaatcttgaccagagtgtcacagaactcacttaatttttttttccttccaacagtttatttcttgtttgttttatttatttaaacctgcgttacaattttgtgtatcattttcctgtagcaattgctactcgccgcaattgatatggttgatgccaattcaaaatctggagggtacattgtttactccacctgctccataatggttgctgaggtttgttaatgatgcatcttgcagatttcttgtcgtgctgttgctgtctttcgttttccttctctagtttactgctaactattttgctgtcgttgcagaatgaggcagttgttgactacgcactcaagagaagaaatgttaagctcgtgccatgtgggcttgactttggggttccagggtaaaaagatgactctctccttactgcatacaagagggttactgctcaattggtttatgtttctaatgtttcttcttaacaggtttattcggtttagagaacagcgattccacacatctttagagaagacaaggcgtttctatcctcatgttcacaatatggatggattttttgttgcaaaggtatatatatttgatttataaactcaacattttttaggtttcagttgtcacctgattatgtcccaaggccaagtccctataaatttatgtttaagttgctgatgttctcttttgtggtatcttgcagctccaaaagatgggcaatgtaaaaccagccagtgaatcatcagaagcaacggaaacagtggagcaagatgttgaacctaacgaaaatggcgatgatgaagaagcagcaacagaaaaagatgttaaagagaattcgaaggatatcaagatcgcccgaaaagagaaaaaggacagtgtaaaagaaaacaaggttatcaagaaagatattactgaaaatgggaagaaagatgtcactcaaaatgggaagaaagaataccctccccgaggcaggaaaagaaaatttccttcaagagaggaactctcgagaatcaggtgaaatattactcctaatgctttctattaaaaactccattgttagaatattaactctggaatcttgttgatgaaaaattatttatcttatcatggtgagactgacatagatttctttgggttgtttttgtagggaagagaaaagaagtgctttgaggcataaaaagtctacccactgaccactctttgctgttgttggccttctacaaagtccaaaaagttttgttttatctttttccttttttctctctcaaccaagaaaaaactgttacaaaaatttataatttattacaacaacgaacaacagtaatgtagtttttttgggtctctctttagtggcagaaatgtacaagattttggtacccgagttcgttgtactgttattaggtttgtataataatcattattatttttctttatttgatatgcattttagttcaaaaacttgtctttagtttattaaaacaagtgattacgtgtatccactatccacaggtacacataatttatgtacttgaagtgggtttcgggaagagggggtgatactatccaccttatagttttcttctaattcttaatagataggtaaatgtctctttttttttttaaagaattttttaacaaaacgaccaaatataataaataagatagtaaatataataaaactacttttatttcacgttaatatttttaaaaaatttatataatgataaaattatgttatctaattttactagcattttatattaatttattttaactacgaataaatatattatattattaaatatatacattacatatataacaatatttaatatattgtatactgtagtgtactagtgttgaccgaaatttttgtcaacaattaattcaggttagtttgagtatttaatgcgtttaagaagaatatttttacgtgattggagcattaaagaaacttagtccacgagttatttttatttatttattgtcttacagagaatgattatttcgatccccttttttttatattcttgaattatttataggttcataatggtggttcaaaggctactttcgtcttgctagtttgattctacttcacacaatttcccatgcatggccttagcgcatgatttcttattctataagaatgcgcctgggcccaacgtaagtgtttggtgagacaaggcttttttctcatactgatgacttgacagttcgcaaggcaactgtcaagtgatgcatgatatgtcgtgaagttagagaactataggtttaaactcttaaacacactttccctaaagagtaggttgaccttccccatgccacattaattatgtatagtttcccaatcttgggcaaagtgccaaggccataccgttgaagaagtgacacaagattaggtccaagagcaagtctagggacaagttctcaaggtggctcgtgaccaagtcaaagaataactcttctatctgaacttttttttttttttaatatttcatttaagttcaagtgtgatcagacgtcacttttatttaaagagagaatttttttatataaacttgccccatgtctatggtttgtaactctaaacctcgcttgaataatatatttaattgcttataatatgcttatttactttttcaattgtttatttttttttctttgctctttttatgcttagcttgggagattttattgcctttatgaaaatatagttccaacgactaactactttcacttttccaatttcttttcagcacaagttaaaactgatccaggtgatcactttgatttgctaagtgttaaattttacaagcatgaaaataatttttgattgataaggacaattcatttggatccttatgattttagtgcccatgctggcctattttatttgcacctaagactaggataacttttaaaataggcacttgggctcagctacccccaagtgactggagcattaagatgatttggtcacttgctgtgctacagttatttgcgaatttagaagaccttatgctccaaaaattcctatgacattttaagtatgccattttcattgataatcgcctttaaagcttacattgagaatttaaaggcaattttatgtacattcaccccagactattgatagtacgtgcgaaggtgtttaatgttccatgcacatgaaacttttgtgccatcaaggtattttaaattgtaggtcctaaggaatactgttccgtcaatctcataaaaatcttttcagtttggacctatcactctcactctaggatcttgtttggctggaaagacccatctcaagactaagtctccaagaccaaatttgtgatctttcactttggaattaaaaaatatcaagcgacattttgttgatatacttccaactgcacttgagatgagtcccggagcccttcgattagatcaagagattcctagagaaatgtataatttgtagttggatcataagtgttacgccgatgcgaagagactagggtctcaaccaagattatgaattcacacccatatgtcatgaaaaaaggtgaatgctcggtcgtggattggaat

SEQ ID NO: 186836 - DNA, 2878 bp, Cannabis indica
aaaaaaaaattagtaaatgaaaaaatgttcaattatatattgttttcctattttatgtaatgaacattttttgtaaaaggaaaaaaagaaaaggtaaataatatttgtgtgcatttacgctgtcattacaatagttttacggagaaaagtataatttaattaaagagtgacgtacgtaatttttttaccccattacaaaaatgttttctttggtgttttggtcaataactagaactgatcacgtgctctttttttatttttttattttatgaaatcacgtcttcggattttgtttgagaaatggagcattttaaagccaactcataatttatgatttttatgttttatttgttagctagtatagtagctaggtaccttgtaattttattattcaataaatcaatgtacaactgagtatgacatatatgaatgaattgagaagtgacgggtttgttcaccccctcctctcgtacacttcttataaagaattttgcaattaattatggacacattttattttctaaaaaaattaaataaaaaaagtgttgaaatacacgcgcagtttttgtcgagtgaagtgaattagtgaaggcacggatcccgattggagctttatttgggtggaacgtagtggggtcgctcatcgctgctctgtggattcatgtcctatgtctcactcatttcgatcaacaaccacccttctttttactttttactattggcttctgctgcttctgtccaaaatagtacaaccatcccctattcttacgattttaccgcgtgaaataagaggggtcttctattgggccaggcccagttgggccgtactggacttaaatgggctgggctgggctgggctgggcttcaagattgattaatacgtggtttgtttgagtaaatgtttattgaaagagactccagatactccacgccattgctgtgttgtagttctatacggttttacttgacgtggaccaaataaagagtaaaagagaaagagagaaagagagaaagaaatggttaattatggtttatattataattgtatatgggtaaaaagctgcattcgactacttctgcatgaccaatgggacattaatttatatataaaaataaaaccacttgtgtctacgtaagagttgttaatttggcacgtgataggaatatcttgtcttttgaatccctgcaattaaatagtttactaatagaaaaacaataaaagataatatagagatacaatcccaatgggttgatgatttgataatcatgaatttgagggtgatccacacgttaaacgaattttcaaatactagtctactactagagaagaaagagatgcccttagtaaacaagacccccttttgtcaaaataaaagcaaacgtgcctagatgctttcctgcataatcttaacaaacgtttcaatataattctccaaaaaaaaaataaaatatgatttctgtaagtcattgagctgccaaagttcgaagacttattacaataccctttttgaattactttacttactcaaaagattcttcattttttcctttccttttctaaccccaaagctaagaacataaaaaaattgtcacctcaactgtaaatatcattggcttataatatggcgcgtgaatcaactatatataaatatatatcatattcctctccaacaagcaacttattatatatatgctttattctccgacaagtttcattacgtatattagtgctccatcctatagtcaaatcttaccaaaaatacatgcattaatattcttccctcaatcatatatacataaatttataatattacgttctctatactttttccacaaaaaaatagatatatattaacttgtgaacatgtacgctataagagtcccacatcgttaaataacatatatatgtatatatagacactacatgataaaattcacatagagaaaaggagagatagactacacaattaatctgatctgagtatgacgccgatcgttagcaagatatattgttcatcttctgaggcagtacttgtggtaagaagaaggcctcttgtagtgaacggtggaggttttgtcgtcacagattgtagccaaaggattattttcagagttgatggctgtggaatcagtggccctaaagaggaactcatactaagggatgctcagggtgaagctttgcttctcgttcgtcgaaaggtatacatatatgtatatataaatattagtaattgttattatatatgaaatgtaacgtttaatatatagtagaggtgagaattttgatagagaaaatttttatgcaagcagggaggaattgttgaagcgctaagcattaattacaagacgtggagaggtcacagctttgattacgaaggagcacccaagttggtttttagcttaaaagagccaactaatattgttaagtcttgtttggcgaggaataatttgattagaatctcaattggaccaaagccaaagggaataaccatttgcactaccaaaaactgggatttcgagatcaagggccactttcccgatcgtgattgtagcatcgttgattctagttcaggcaacgaagttgcgcaggtaataattattataacaattataaacacatatatacaaccaaattgatcctagttatagctaatctttttaattatggtgcaattagttaattactgataattaatgaggtgtggtaaatggtgcagattgggattaagaaggaggtgggtgaattgaaggataagagcaaggacgtttaccatgtggtggtgaaacctggcatcgatcaagcttttatttttggagtaattgccactcttgattacatctatggcgagtccactagctgctagctagtatagctttt

SEQ ID NO: 186837 - DNA, 9161 bp, Cannabis indica
ttagaacttttttttttaaaaaagtcacaaattattaaaataggtaaatttaaaattttttgtctaatttcatatggtaattatttatataccaaatcttatcacttaaacttttatatatgaaatcatgttctcaaattttaccatgtctcgtattatgccccaaaaagtttttaacggcctaataaatttgaagccaaaatttagtacatgccaattggggatgtaaaactctaaattgacctaataaaaataagaacttttcccaaaagcttccaataatattttatccttttgcttaaaaaaaaaaaatctaaacatcacagttaaatttaatatggttgccaaggcagtagccgagtcaaattaactcacataaactcagtccaactcgccctggctcttctccctggccacggccaccaccaccaccactcaaagctcactcatctcctgctacgatgtaccacccagcttaccatgcgccacctgtaccaaatccaagctcaagtcactaccaacccgatcccctctatggacccgaacctcattgccgtcaaactcatcggcgtctgcgcttcacgcgctagtgtccgccatggcacgcttatcttcacccactacctctccagccccaacatcttcgcctacaacgctattctcaaggcattcgctcaacacaatgactggctcagcactttgcgttactttaatgcccagctggttctgcctagcgcacctgacccggatgaatatactttcacttcggtgcttaaggcttgcgccggtctcgcccaagaagacgagggtcggaaagttcattgcttagtgactaaatacgggtgccactcgaacatttttgttagaaattcgcttgttgatttgtattttaaggtgggttgttttgagattgcccataacctgttcgatgaaatgactgtgagagatgttgtgtcctggaatactttgatatttgggctttgtttgagtggtcaagttgataaggcacaggctgtgtttgatggtatggtggagaggagtttggtttcttggtcaacgatgataagcgggtacgctaaggtgggtgatttgaaggaagcccggcggcttttcgaagagatgccggagaggaatgttgtttcttggaatgccatgattgctgggtacgcccagaatgagaagtattctgatgcagttgagctatttcgacggatgcagcaagttaaaggcttggctccaaatgacgtgacacttgtcagtgtgttgtctgcttgtgctcatcttggtgctcttgatttggggaaatggattgataggttcataagacggagagggatagaattgggtctgttcttagggaatgcattggcggatatgtatgccaaatgtggatgcatcgaagaagctaaaggggtttttgataagatgcatgagagagatgtgatatcgtggagtattattattaccggattggccatgaatggccatgctaacgaagctttcgagtgttttgataaaatggttgaacatggggtgaggccaaatgatataactttcatggggttattgacggcatgtactcatgttggcttagttgaaaagggcctcaagtattttgatacgatggatcacacttatggaatcattcccaagattgagcattatggatgtgtggttgatctgctcagtcgtgctggccgccttgatgaagcagagaagttgataaactcaatgccagtagagcctaatgtcattgtttggggtgcattacttggtggttgccggatatacaaagatatcgaaagaggagaacgtgttgtccaccggattcttgagctagaatcagatcactccggaagctatgtttatcttgctaatatgtatgcgtcattaggtagactggacgatgcagccaaatgtaggttgagaatgaggaacaatggagtgatgaaaatgcctggttgtagttggatagaggtagataatgtagtatacgagttcttcatgggtgacttatcacatcctcaatcagataagatattctacatgattagagaactaaggtggaagatgaagctagctgggtacaaaccaaggacagatcttgtggttcataatatagatgaagaagagaaggaagatgctttgtctgttcatagtgaaaagctggcgattgcattcggactaattagcactcctgaaggaactacaattcgaattgtgaaaaacttgcgagtctgtaatgattgtcatgatgcaataaagataatatctagaattgctaacagagagattgttgtgagagacaggagccgcttccatcatttcagagatggtagatgttcttgtaatgattattggtagcaagtagcttcagcattggatgtaaaaagtcaatgaatatctcggattggaaacaacaaatatggtttctcattttgtttttcttcttgttagataaaattaattaattgtataataacaattgtgaaagcttgcggcacccctactaatctttacactacactctgtgttgaaagcatttttagggtacgttcatctttaaattttacacgtagagataaatttttttaagtttttgggtttcttcaaatattttaattcattttttttatttatttttccattttttatcacaacgttaataattggtttcttattttctctattttttttgttatttttaattaataaaaagtattaaatatataatattatattgttgtaaaagaaaatatgaaaaattatgtatagtgtaatataaaagtgtgagctaaatagataaaattgagttttaatgaaatattttgcaaaataaagtagagatgttaacatgagtctctagttaagagtgattaatttctaaatcaagttattttataaagtaaattttaccttgtccaatatgtttctcgataagtcttgagtattgaaagattattttttggcaatatcagttgtaaaaataatttttattataatgtatttatttttaataaatatatttaaattagacactcttattacacaataataacgtatatcaatattaactatttatatcatgtagggaccacgtgacttgttcattgtgtgattgggattcattacacatctcaatatctcaattgttatgtttaatagctatggagtttttttttttttttgaagtcaaatgaattcggatgtgtttaagtccaaattcattcatccattcatcagatctttcaactataacaacgataatcttcatttattaatgttttcttctgtattcaaacctttaaccttctaaagctatccttagggatttctccttataaaacatcagtcaagagttatcttctgaatctcgcttggtcttgtggactaggagtaaaaaatactgacagcatgtaagatttcttctgtgtaattttactttcagcagttttttttttctgagctatcgtttgatacatcaaagtttagtttctgataaattagaattctggtttgatccatcaagttctcacagctattgttatccgtttgtttggacataaattgacaattgtaaaacaaagattttgaagtatatttactgaaataaataaagctcttatggacaaaaacacattagtacgtgtgttttggtaggtttaaatataagtgaaggcgaaaagaaaaaaaaaacactgaacttaattttcttcatacaatgcaggtagaaaaagtggaacgagagctttcatatatataaaaaatggccgctaattctgttatcaagtatggaatcataggggtgggcatgatggggcgtgagcacctcatcaatttacaccatcttcgaactgaagatgttgccgttgtagccatagctgatccacatattccttctcaacaccatgctctagacttagcaaagtcttacaattggcctttaaaggtatgttccaacctctgtcatacttcaattgttctgattagtaagtttaaaagatgtggagtgtaacaccatgaatggattctagtttatgctagcctttggttactttgagagagccaatgatactctaatttataagacttgttattcacaaggtttttacaggacacaaggagctactagacagtggagtgtgtgatgtgctggttgtgtcaagtccaaacatgacccattatgaaattttaatggacataattaaccatttcaaacctcatcatgtactggtggagaaacccctttgcactactgttgctcactgcaaagaggtaagtttatcatttagcaacatgaattagcctttattcaatttgtgcttaatttgttgtttgaatatgtttcatctttggactagtattgctgtgactaaaaagtttgaagagttcaaaagcaagtgcacacagaaagggattactcatcctcttagcttttctacattaaaatactatgcctattgttgactttgcatggattggactattagtttctttaattatatggatcatatacaaataatgtgtttggaaatagattgtagatgctgctaaaaagaggaaggatatgctggtgcaagttggattggaatacagatacatgccaccagtcgctaagttgatagacatagtcaagagcaaagctcttggacaagttaaaatggtggctattagagaacatcggtttcctttcttagtaaaggtattattatgcgtttttttttttactctgttgaaatatttttttatcttatgcaacttaagcttctcgttatacaattgatctcattcaatcatgcttgtatcaggtcaacaattggaaccggttcaatattaatacaggagggacccttgttgagaagtgttgtcacttctttgatctgatgaggctctttgcaggagcaaatcctattcgtgtcatggcttctggctctattgatgttaatcacaaggatgaaagatatgatggaaaggtaaaatgatgtggttcttacagattagtacattcagttttcaacttctcatcataatacagtttaaccaacatcatacttaggcctgtcaaggcctatggggtatggcagggcaaacccatcgagatatttgtattctcacattcaccaagtatgagattagttaatagtatataactattttggtaccctcccccttaggctaacttttgggacccatatcacgaaagagttatgcacccaagtagttgtgtcaagtggtatcagagtcctgcaccctcaagtgggactgatttcgcgaaagagtaggcaaccatagagtgggctgctgtggacgctggctccaaaagagggtgtattgttagtattccacactggccaagtatatgggaatggtgagttctacccaagtagtatcagacaatgcacaccgccctatagttgccatttggttactcattatttgtttgtatgttatatgttctgctgatgtaagttgctggttcaggtgccagatataatcgacaacgcgtatgttattgttgaatttgataacggttgtcgtggaatgctggacctttgcatgtttgctgaagggagtaaaaatgagcaagaaatatctgttgttggtgacattgggaaggtatgcaaaagaagtctttttcattcaatgtaattaccaatactatgcatgaaatcaaaacttttgcttagattacagggagaggcctttgttcctgaaagcattgtcaatttcgggactcgagcagcaggaagagctggtgttgaatcttcaaaagctgaggacgatcgaatcaagtgagttgtgaaagaattccataaacatgtgtgtcagtgtatatatttggtttcataagatgataatatttatatcctttatttctcagatatgatggacttcaccatggttctagctatttagaacatttgaatttcttgtacgcaataagagcaaaaggtgaaaaagctccagctgtggatttggaagatgggttaatctcagttgccataggagctgcagcacaactttcaatagagaaaggtcgatttgttaccattaaggaagtaatgaactatgaataggatcacacattcaaagattctatgtatgtagctctcatttttaactagaggtttttcactctatccacgtaaatatagtactgtcagccggaagttttataacttaccattgttatcatcacaactctggcttcttcatgtggcataaataacgaatgttagtattttgttgtattttaatatttttttgggccattaatatctgaacaccaatgttatcatcatctttttgtttatcttttaatgttttttttttttcagtgattatgattttttttaattattgagtccaccaaagtatttttttttatgccctctaactttttaggtcattcaaattttttcatgaattattgagattgttggatttaaggaattctatctaaacgattgtttatttactaaactgtgtctcccgaattttgatatctgttaaattgtgctctcaaatttaaacatgtaccaaattatgtttcttaaactttcatctacattaagcttccgtcactaaaattgaataaaaatttttaaatttaataattttaatgagaatttttagctgtatgaaaattttagggaacatgatttaatatatgtcaaatttaaaagacaaaaatcttaattaatcaaatatttaatgactaaaataaaatttgggttgcacttggcatctacttttaagtcggaactaaatttaattgtagagaacaaagtccaccaaataaattattttgtttttaagtgccaaataaattccttaagtattattattgttaaaaattcatatcaacatttgagttttaatttttgatataattaatgaacagtatttggtcattgacaccattaatagattgagttttagttaaatttcaattaatacaacaagagcctctacacgtagtaacacgatttactaataatttgctttgccaaacaaagcaatggtttttcttttcttattttcagaagagaaaaaaaaaaaaaagctttcgcagtaattattaaattaactaattacgggaatttcagtgttcccgccattttgttccacgatactagcattcgaagaaatccagtgccgtgtgcatgttaaggacactacgcacttcgctcaacttagcacctctaagggtaactcatatataagctgcgttcgtagtaccggggcagtctaaaagttttttctcggagcttgttgtaaacaatggaagacgacggaggagagaaatcaagcttcgtgatcggtcttatcgagaacagagccaaagaggtgctgtatcttcttctatctcgatcatcacaactttgcttttagtttctcgcactttgtatcgctttggtttggaccagtgttttgattactatcatattcggtgattttatgatgaacaattatctgattctgattcgccttgtaaatgacgatatcactggaaattgaagtttaggaatattttgttctcaagttgtttaagggaaaaaaatggaaggtttggatattgaactttaatttatatgattctgagaagtttttagcatttggtgatttgaagattaccttgagagagttgcttcactttatgataattgttctatcatcgaagaatgtatattggttgtcaaatggaaattaggaagatgattctttgcgcctaaaaaatatgttcatttatgtctgtgagtaatttatccactttatgatatcctaaaagaatcacattcacactatctgtgaggcagcagtttttaaaatttcggtggatttaggtttgtgctgtcacctttctgatactaactactatgggggtttttattgatatataatggagcgtaaataattctaagcaacctaagtcattgctacttagtttattgtattagtcgaagctgtggttagtatttaatcatgttttacatagtttacctctcaactttaggtaagattaaaatcaggcagagcatgaaagattcgtaaatgtttggattgagtactgctgaagtgacatcatagcatacagtaaagagagactgagaaaaaattcaacgggaatagctcgtgtatccaaagacttctgaagtacttcaccgagatagaagagtctgattattgttgagacttgagagttgctattgctaagtgaagctgaatttagtgagtaaaaaaaaaagtgaatatgatttgagcggttttgaaatcatgctatatagtgagttgagctagaaagaagattttcagacatttttttatgtacttcagaagtttctatgctgctccttttctgctttcttctctccttcccggtctatcttttctatgttaaagagactggtatatcaattgtagagaggtaaattagtacgtaaatgttgcaaatgtaagctaataataactctcaacagctacttccagctaaaggctggttgctgttgagctgtgaaattattgtgcacaaactaacaatggtaatcttgacaggttggagtagctgcttttgacttaaggtcagcgtcgttgcatctttctcaatatattgagactagcagttcatatcagaatacaaaaacgctgctgcatttttatgatccaatggtgatcattgttcccccaaacaagctggcacctgagggcatggttggagtttctgaattggtagatagattttatgcttctgtcaggaaggtgatgttttgtccattactagaattccatgctctctctacaattagctctgctttgtctgtggtttcttgcaatgttacatatgtgaggaaataaagtataggagtcatttttgcaggttgtaatgggccgcagttgctttgatgacactaaggtgctggatactgctttctcttactaattataaatttagatgctaaaaattgtatcattgtgtcctgagatctaatttgtttgtgtacttttcagggtgctgtgctgattaaaaatctagctgctaaggaaccttcagcacttggtttagatacttattacaagcaatattatctgtgcttggctgctggtgctgctactatcaagtggtattttcctgatgtttagcttttcagaatataatgtca

SEQ ID NO: 186838 - DNA, 2319 bp, Cannabis indica
acaactgatccaaattcatcaatggcagaagatgaatccagaacaaacagccttaataataacattaacaaccaagaagaagccggttccacctcaaaacaacaacaacaacaacatcaagatcaagagacagccatgatcaaagtcgaccaagaccacgccagatggctccaattgagcataggcggtacttgcagcagcggcggcgctgagccaacacccagaagaagaggttccgggtccgggtcagagccgggtgggttaatgatagagctggatctgttacccggtggtagtagtactactaggagacaagaggaggcagccaacagatcaagtaatattagtaatgttcctttgtttcaattagggcctcataataataatcatcaagtctcaaattttggtactaataattatagtactacatcgttaatgtattttcaaaacccaggaactactaccactactagtagtagttctaactttcctgttcctcatcctcatcaaattcctattcaacatcatctttcttcacaatatcaatatcatcaacagcaagaggccatcaattgggggtttaggcctaacttaattcatcatcatcataatcagtatccctcatcatcatcctcctcctctcagttgcataatactaatacccataacaatagtaatattttgatgattccacaactggggtcttcttatttcggtcgccagtttcatctccaaccaccgccggtactcgataccgccgctgcccccgaacccagcttagatttcagagttgttaaccctcccaagaggccccactctggcatttggtttatgctccaagcatcacaaaatcagtaagtgtatagttaattagtagtaaatgttcttaaaaactttgttttgttttaaaaaatatatattaacttgtgtttgtggttttgtcaatgtagagctaaggaaccattcttgcctcaaatatcgaagagcttcttaagaatacggtaattatgattaactctatttagaaaataataatttgtgtacactaattaattaattaatttactttggtataattttcttcagggatggaagcatgacagttggattgctaataaagtatctggtcaataagctgagattggatagcgaatcagaggtaacactttccaccattgtttatttcagttataaatacaagtactatgtataagtggtttaattatatatttgtttttttgtatgaaaaataaaaaagaaaatacatgacaacaacgacaaaacatagatagaaaaattaagccaaaaagagaaaaaccataacaatggtagctagctctagtagtgttttgatcatcacgtaatttagttatacatgaatatagagttggtaggtgtgtttgaaaaataatgaaagaaacatcagaactaaaatgggctgcacttactagtactatttttttcttgcgataaaatcatatttaggtggtgagtttacttctagctcttgtgatcagattctctcttcttcttcttcttctaattattctaataccaggaataaatatatctatctcatcactttcatcttaattaatttaattatattgatgtatttacaattttgtggtgccaatatatatgtaataaactacgaaaactacctaccacaacttttgctttaataaaattaaaataaaaaagaatgtggaactaattaataattgcctataaactttcaagaacatcacattatagatgtactgtaatcaattaatattactagattttttcaaacttaaattattagaagaaaacaaaacaaataatgtgcctacagcatgaataaaaaattacaagtaattttatagtgatatttaaaagataattatttacgatgagtagagacagctctacttgaaagattaagaacctggccctagcaatgtagcttaaatatatatatatatataaatatttatatgtttatataaaatagagactatcttacattaaattaatcgcactaatctaaatacatgttaaactatattcttgtaaaattagctagctatgtacctctctaactagtagttagaaactagatataagttagaaactacacaacaacattctcaaatatttatttttgagaaacgataaaatgcactatagtagatgtccagtattacttaaaactataactatactataaaaaactaataattaatcataataataaagcgtcatcttaaggtgtcatcaccaactacctaataacaattaccatttactttaggtgtagcactgcatatatat

SEQ ID NO: 186839 - DNA, 1181 bp, Cannabis indica
aaaaaaaaatagttgatttcatcatatgtagtaataattgacgtgtgcattattaaaatgccacgttttaattatttttttcttttattaaattgatgtgcatacattttctaaaatgacatatatttttcaaataaacttcgaatatgctttttagtttttactaataaatatatcatgaacacttataatcgatatagggatcttctaaacctaattaacacattattaattaataattgtactaggtccacgaagaaaaagagcaaagattttataacatctaaggtaactaatataaattaatcactaatacataaataatatgaaataaaacacacacaaattatagagggaaattattttatatactatttttttaatttttttttttaaatttactgtttgagtttctaaagtggtttctccaatagtttctatgtagtttgttatacgatttttaattacgatttaaattgctctgttaattgcaataggggtttccatataaactttcgtaaaaataaaaaaaaaaaaaactattttaaagtataaaaataaaaaaaatctcaattaataatcacaccgaattaacctaatgttattagtaaaaaaaatttagggacgtgcgtaattatgtagccgcaatttggacggtgtggctagttgctttcacctttgagtccaaaactttcatatttcaattactcatgagtcatgatatcattacacatgtcaagtcttatcttcttctaattaattaaacaaaagaaaaatttgattaatatttggagaagagggggacctaatgttcatgttgacatttaattttggcagttatatgtgttattattacggcgccatatgttttgtcaatgttacaaaatagtacttcatcacttcataataatactataattgaatacaaaattaaacccacgtgctatatacttattttacgtaaaatggataatattttcagctcactagcaataataataatttaattttatttacattctataggatgataattatatttattattaaaaaaataaatgtaaaccatttttaaaattaatttcaatagttattttgattttatttttatattttttaaattatgtatgtgtatttttatttctcttaaaaaaattaatttcaatagttattttgatttt

SEQ ID NO: 186840 - DNA, 4167 bp, Cannabis indica
tttacctttcaattgaatctttgcaggtaatgatgaatgccatgaatgtccttccaaaagaagtacactggagagaaaactcgacaaacttatacttacacttttggaaccctctttctgatgtgtctcaattggagcaatttggcaggtttagatgcccactaaactatatttcagggttattcaacatgtatttcccgggttgacgatgtatgcttttgatattctgcagcggtgtattcattaataagaagtacttctacttgggtctaactaaatctccggaaaatcaattcaatcctgagaaaccttttgtggtaacatatttgtccagaaatgaactactgtagaattgatagctcattggcagtttctactttgcttaacagtttgttctgttttttctgctaaattatgtttcttggtatacaggttgctattcttactatgttcactcttattactctatattcaactatcatccctatctcgctttatgtttccattgaggtaagactttttggctattatatatgtgtctacctatagcaatgaccataaaactttcctgatggctgcaaacatatatatgatttcagatgatcaagtttatccagtgtacccaatatatcaacaaggacttgcatatgtttcatgctgagagtaatacccctgcattggctaggacttccaatttgaatgaggaactgggacaagtaaagatactaccatattaaacaattgttctaatatttacttggcgatataaaataatgattatgttgataatcattgttacatacaaagagttgtatgttgtttgcatgtgtcagaaactataaaatgatgccttctgaggtggcttattctttcttattgtacaaattgctgctttgctcaggtggagtacatattttctgataaaactggaactctaacaagaaatttaatggagtttttcaagtgttcaattggaggagaggtctatggcactggcgtaactgaaatagagaggggagtagcacagaggagaggccttaaacttgaggaggtgcctccctcactttgatattttatttttgaatatatatggacaaacacatatgcatacatatgccatttatgtgtattattcagtacatgctcatgtgtgcataaacacagaagtggcagtgttctgttttaaagaaattttcatcccaattactcacaggggcaaaagtcagccaatgtggtgcaagagaagggatttaattttgatgatgccagacttatgcgaggagcttggaggaacgagcctaatcctgatctttgcaaggtggatttattattattatttgtttggaggtttatagtgtagcttttatcttatttcatattgataaagttggtggttggtactcaagtcaatcctaaagttttctaagagttccctgcttttctcctttttctgtatgggaaaaacttagcatatggcattttactatttatgaaatttcacttgagttatttaataagctgcttgtaaaagcatctgttattggtttacaatttgtcaatttggccttttttttttccttctttatttaggaatttttcagatgccttgctatatgtcatacggtgcttccggagggtgatgtaacatcccctgagaaagttacatatcaagctgcatcaccagatgaagctgctttggttactgctgcaaaaaactttggcttctttttctacaggttaacctccaaattctttttgcttaaattagttgtaatcttgtgccccctcttttgataaagctatatgtggttgatccataccaatcactttttgagatctctaattattgggagacgccctgctaaattatgattatggtcatcagttttttcctgctaccaggttcctttgagggtgatatgtttttttttttatttccaggcgtacaccaacaaccatatatgttcgtgaatctcatgttgaaaaaactgggtaaaattcaagatgtttacatactgagatcttaaatgttcttgagtttaataggtaagtataaattcaaatttttacataatttgggactatcatgattgatagcattaactttacctgcaatatttgttatccaaatagtacaaggaagcgccagtctgttgtttgtcgctatccagatggcaggcttgtattgtactgcaaggtaatacctttattgaaacttcttcattgtataagcatgctgagcaattggaagcaagtaacattctgtcaggaaaactcattttacagggcgctgatactgttatctatgagcgattagctaatgggaatgatgatttaaaaaaagtatctagggatcatttggaaaatttcggatgttctggtcttcgtaccctctgcttggcttatagagatttaagtcctgatatgtatgaaagctggaatgagaagttcattcaggcaaaatcttctctacgagatcgcgaaaagaagttggatgaggtaatattcgattggatttatgtgtactgccataagaagtttggagattcctgcctgtgtagatattgaggtgttgtagttttttatgtgaaatgtgttgtattctgatgctgtgtcttatattatatgctaaatttattttagaattaagatgcacctaaaatctttgaaattgtactgcaaatttcatgcaggtggctgaactcatagaaaaagatctgattttggttgggtgcacagccattgaggacaagcttcaagagggagttccgtcttgcatagagacgttatctagggctggtattaaaatttgggtgcttacaggagataagatggaaactgcaataaatatagcttatggtaagtcaattatgcctaaaaagtggtgataatttatctttccctttgattattgctttccttagtttcattatgattattattttttcaaatatctctaacttggactcccaaattttttgttgtagcatgtaatctaataaataatgaaatgaagcagtttattatcacttcagaaactgatgcaattagagaagttgaaaaccgggtaagctagattttgattaaggatggtgattcatgcacactgttgtagtatataatgaatgcatgcgtttctaattcctatctaagcaataatgtttctgttactctgttggtagggtgaccaagtggaaattgcacggttcattaaagaagaagttaacaaccagttaaagaagtgccttgaagaagtgcagcactatctccatacagtgtctagaccaaaattggcacttgtaatagatgggaagtgtttgatgtacgcattggatccaagtttacgagtgattctactcaatttaagcttaaattgttcctcagttgtttgctgcagagtttcacctttacaaaaagcacaagtgagtttcacatggcacaaagttgatatatctgtttttaattatcgtagacagataattgcttgaactaggctgctttgatgctagttcaaggggttgagtgattgtgtgtgggcaaaggatctaggatttgaaccccaactgggagtcttggcaccaaggactgactgtttctacgatacataagcaaatgataaacttgtgctggagatttatttggatctttccatcatagaatgagaacttttcaagtgccgtttattcttctagcacttgcttagcaatcttgaaaattatttggtactcaagtttgtcaaatactaatggagtgatgtgtatctcaatttgtagactcctttactgtttagcaatgcattcacacttaatgttcaaaaaggatgagtggttgattactttagctattataatgtaattattattcttgctgtgcacaggtgacaagtctggttaaaaaaggtgcaaagaagataacacttagcattggtgatggcgccaatgatgttagcatgattcaagctgctcatgttggtattggaattagcgggcaagagggcatgcaagcagtgatggctagtgattttgccattgcccagtttcgttttcttactgatttacttcttgtccatggacgatggtcctatcttaggttatgcaaggtttgtgtttttgttatattttgcaatgttgatatcagtgcgagtttaatgtttatgcttctgactga

SEQ ID NO: 186841 - DNA, 1527 bp, Cannabis indica
tttttttaaaaaaaaaatgtgttttatatttatgttgttattcgctctattactctagcttaaagaaaaactaaatatttcatcaattctattcaattgttttaatgtatacattatgaaatgtgcaagagtttataatgaaatgtgtgataagttaattaattttgaagaataaaaaaagaggtaatccttattattatttgaatgcaagagtttataatttgttaaaaatttctcatattactatgaaaaaaggtatatcctatcctcaaaacttgaaaagctgtaataggtaatccatagtacaaataacaataaaggaaaaaagtcttcacaaacataaggaaaaaaaagtaaattaatagtttatacatagtgcaaactatattattgaataaaacactttaggttatacataaacgaaaaaaaaatctaccaagaccgtataagtgaatagaaacttttttaggtacgtataaataataaaaaaaaaagccccataaataatttagaatgttttgacaatttataagttctcttctcactcatgttattttttattacattattcttcattcacccaccaataagcctaagaagagcgtttcatttcagtcttaatggcagcaactaattggtcataagcttctccccaagcactcttcatctctggcgaccacatttcaggtactgcttccttaatagtctccaacaatgcaaacttggtcacctaatgtacataaattaaattcacttcttcatcaaccacaattcaataaaataaaagagttattatgaaaatttggtttaatataaattcaaaataaatgcatacctcaaagtgttcatcaactaccccatatttaaaatgggtagcaccaagtcttttcaagttcgcttctttcaatgtaactttcccggctttcctaagttgagccgctgattcacatgtctacacacccaaagtcgagtgagatggagtaccatatataatatttttttaaaagaaattagataaaatagagaactctacatattaataagttcgaatattattttatttgggatatgattttgtcccgtaattttacagaatgtattccgtagtaaattagataagtctgagggtatattagatgaatgtcaagttaagttactattttttaaccctaattactgctagatcaatctcagcctcagattaaataaattcttcatcaaacagctaccgtacatcacgaaatacattgtttgaaagtacaatagaaaaatcatgtccctattttattttattaaaaacaaatcttggagaaaaaggggtttaccattacaaagacagtcatagcatggggcttgagctttgggttctgttctaaaggaatagcagagtccttcaaaaacgagaacaatttcttggcagacggtgcaatctcaaatatcctgcaaataaatgagtttgaattgaaatcgtataacttttatctttccattttcataaatgctctttttattgaaaaaaaaaaatta

SEQ ID NO: 186842 - DNA, 7533 bp, Cannabis indica
gtacctaagagtaatgctctttatatatattcaattcgaattattatattaggctcgaagatttagacgaaatggagagaatataataattattatcaacattaataattgcaccttattaatattttttttttttttgagaaacctcattaatactgttacttgtttaaattatactacatatcctgtactaccatatatatatatactatataattatcttttactaaattggtgatctttttctctctctagatccataacataaagaaataagaccatgtctcaatattcaggatcaagatcctcaccacttccattgttatttcgaaggcattccagtggagaaatcaagaatttggcttcagtttcaagcagtctcttaccagcctttggaactattgtggatgaaagtcatttacagctcaagaaatatgttattgcaccttatgatagaagatacaggtatatataaatatgtattctcttctcttcatctatttttaatccttcataaatacagatttcactatttaaactactgggattattatttattggtatttttcttttatgattttatcaactaggctaactatatgatttatacatgattttttttttatggaaaaaaaataaaaattggcaggtggtggcagacttttttggtagtgttggtgatatactcagcatgggcatcgccatttgagttggcttttaagaaagtgacaacggggtctctcatggccgttgacttaactgtcgatgcattcttcgcaattgatattattctgactttttttgtctcttacttggacaaaaccacctatcttttagtggttgatcacaagaaaattgctgcaaggtatgaaattatatatgtgtgtttttgttatgtataaatatataaatatatacatatattatgttgaaatatataaatatatatttattcaaaaaattgtaaaacaattatgacttttgttttgataattaattcaggtatgtaaccaaactttggtttcctatggatgtggcctcaactctaccgtttcagctcatagacagaatctttaccggcaaagtgcacactggtgaggcatttggttttctcaatttgcttaggttgtggcgactcagacgtgttagtcaactctttacaaggtagtcggttgatcagctttcaatttttattaatttttatctcagccaaaatattttactactactaattatttaatcatatgagaagattaatgtgaatcatctctatgtactcatgggaagtagagtttcagtcattgggtattcaattaacccggtatgttatttcttacccagactagaaaaagacacacggtttagctacttcttgacaagatgctgcaaactaatctgcgtaagttttccttcacaaaactaatctctttaccataataaatggcaatggacacatgtaataatgtcttgatgtcctaataagaacgaaatgctcaaactttgttatttgaaaacaggtgacactattcgcggtgcactcggcagggtgcttctacttctggctggcgattcaccacaagaacccagagaacacatggataggaagccaggtagcggattttgaacacaggaccatctggttaggctacacctactctatctattggtcaattgtcacactcaccactgtagggtatggtgacctgcacgccgtcaatacaggggagaaggctttcaatatggtctatatgctctttaatattggtctcactgcttatctcattggtaacatgaccaatttgattgtccacagtgctatcagaacctttgctatggtaattcactcatctttaactacagcactaaaagaccaccccttggtggctatcgctatctactgttcgtttttttttttttttcttttgtaactaaatgaaattcatcgagcaaaaatttggtgtcacgtattataatggattcacactaaaaaaaaagcacttacgtatggctctggtacagctaccaatatctaacctttaaaaaaaaagagagagatactcaagttgtattgacttattgatattgtttggcataaattgcaccttggcatccatatcaaaccagagtaacataaaacgtataaatgtacaagcagggaacaaacgcgaaacttcagttgttttttcttcttttctttcttttttggtccgtaagggggaaaaatataacaggctcattctaaattattgatttttatttcaaatatgacgcatttaatgtcttcgttgtagagggatgctatcaatgagatattgaggtatgcgagcaaaaacagacttccagagggattaaaagagcaaatgctggcacacttgcaactcaagttcaaaacagtagagttacagcaagaagaagtgcttgaagatctgcctaaagcaatcagatccagcattgcccagcatctattccatcgtactcttgaaaagacgtacatgtttaagggagtctctcaagacctcattgttcaaatggtacgatataccatactggagaaaatttctggcctatagctgtcccaaaaaatttttgtaatctgtaagcaattaggatgcatgctagtattgattagacccctctagtagaaatgctagcaattaggatactactagtacttggtagctgaactcaaaatgaacacaggtgtcagagatgaaagcagaatattttccaccaaaggttgatatcattttgcaaaacgagattccaacagatttctacattttggtgtcaggatcagtggtataaaattctcttttctgaaatttaaatttaatagatatagcacacatacatagatattatgcaaataaatgtagtaaaataacgcattcttctattttaaacatgcaggaggtgctagtttacaaaaatggtacagagcaggtaactttctccaattctcaattcaaatcgagttgaattttttctcctactctgctgttttgcataactaattctatagtttaattagcaagattctgaaatgaaatgaagtaaaacaggtaatcctttcaatattaggtcaatactagcacatgtgaagaaagaacatattagggagatgaatgttgcaagcatagttttgttacgcctgtaccctaaagtactggatttccattcaatagatctataacaccagtaaaagaatgtagggtgcaatataaatttgaggaagggaagcaaaaacttgctgacatgtgcaattttcacaattacttgaaactacagtattgtttctcaatgaagtgaatctcacttctttttttctcaaaagaattgatagtgtatagtactattaaaattgtaagagatggtatctaagatcgctaaaagtttctgtagtgtttaaaggatgaggcagcccaccacagtaaaaccctctgaaatgccatcaacactctctccacaaaataaggggaacctttgctatgttcttccaacaagaacctgcagagataaactgtttagatcagtcataaatgttcttttatttcataaatgagttttactggcatatgactactacaggatataaaacagaaaaaggaaaacaaaatataaaacataaattgattctattcagtttaaattggaagttaagagaactacactacttagttaagctagcaaaacgaattgagggtggaaaacagatgcattgaactgtttgtgactaaaaacaagtatgtatcatatcattatgacttgactgatgttgtgtttttgccagcttttgtcaaaactaggatcttcagatatggccggagaaattgcggtacttctaaacatcccacaaccttttacattaagaacaaagaggctttctcaggtcatccgaatgagtcatcatcatttcaagcaaatactgcagccaaatagtcaagatggaaagattttactctccaacttcattgaggttgttattttattgtttgttgttttctctacagctacaaaatctttgaaagaaaattttgtaagatggctctgaacaaaaaataacatcatataagatcatagtacccagcagaaattgtataaataccctgagacaaatgaaaaaggaatcaagctttcatctactgtgctatgcagatgtattacttgtttgactctgactctttcattctcagtacttgaagggcttaaagaaagagatgctggaagaaataccctatctcacagaattattgagtgacctagttacagaggtacaatttctttattcttctttatctagctatgtatcatagaaatatttaaatcttttaaacaaaatttacaagatagtaatgatttgcaaaatcgtgcatcatgcttaacagcataaaaaggtatttgcacatgattcttgtacaatacatgtagaaacaattcttaagtacttaaataaattgtatgaattatcattctagtaggtaattgaactctttaatagtttttttcagattcctccaggaattatgtcaactttttttttttgacgtaaggaattatgtcaactttaactaattaggaaataagaaataaggaatatggatacaaaatgtcaactttgactaattaggaaataaggaatatgaatagtaaataatagtaataatattggcttcaaagctagagtatatctataggatgatatctttcgttttacacaaataagacgactacgtatgtcacaaacaaaactacttaaatacatggataccataatcttcttatcgttttgcgtgcttgtgacgatacatgtcctatcattcttgtgtaagaaactagatactttcttgtgtactttgataatgtcgatcaaattttatttgcagtccttagactcaaatggggatccacaaaatcaagaatctctagatggaaatacaatggtagaaggtaaagtctatatcattttagtttcagcaacgtgaattacacactacctaaactctgatgttactataagtccttgtaacaagtggcgtagatcatctcataccatataggcatatacgagccacacggctggtggggacccaagtacttaaatgccacattaaacgcaaatattctgaatccatcataattctgagagataactagaagttccatgatcctgataattctatgctattatttgcagaaatacctgataattctagtacctggtcgagggcatgtcctgtcagagtgattatccatggacatagtcctaacgaaaacacaacagaaggtaaaacgaccgggaaacttgtctatctgcctgaaacgattgaagacctttacagcttggcaggtaaaccataactgagatgcaaaactccaattaagaaaaacaagacacttttttacttaagctcactttaacaatgccactcatcagtgcataaaatcatatcttctttaatgaacataaattgatagatttgatatgttacaaagaggtcagacaaagtgaaaatctagctaaacatagtggataatggatttgtgtatgcagagaccaagtttggaaaacaagcaagcataaccgtcatggctgatggctcgcaggtggaagaattgaatgttttaagagagaatgatcatctttatatcttttgacgaaagattaatacaagttttaacatacttgcatggcactctgtaaaaggccttgcaaaagtttaccagtatcaaattttcgctatctatagtagtttcttaagttattatacaatgtaacatataacgatcataactggcaagaaaatattaagcttaccgcatctattctccgttgttgagcatgtctaagacagcgaaagcagctttctgaaaacgtaccctttcttcctctaagactctcttcctatcaatagcagactctttgcacttctctatatactccattatcccagaagagttttcgtcaatttcactacagattcagttgagtggaagccagtaacataagatatattttcttttcataaattgcacttttacaaacaattagcagtcaagagctacggactatctatgcttgcgaaaacaggtcatgaaagtaaacacattacacaaaactacagacatttttacaaacatggacggtattcgtacttgatcatcttaagcatgttctccatgaccccttggacttgctgtgacatatctgcatttaataaattttcagatcaaacaacttcgcaaatgaattcacggttttaacaaattgaaatctgaaagcgtacatttagataacccgatcttacaaaaaatcgtcaaaatgttcaagaatttaaacctaatgagttagattacaaagtttaagaatcgagttgcgcaagattctaagtaagagcgagaagaactgaccgtagacgagagatgagagctgagattcaggttctggatgagctttgatctgttgagcatcggactgagaatgagatggggaaggccgccatcgataaaaacaagagattttagtaagagagagagagaggggcttatcttttttcaatggatcaaaaagcaattggatagagaagaaaattggcgctacatatattcagcagatatatttaaatagtgtaatccttttctacgtaagaatttcccgcccctgcattaacggaagaggccttcccctcgaaacaaattgacactatgtttgtttggtaggagggagtgtgggaaaattacaactcatgtacataatcaaattaacaaacaattagttatcacacaacaaacaattagtaatcacacgattaacaatcaataaattataatagaagataaaaagagatttaaaaccagaaatgataaagcaataaaacaatcaaattaacacttttaatagctaaaattcgtcaacaatataattaagatttagaactatctcttaaaaaaaaacttttaataaaagaatatttagaatagaaatctcataagctattttattccaacaagttgttgttccattcattccaagaaagaaacccctttacaatgaactcaagggctttgtttatagaaaacccttgatactttacactttttccaatcccagtccatattatgtgaaatcactttcacacctaataaatattgtattctaggtggtctaatgtacttgacatcctaagttacattagaaatactcctatcattttgtaccataaatggaatgaactttgtctccattgtcattacttattgtattgtcggtatctccaaaatattacactaagtaattttttgggggtcaacccctagtatataagaattctttcaagtgttcttatagactatgttgggtgagttttatctctacgatttaatttttcttctatcctcctttttgttacccctggtgagaagcgtaggccttacgatttacctcgacccattttgaggtttggatttaccgcaatgagagagtgttagctcattgagtctctaaaatagctatttttgataaatggttgttgcaga

SEQ ID NO: 186843 - DNA, 6545 bp, Cannabis indica
aaacccagaatcctaaaaacccagctcccctctccaacctagaaaactctaactctctctcctgctcaatctctctcgtttaagtcacaactcgtgatctcatgcaacccagctctcctctacaacccagaaccccaacccaaatgccccactaaattcactcgctccacactttctcatgcaactcaaaggccaaaacaaacaacctgtaatcttgatagttcatagagcattgtctatcaacctcacaagtcaaacaaataacataaacattaatgaaacaaataaaaaacaactttcagaaaggatgccaaaaaaaaacttgcaaatatatgtaccatcacatgtaataaagtaaaatattatttctactattattgattattaattaccaataaaatctcttgctaacttgggcaaagttaactagaagctttcttaggagtcatatttatttgcattttcagtttttctatttcttaacaacattatattgatgcatgaaaatgagtaaacatacattgacagtgatggtgtacatcttagatacaacattattagtcttagtcatttatacaatagaagattattacaggggctgcattgctgggtaaggagctaagaagatgagactcgtaacaaaattagaaatctgcacatttgatccgcgcagagatccctaactccaaattcagctctcaataatagcttattcatctgccatggctaactccaatgcataatcatctctatcctgtaacatccatgtagtgccgaacataagcaaaagtgaaaatgtacgattccatgtcaaaaagaagtttggggatcaaaagtggattcagaacttacaattggtcctcgcgcgaaatatcttccaaactgaagccaatacacctgcatgtgccaaacatttcaagttctacaatgttaagaaacagtaaaaccgaaaatgcaaataaatatgactcctaagaaagcctccccctgctcaaataatatttactaggtttgaaagttctctgcaccaaattgaaagggcgaaactatttttgtgcaaaagaaaggcgcaaatatccttgacaacgataccttaaagaagctaagatagcacagaatccattctaagttcataaaactatatagcttaaagtttaatacctcatcttcatcttgtgtttcaacttcaagatcagaggatggaaagcccacgcaaagaagtgcatacccctgaattttcaaaaagcaaacataagttttaacaatttcatttattttctattcaatatgtaacatcaaaatttgcaaattatcatcaaccaatcttagttgaaacaatgtcgtatagggttacttctaattgaaggaatgtctcatagtgttactatactatctatctcatcaatttattacatttgaacaacagcttctttcgtatgcatcaattttgtagtccaattccaaccataatttattgccgtaaccttccaactttacagttgtaattctaagcaacatcaagaggtcttccttacctgtgaagtcatgctttgtgaatgacctctttgtgattaagtgtgtgtaagctagttttttcttttaatatattttatttgtttgtaacttgcttttattcacaatgtacttgtacaaaataatgtcaatatgagccaaatttataggcttgcctttgctttcagttcagaagatatgccgagggcttcaggctgtctaagttctccagactttactcgtacggcacagctagtgcagcaacctgccaaagaaacttatcagaaactataaagaatagcactaataatgccaggcagcagatattgatggtcatataggggctagttagccacttttgggattctaaagctccaaaagcacttttttactgttgttggatttccagctttgaaaaatttcttgaggaagagcttagaaactaaagcatgtaaaaagatctaggcaagcattttgaaactatctccctcttacacacacgcgcgcgcaatttaaggaaaaaagcaaaagaagaagcaatttttacgtatacaactaatcagaaatgatgacagaatttaatagccaaattgtcccccatactatgcaatagttcacaggtggaatcatggaaggtaacaataattttattgtttaaacaaactaaacccattgctacttgccttcaaacctctgaaacatagtcattgcaactcatgtaaactagggaaccctgttaaaaagtagaacattcaatccataccaagaactacacacaagaaagataactttcataaatacccaaaccaactcactatgctgctgactccatcaatttgtcctcccaacttgaaaaactatactaaaaaaattcaagcaccaaaatttgagcttgaaattgaattacccttttatactataccctacaatctttgtctacagtgttatgatgctaaactttaaagatacaaaattctattccatggaagtatccatattacatcaaaattctatcaataaaagtagagcgaaaattcatcaaaaagaaaaattgactgtagataaggaaacaataccgtgcctgcaagcaaagggaagagatatatcctgagcttcagctgtgtgcaatatatattggtcctgcaaattttaatcatgttacacctaaattgttcaaaattttgatgtaaatttaatgtcactgaatgattattttatcaattttctcatgaaccaaacagaattttaatcaaattaacctaaaagaaacactaaaatactgccacatttcatgattcgatacgttattagttttcttttaaaattataaatttttctcgagaagcaaacacaaaaatgtaatatttaaaaatcaatgggtgtacctcagggacggtgaactcgtgaacaacacctctctgtctgtcgtggacagtgaccttgtgagatggaattgttggggaaggaagtgaggcggtgagtccagctggcgtttggagttgggaggtggtggttttgcggcgttgttttgagggattgaaaggatgaaggagtgtggagatttgagggggggttagtgggggttttgggtagaggcaagtggtggctgaattgtagggaatggtaagctccattagaggcttcatcttcgttgttgttgttgtatatgtttaattgttacttagtattatctgctactattccagaagaggataacggggagagagggagtgggctatcattcactgcttcccattttatttgttacctactatatccacatgtagtgtagtgatgtaaacatggatatagaagtagaagaataccctccattttcataggttaactaaatttatcttcaaataaatttaaatttaatttaaatatatttagtattacatctaaattatctttacgcactcacataataagatataatttcaaatataatatatttgtattctttatagatagttgtgtaggttgtggaaaaattaagacaaaattttaattagaaaaaaataaaaactatcatgaagttgataggaataaaattaaaataattaaaaaaaaaaaaagggtaaaaattaaaaatatcaagttaaaagaggtatgtagtgtaatttcttcctgtaaatacaagcagggccaggcttaggcgggctaggcttgtacctaggactcacattttctggggctcaaaataaaaattaaaaagatttcattaggcttttatttaagttaaattaagtgtattgtacacaataaatatttatattttggttagttggattgtatgacacatttacacattgtgtgagtttgagtccataacactctttttcaatatatttttttggttgtatatttttgaaagtgaggatcccaaaatttaaatagctttaggcctatatattctcggggttggccttaaatacagatcgggctttctgacacggcatgaaattggcatgaccttagaaggcacgagcacgactaggcacaaaaaagtatgagcttgagcatgacacgacacgatgctacaaataattagcaggacacgccacgaaaaatatgtctgtaagcatgacacgatacgagaaaaatacaaaaggcacaacacctaagtacgaatagactagcccaaaaaatatgacacgcgacaagcccaaaaaatacaatacgacatattaaaaaactttataatttataataataataataatatatatatttatcaattataaataaattaaaataaaaataaaacttaaatataatattgaacattttaattatataattaaaactattaaaatataaaaatttaaatatttataagtaaatatttaaattcatgctaataatttttttatataattatttgtaaaatattattgaaaagttatataaatataattaaaattataaaatatattactttaataattgtaaaaaaaattactaatagaatgatccttcaaaagaatcaaaactatagcaataatgccaatattttctttcgaataagtgaacgaacataacactaacacatgcccaaagagtaaagacccataagaaccgacatcctttgatcctttattccacgtgtcaagtaacttctgcatgtacaacacgtgtcacgttacgtggcgtcaccccatctcttctaccaattatgatcattatccttattcaacattgtctcattttccatatctatatatacagtaatgcatatagagttcaataacacagatagaaaaagaggagaaattaaaggatgaagagtgcaaaggagaaggtcagcgacatggctagctctgccaaggagcatgtaaccacatacaaagccaaagcccaagaaaaggtactaaacatacacaacacacatatacacataatatcatatcatatagaaatttttaattaatttgattaattattattattaggtagagaaagcttcagcaagaacaaaggaggagaagaagatggcagaggagcgtagaaaagcaaaagaggctgaagccaagatggaattacatgaggccaaaggtagacatgcagctgagaatcagcaccaccaacaccacatcttacatcaagatccaccccttgttggcaccaccaccactaccaccactaccaatcccctccatggccatggccacggccacggccaccatgccaaccccatcactggcgttactaaccccacttatcccactggaactcacttgccagggcacaagcatttgtagaagctttcaattcataatatataaaatatatatgcaatatcttgtttttgtacttttcaattgggttgtctttattttctttttgtattctggctaagatttacccttttattatatgataagggcatctattttctctatatacttacttttttttccctatatatagtaagaactagtttcaataaatttaacaatcattcaacaagcccttgagaattcatgagaatgaatccaaaactatacgatattaagtggtcaagtccaaagaaaaataataatttcgtaaaatctaaaagcaagacacgaaaaacagaaactaattgaatatataggattttctattcaattgaggtgtcgacctggtagtatatatgcctttaaattaagtcaagtgcatatttgttactccattaataataatggtttttgttttggttaataataatggtttttgttttggttggaaacattatctaaaaatacggagaaatatacgcttaaagaaaaagaaaaatgggagaaatactaaaagggtgctaaaattattcttaagccttgttttgcagtgattctaaatactttcagtatctaataacaaaatagattaaattttttaaaaaaattatgaaaatattgtcattatcgctcgatcatgaacttcttgcacaaacaagacaaacaatggaatgaatcaagtcattatcgaactagtggttgtacgtaatatcacctgtttactcctccaccagaacagcctagtggctttatattttcgtacactaatgtgttctcaaacacaatctcttaataaagcttttgcttcaattacgtacataatatctacttgaactggatcaaacacatcataagtcattacaattcttttttctctcttcttttctttataaactatagctcactaactattcttctaattatctctcttaaaaactggtaccatgatataaagggttagctatatatagcctttgtttccaaaacaattactgtcataactgacattagttaaaatagttagaaactgttaaaagaaaacatcctcacttgatgaccaatcacagtaattattcaccttaattattgagattaagggctcatttggaacgtcgtattaagtcgtattgtattgtattgtattatattgaattagattatatatcatatttttatataatactatattaaactttaatttatactaaaatattatacacttaggtgtccataaaagttaataccacatat

SEQ ID NO: 186844 - DNA, 4215 bp, Cannabis indica
gtgaaaggagacagaagcaaatcagtgctgtttgaggtatgcattcttgcaaaaactttggaatcacttgaaacagaggaacgctggaaactgatcagttgtttgtgggtcgaaatactatcgtacgcggctaaccagtgtaggtggagtcaacatgctcagcaacttaggcgaggtggggagctcctcactcatgtttggcttcttatggcccatcttggcataacagagcagtttcaaatttccaagggtcatacaagggccaagttgattctgcactaggaggactgatttacaaatcttattgtacataaattaagttttcggataatagcaaaagtaatagtaatatgtccatttcctattgatggttttatgcttccctttttgctaatgtgaagagttattacaaatctaaaatatgtaacgaatattttaaaatgttctaagaaatttgtatgagaaattaagaacactttagaaagttttagggaaaatttagaatcacttgaactaagattagatagttctagagttatttagaaaataataaaacataattaattagttaataaattagaaaaattcaaaaatatttaaatacattctttgtagtttataaatagaagtgagatggtgtgagaaaaaaagttctaaaaatataatagtctcttagaattattgcgtccaagatattttaagtttgtattagtactttattaaaaaacagtaattttcttactctagtaaagggtgcccacaattttgttttcttcacagctatcgacatcattctttagtgataaattcactttcataatcatatttctaaattattaatggaacccaacatgaggggatgaatgtaagaatttcgagacaagtgtaagtttttggttgtggttaggactatgcctccacacagtaatgtgtagatattttctttttaaaaaagtaatgtgtgtgactgacataaataaaaaaaaaagtgtgactgacttcggtctgtgattcaatgtttttgcttcgttcttacccaatttcatagtagctagaaagataagagtgggacacgatggaatgggcggtcctgacggatgtagcagctggtgccaacctattaggggtttcgccgctggatgagaatgccatctccgccggttctccaaactttggtttggttctgctgacatattttctggaacaccaaaaggataatacagcaaccaagaagacaaacgcattctttgattttaaccagtttgatgcccacttgtgtttgatattttgtttgactttgttttggctttacgtaaagcatataacattgtgccgagtcctgttgtgtgtttctctcatcacagcaggcattttcatttttgtaaacttcatagcatttcaactcctggacaatgacatcaagtggattaggaaagagtcggcgctgttgcgtgccattgtggatgatgaagctgcaatttcttctttgagtgaccaagtgaagaataaagggcatcaactatgggatactggactagactacagttctagtacagcagaagctgttgggctaactggattcgaggtatcttgggtaaacgatgcgagtgaagttgttgtcaaggcagataagctgatcaaaacctttgaggatggaagaaataataaattaaagttcaacagaatatctttgtctttctcaacaatgatcaagtacttaacagatataaacgagctatttcttaataccacgcaggtcaaggatcgtataaacagcagttttacggtgaagaaagcacttaaattacacatctgtgagtcactggagaaatcatggtctgttataagaacgcttctggagaggcctattgaagaacacgagaacaagttggtcaactctatactacaaactggggcaggagggctgatatcttctgttttaaaggaagtagaagctgctatcaaaatgatcgatcgaaaaagtttagacagcattaaaggccaaacagttgagatgcaactgatgctactctgtcctttcttgcaacacatcaaaaatcttcgcctggagagccaaattgaaagggcatggttgatggatttatatgaaatcgtgagcaaagccagggctgctatcgacaccttttcaaaagtatcttcttcacttcgatgtaagtggcttagagctctatatattctcagattttggagagcaaggcgaaagtttaaggcagacatgaagtacattgatgccagcttctctgaccttttcgaaaggaaggaaaagtatggtttccagttcatcatacgagatccatcaaaatccaaacaccgttattttcatgagacagattttgaaattaactttccatcccttttacacaagtttcgctcttacctcaagacggaggggccacgactaggctgggtcttcgataagcttaggttgatatgtgaccagatggagaaaatgcttaatctcttgaataatgcaaactcaactgctgcaattcaaaatatcagagaagcttggtcgaagcaaatggaaaatattgtaaaggcagttatcaactctacaacaacatttgtgacatatgcaaagagcaacaatacattgttgattacacgagctaggcttcagctttcccaagaaatcgatcaaatcaagcatcatatgtgtgttctccaaagaagcataacagcatacagcggcgagttaagagaagattcaagcttagtaattggtctagaagaagatgtagaagcagttgtttcacaattgactgccagcattactgatactgagcatcaagattgcaacaccgttggcgttttttcaatagtagggatggagggcataggtaagacaaccttggccaaaaagatttatggtcatagaactgttgtggcccatttccctatacgtctgtggctttctatacctcaagattacgacgatcaaatttcatttctcgatgatgtaatggtacaggttatgggtcagcatggtcttattttagaagagaaactcgaacactacaagcagaagataggccatattctaatgaaggacatgttctttctctttctggacaatatctcaacaaataatgtttttgataaaataatggaaagaatgtcctttgggaaaacagaagggagcagaatgctaatcacgtcacaaaatgagaatgtggcttcagtagctgacccgaatcacagtagttacagcactctaaaacttcgtctacgaaccacagatgaaagtttaagcttgcttaaacagatggtgtacatttctccacaagaagaaacaattgcacaagatattgctagaagatgttgtgcagtaattttttgccagtaatactgtaatagtataataccattatacgatgaataccaattgatgactcagctagtataattcaattatttaaaatcatttgaagcaatatacaagatcaaattgagaagggatttaccagtgtgtcattagaagtggcaactagtatgaacttgccattgggggaaacttagcgaaagacacagcaaggaccttatcatcaataagagtcttcaagcaagcaccagtggcagagtcccaaatctcgcaggatccataccggagacaatgagcgaaccatcgggattaaagtgtacggaaataacgggcatagagtgagccataatggagtgaaggcacttaccagttttgacttcccatatcctaaacgtttcgtcgaaggagccagagacgatgaggttagactgagacttgaagttaacgcagaagactaggtcggagtggccacgaaggatcttgacgcattcccctttggaggagcgagcgtcccagatgcgaagagtgcggtcgacggaagagacctaatgggagtcggaggaccaggaaaggtcggagagggtgccgtcgtttgagaatttgacacatgagatggagcgttcctgggctccaagcgtcttcaggtaccggtaaggcgtgtaaggcgccgcctccatttttgtgcacgaataagaaataaacaaagaattaagggacttaatatagatacgctaaaacgaaaacaagggagaaaaaatctcgtcaaaaaagatcgtgcacgagtttgattcatgatcttgaatgtcttcattttaaggaggtgtgaatgtgatactgaaataaaatagagactgaaaattttgaaactgcta

SEQ ID NO: 186845 - DNA, 1759 bp, Cannabis indica
attttgtagaatgtgaaaggttactttgaataattggctgagagaacccaagtattgcaatccccacattctgacttctttgttcaactcaaagttgcctccctccataatatatataaataaaaacatattatatttataacaaggaccgaagacgttgagaaagactattccttggttgatgatatgcttaagcaaaaggggacaaaaaacaatattgctttgggtaatggggtatctcaacttttgacataattcatcttattcttatcttacatttctcaaaaagaaatgaaaattttaagtattaagaattagaaaaagtatagaagagggaagcagacaggtcaattgcttcatgtacctcatggcaatgatgcaaggaatagatttatgaataaaaatccaaattagtggttgaagaggggacctattattatagaggtaaacagtgttagtgtgtatatttgtatataaaatagcaaaacattatcattaatccatgggccatggcagcttaaacaaggtcaacaaaaaattacaacttacaactttgaagataaagactctttctatttggcctataaattgaagcactttattgcattagttgcctttaatttctttcacgggaaaataagataaattacataaaagaaaaaatgtacttggaaaaataaaataagcttattcaattctgtcatcttttttgggacaaataattctgtcatatgggtttcccttccagccaacggctaatgaagtccaaagcctcgtggggcttgtattcaggaacagtatgccctgcaccctgtccccatcaaataaatttctattaatttcaatccttagttagaagggtatttgagtttttatcatatgaattcagaacttgatgaaaaaataaaacttgtgtaaagcattttaagggataaatacaaaccttgatggtgagataggtgaggttgtggtcatacccttgtacgtatctgcaaccaaccaataagaacattcattttaaagtagcacatagtgttgtccatattgtcttactatatatataaatgcatatatgtcaattttatgattgagtgaaggtgagtaatagtataaaaggagtaataagtaagtggctagaggagattgctgaatatgaaaagagaaagaaacggaaaaaaaagttaccctgcaacttgagaattggaaatccaaggcctccactcgtctataatcttatatccaattgatcttgtccatgactggcttccagtaaatggcacacacatatcatggtctccactgccatcgaaaagcacaatagttaaaaaaaaaaaaaaaaacactaataatattttcaatttggataaaaaaatctcttcatatatatacatggatagactacaaaaggaagcacttatataagcacctgaaaatgagggcttggtaaccttgcattgtgaggtttttgtggtaaggaatcatacttccagaatcatgattataacttattctgcttgtacataaatcccaaggaccactcacactttcctaataacattggcaaaattatcaaaaagttaaaacttcaaacttacagtatgtaaaaccagttacttaaaagtagcagataagtgaagctcttactggtgctgcatgtatagctttccttactgctttgttattcaaccatgatgttgcaacttcatcatcctacagttcgaaaaattgtaataaaaatatatattaatgtatacatttt

SEQ ID NO: 186846 - DNA, 3234 bp, Cannabis indica
gtaaaccatatttggatagattccagcaaaagagagaaggaaacctggagtggaagagcagtctcatcatatattgataagtagcttccttgacggtcctgaagttcatgaagattgcgagacaaggcacccacaacagcccctaacccctgccaattaataatatataaggtaagatcattgacacagaataatttaggatgctatatgagttgttttctttttttatttttttttttgttttttttattatttttttttttttgataaagatggtgctatatgagttacctcttaaagtagcacttataaaacataagaatgaaaaaacaatactcaatatagaaggatattagaaaatgatgaaagtaggggcaaaaaggaggaaaaaaagagcaagtcagtagataagttgttaccacatgcttaaacacttgctgcagttgtgagtatggatgattggcacgagttctgacataataatcagtgaatctgtagccaaagcgtttgtcgaacttcttcaatatcttacggagaccaatggcatttatctcgacaaaaaatagaagctttaacaggtcttgccctacttctctataagattctcttagttcagatatttgagatatctcaggctgctcaagaagagcattatgcctttctccaagcttggctatcctgcttgccaggcgaccttgttcttccagaagaaataggacaatcttctcaatctaaaatagtagaagttgacagaagttagaatgaatcaaattgtgcaagtgttcggaatcctatatatgaaggattacatgcatgttaattgctgtcaatctataaacattatgtgtgctataagtgcttacatatttaagcagccagttcccgattctgtatatgaaacagatgcaatctcataaattgtatatgtaatttaaacaccaccatgcaaaacccaatatatggatgcacattaattgtgcctatttctgcaaatatactttattccttgtgtttctaatcatgtcttgataaaaaaaacaaaccatggccttatacacacctgattatccagcattcttgaaaaatccttgagaacatgtcgacgatcttgtgcaccaatttcaatttggtgagcatattgttttactcgtttcttcattaacttatagttaatgtaatatctacacacaagggtataaacatatgttgtatcaatactcaatggataccgtccagagatttgcactgtaattcacagataaggatatccagaaacatattctaccaacagaacttggttatgcctattattctataaaaacagaaaatttccaacatttgttagactgaatctttttcatgtatactactaaatgttagtgtatctaacacttaacaatggatccaacttttcttattgatgtattagacgctgattgttgtcacttgtcaatgaagtgcttctctgtttaaaaaagaacactttagcaatggatattaaatgagcaataaattataaccataccgttgccattcatcattttgtctttgcttcaacttcttcccgaatgcaaccatctttcactatatgcagcagaacaaaagcttaataagagcccgaagataagtgaaagatatcgcaaaaacacaaacaaaagaggaggattttctatatgtgaaactaaacaaatccaattagtttggatttacataagaaaaatgccaagaaaaaactgaaatccaagagagatgcagattggaaactaaaagcatatcatgcatgatagaacaacgttgtcttgcatgccaaaagagagaaaatgactatactaacaataatgattaaacaaacaaataaaaaaacattagtaagttattcaaaaaaaaaacattagaaagactgcccatacttgctgtaatttggtattgtatttgcacacaatctcacatatcaaactcagatgggaataccattgttggaatagaaacataaatgaatttttagtaaataaaagccaaacagattttgaaatccaaattttatatcacgctgagaaatgcagctcacacttatgccagcttaatttgataattagtatcaagttaattagtacaaaccttaaacactcaacccgaaaagagaaaaagtatgtagcttactttgatgattaatatcagattttttttttttttgctgaatgattaatatcagattagtacaaaaccaaaacactcaacccacaaagagaaaaagtacatttactccatggggaaagataataacaggtgacaagtaaattccacgagaacaaatttaacatcacttttgtaaaaccgtacagaatcattatcttttcctctttagacttttgataaattatttatctgatttcaatacgtatcagcttctacaatcttacttcctaggcacacttttagacttaaaaactacaggataattctaggaaaaagcaatgaccgtacaaattagattcccaatcaaatcaacataacacaaaaccactcaatttgactaagtccacccaaacgagccatcactcgaattcacagggttcatcacaaattgaactcgtcatgttctcatccaaaagaaaataataacaccttaattttgataaaagataagcacaataactaatacgaacttcacaagaaaattcggcagatttgaattcaaccaagaaaaacgttacagattctcaattcaatagtactctgtttgtttgtttgccgagaaaaacaagaaactgataaatcactcactcagccacttcttattatcaatctagaaagtaaaatccagggagtttcgcattcaaataagctcatccatccattttcttccagaaattcttggcatccaaacaaagcacgagttcaaaaatacataaacatgcacacacacacatacacacacatgataataccaaacaaaaaaaaaagtacgcattaccggagtgaattctggacgaggtctgtgccagaagagatttagatgaccatcaacgaacgaagaccccgaaagagagaaacgagtgaagagaaaagagaaacgacaataaaaacgttcgaagagcgaaacgttcagaaaagaaggagacagaaatcagggatgggatcgagctggctaggaatggcgatgatgtttggctgactggctggctggcacacaaagcaaaacagatctttcttttcaacccaaaaaaaaaaaaa

SEQ ID NO: 186847 - DNA, 2154 bp, Cannabis indica
agatataacatacatagaatataaaaaaaaaaaattagattaaaaaaatcttctagatgccgaaataaattaagggtgcatcatgagttactattttcgtttttttttttttttttgttaagaatgagtacattctttttaaagagggtaatcactctatctttttaaataatgtgtaagtttttaacattattaaaattgaaagatgctactattggacatgatcttaagaaaagaagacacttagccttgatacaattatgggggttttgatctttaaacaaatcaccccacaacagagggaagttcatgtatattgttttattataaaaataaataaataaataaataaaaactatcaactaatgcttctttattgtttctgtatacttttttaatttttctttttactcgacaaactttttatcaaaatgaaaaaaatgaaaaaacaggacaaacttagcaaaaataaagaaggatggatatgttttagtggagatctccaatgtttacattcgatcttatcccaattcagtccctcatagattagccagttagtattatcaggtcagaaattccagtatgcctcagacacaaggtaagcaatctccacatgacacgtcagagacacgtggatactacccatctcatctccatataaccgagaacagtccagaataaacgtaaataaatataatatttcattctagatttcacaaatcttctatttctcctcaatatatgatactctttaataatatataagagatttcgttcgttagttcaaaaaataaaaagtttgttttaatccatttaaaaaatatatatataaaaaaaaactcttttggttatctcaaaccgtctttgcatgtaacacaacacgtagtctaaaccatgcaacgtgtcacattacaatgcaaacttcaacacgtggcaagctaaggattcgcctaaagctttacgtgtctctgttcttgatcggtcggccattacatatatatatagacacaattacaaaccgaagaaagtagcaacaatcacgaaaacgaaatcaaaatcgatacatattagtattattattataagcttttacacatattgagaattatattttactacaaaggttctttctttctaatttagaagaatatttacgacaatggcatcccgatcgacaaatcagcagaaggttgaggaagcagaggcagcggtgaagattgcagctgccgatctagaaggaattcaaagagaacaaaaacgacaagaagaagaagcggaacgacgtcgtatgggtaccggtaataataggatgacggaaacgacaactgatattcgtctacgacaacaagatcaaccccaaaagcctggtgttattggctctgtttttagagccgttcaggacacttacgagcacgccaaagaagcagtcgtcggcaaaggcagtggtacagagacgtccagggaaggtgaagattacgctaagaaagataagatgggagagtatgctgataattccgccactcagagggcgaaagagaataaggattctgcggttgagaagaccaaacaggccaaggataatactctggccaaggctgccgagactaaggatgctgcggcggagacggcgaaacatgccaaagatgctactttgggcaaggctgcggagactaaggattacacggcgcagagagtgaaagaaactaaggatgctgcaactgaaaaggcgaaacaagccaaggatactactttggagaaggctgcggagactaaggattacacggcgcagagagccaaggagattaaagatgctgcggcggagaaagcgaaacaggggaaggatgcgacattggggaaggcaggggagatgaaggatgctgcggctgagaaggccaaacaagccaaggatacgacattggagaaggcaggggagtacaaggattatgcggctgatagggctgttgcggcgaaagacactacggtggagaaggctaaggaggctaaggacttggctgcacagaaggcggcggatgctagagattatgcagcggagaaggctggtcaagggaaagagaagcttggtgagtataaggattatgcagttgagaagggtgtggagactaaggacttggctgctcagaaggcggctgatgc

SEQ ID NO: 186848 - DNA, 1719 bp, Cannabis indica
cgttccccatttagacgagaaattcctgcgggacaccatccccataaggaaaatgtgcatccctatacgtgcgagccacaaaaactagtgatgatatataaaaatctgactagatattttttgcaattttagaaaaattaaggtaattttgtttaattttagtaaagagagggaagaaaagggtaaaagagttttattattgtcgtttttagttatgtgattactcgcttctccacgtctacggatagaccactctcgccacgtcaccacatttctctcttcctcacaagcttccttccccaacacccgactcttctttaatcactttctaccatttcatgaattttcgtgacaatccaaccaaattctcccttcgattttctttttctctttcccatttatggcagctaagtttacccaccacagctttctatcgtcaaggtttgatattttctcctgcttttattattatttttttttcctttgttcgcaactgtattattcaattttgttgcttgcgtttgtgttgttgaagtactttcacaatctttatggtgtgaaaatttcctgtttggttgctgagaaaagaagaataagtattggaatctatagttattaactgttatagcaattttttatatagctcaatgtagcgtgaacataacttagttgaagcgttgtgaaaatggtaaaggtattttgggtttgagtgaacataacataacatgtgataatttagaattttggtttggctaagtcatgagatatagcttttgggatgctttggtatgcaggatagctctcaatcttggctgttgtagttgtagatgtttttttttgggttatgcataattgtgctttgtatttcagctctacaaatcgatggcttccaccaaagccaactaaaatgcattattcctgcaaaaaagtttctgacttggatcacctattgagttgctggggcaattcaaggaagagatgtcttataagatttgctttattagagaacaacaatcatagtcttaattttggacaagtgggattcaggaagcagtatttgacatttcgaaggtcaagaagaatggttcctcttgcttctgctgatgatggtgttactgtcaatggaactccccaagcaagcaccaggagtgatgttgaggaaatgagggttaaactgaatcggtcactgcagggcggtagtgacgagagcgacagtcttgttcaatttttacatgacacggcaagggttttcgagctagcaattaaagagcaaagttcattttcaaaactgtcctggttttcaactgcttggcttggtgttgacagaaatgcgtgggtgaaatcattatcttatcaggtattatcataaacttggggaagtttatttatcacacatgcaatctgtttgctatcttatgctcttaagtgggttaacttacagagttatacttcacatggtgtttcctatatattaaactggactttgataccatgattgttgtttcattaattattttacaaaattcatctatcacttgcaacatacagataattatgcatgaagaagaccaactttacttgcattattttttgaccaacttacttgctgtactaacctaacagtactgaggcattctgaaggtttgtgattttctcaggcttgtacatactctttactgcaagctgctgttgagattgcttctcgaggtgatggcaggg

SEQ ID NO: 186849 - DNA, 3605 bp, Cannabis indica
catcggctgctgaccaaatacaacagtagttgtccttattttcacttgtcaaaggacccatgaccttgaggctgcaaaatttcaaagtaaaaacaataaattaatattgaataaatcaatttaaactatacagcaaatattgaataaatcaattgatagaaatagtaatggtataaactattccataaatattataactaatataaattatctcatatatacaatagcagataattctatcatcatcataacatatttgtatagtaaaagtaagtgatttaactagtgtgtgtaaaaaggttgactcattaatattaacaaatggcatatttgtataaagttgacatacgaaggtataagccaacatagttggtcttggtcacttagtgataaaataagtaataaatgaagtaccttgtgttgagatttggtcatctttatcgaaactcaaggcccaaaagaaatatccacgaagcccaagggcctgagcaaacccaatcttggttgttatcgtaagagcattatcaaacgtaatccacgttgagtttacaacactgtacaccgtgacagtgtccacgtcatacaccacagtggcaccttcctgttcgatcatctcagtcaccaatttaaaattcaacgcaccatctactgggcctggcccgacagcaattgtgcccattttgctcaaatttgggccttcaagcttccaggtccgcccataaagtggtaagcccataaccatcttttcagtcggcataccggcccgaatccacgaattaagcccataaattgtatttatatcactagttggatcaaacaaagcggaattaggcccagttatattactccaagcaccatggtaatcataacacatgacattgatccagtccaaactttctctcatcgccggcacggggaaagaatggttgacttcagacaagaaaaactgagctgaaaagtacaccgccgccgtgagaagcaaaggaggcctagaagtgagttgggcctctttagttacggcccatctccattctttaagtaaaaggccaaagtccatcatttcttttgggctttctggggactcccaatccaggtccactccatcaaacccaaacttacgtgcaacttcaatagaagattgtatgaaaactttacgtgaagaagcttgagaagccattagggcaaagtccgtactagctccggctccgccgacggagaacagagacttcgccggaggattagcatatcggagtgttgaggtgaaattggagagagaaacagctgtggaattcgatatttggaatttgaaagtgacgtcgtttggagcgagaaatgcatagaaaatatgtgtgaacaaagatgtgtttatggctgaaggtggaaagtcgtttggcgatggccaatagccgcctttgatggccatctgaggcgatcgatcgccaccgtggtatgatccgacggctgtaattgtcaacgaattagccacaacaaaaatgagaagagtagaaataaagttgaggaggcctgccattattattattattattattattatattttaccataaaaagggttgtgcatagttctaaagctatagcctttgatgtaagattatatatatagaaaaacatagaagaattcaagatatataatatatattttatgtcaaagctttggatttttcttggtgtattttctttcttgtgtttttaataaatggactgatcttgtataaatcgatcgtagctatatagttcgattaggtgtgtcattattaattaatttaaattatgattggttttatgttaaactgtttctaaacatcttaattatgttgataaaaaaatttagaaattatcttatatattattttttttaaacttatgctttgggtttctaaagtaatattgcgatttaggttgctccgctagttacaataaatttttttagtaaaaatcaaaataaaaaaaaaatagtttgaagtgtaaaattgaaaaaaccgaaaaaaaaattcacaaattattttgactagattttgagttaaaagattaatttataactatatagctttgagttttagcaatgcaagtagttgatttttttcttatttaaatttgtttttttctttttgacaattaatatatgttggagtaaagccgcccgttatgactcaatcagagtattacttcttattattattctagaacaaatgtgtaaaaataataatggatcgactgttggatgtgattggagattaagtttctagataattaggtaatttaattattattttatactatgctaactatattgataagttttttttttcctcaagccactatgtattgtattgataagttttggttcaacgttaatatatattagtgatagaagaaatttttaaagatactgtacgcaagtttaaattcatcataataattattttatttttttaaatttttttttttgcatggaaaacatttattataaaaatttaaatgttttatttataaaagttataattttaagctcacatagctagtcaagcgtaatacttcatggtcgtacgcacttaaattaaacataattattacttgtgtgccaaaatatttcaaactaattgtatttatttatcatgaatccaacttattaaaattgactcgttacataatatataagttcctaacaaataaaattgatgtagtgtgcacatatatcattaatcttaaaaacaaaaaatgttacaaattttatttttttttgagaaacgaattatttgaccaaaacttgtcaaataataatgaataataatcatatttagggtgcttaatttcaaatataataaaaaaaaaatcatatttagggtgatgcatgaatcacgaggagactatatataaagcatatataattaattaactcaacaaaattggaggttacctgcacgtaatttgtttatatatttaatttatttcttcggacattgcggaaagtttaatatatttctccctcaaatattatgtataaaattatttagggacaaatatttccttaacataatgaaagtacgtacacttacaattgaagtgtttaaccttttagtgctgaacattaaatggttgtccttcgctggtgtttgcttgtgatttgtgaacaatataatatggttgggccaaaacaacataatatttccacacacatgaactcattattaatggggtttctattaatttgtgatattaatacttctttttaatgtgtggatattgtgattacattgtactattagttttaacttcttctcgacatttggagatttcttgtataagttaaaagagaaatgctaaaggacaccagtagtgcttagtactctcctatgtgtcaatatcgctattggtccaactaagtatcgggtcccatataatttaatataataactttcagagagtatcgctagcctatcgtaacgcgacatgtcgagaaggttctagacactaccggtgcctaatagcaacgctcaaattaaaactttaataattatgatactgaaacaaatgaatacctgtattatcactataagtatacaattaattagccacgtcgagtac

SEQ ID NO: 186850 - DNA, 2619 bp, Cannabis indica
aataatgtttaaatatttttttatactgattatttttctacttactataaataattattttgggtactttaaactattaaaaatttataagcaattctaaataagtaggacatatataataataaaaaaaattagaataaaaaattctcaaataacaaataaaaagatctattgaaatacccctttcatgcattgtactaaagatttttccaaaaatatatatgggatgatttatattactgaaaaaaatctaaaatttattagtataccttttttttttatctgattcaatatttaagaaaatattttggttaaaatttcttatataaatgtataatacttatttaagattaacaataaattcataaaatattatgaatacttatagtacagaaaataaagttttaaaaattacttactacacatataataaaaatataattatgcctgtaattaacacaatactttaaccttctattttacactacaaaatatttagaatttttaaaaatttcaagataatcttaaataacaaataagggtatgagaaaggtatttatgggtcaaaattaaataggggaagaaaaaaaaatgcccattgtacaatgtcacattatttccctagaggaaaaaaataatttggataaagaaaaagtggaatctaacaatgatatgggttcattaagttttgcagataattaaattatatgtattatgagacactcaatgagtatctcgagacatataactgacgaagcatacattaaaacacatggcccactttctttatgtatatataatattttggatttggattttggtcatttcatttaataatacgaaaaaaaggaagcttaaaccctagaaaaatattattactcatcaccaaaattctgaccaaattaactggtgaaaaataaatccattaaaaccaatttcaaccaacctaaaaacaaaaaccttagaactcataccataaatgtcctgatactgataataattatttcatttatttcattatataaatcttgacctaccaaatatatattttttttttaaaaaaaaaaaagaaaaaaagaaaaagaagggaaacgtaccatgaattagagagaataggcttccgtttgggaaataatcgtatacgagcaagcgttcctccctagcctggaaataagccctaagtgggaccaagttaggatgcctcagcctaccaataacttccatctgtcttctgaactcatctagtctagggtatttggcatcttttagtcttttcacagtaactataaacccagattccataacagctttatacgtacttccgatactacccctacccaaagtctcagccgaagcctttagtaaatcttctaagctgtaattcatttgctgatcccctgcgccgcagaacaccagactccctagaccctcaccttcccacgaaaacccttgttttccaccattgttgttacctctccgaccaccgccattgttaccgccctcgtcctctcctcctccttctactgctgctgctgctgctgctacttctactcctttgttcttcgcctcgtcggaagaatctttccggcgatttcgactccggcaaaccatccacagaagaagcacacagataaggagaatcgcggcgccgccggcggttccggcgataatcttgattagctttgccgtttcgaagaagactttctcgagctgggaatcaatggcgaaaatggacttatggaaggactgagactaacctcgttcccgcatggattctgaatctgaacaccgcagagatcgacattgccggagaatgacgaggagttgaatcgtacaagtgacgaagtaaccggaatagctccagagagtttgttattcgaaacattgaagaatctgagactggtctggttgaaaggagggatctcacctgtcaataaattattccgcaaatcgagaaagtaaagtcgtcgaagattgagcagggtcgccggtattttaccggagatttgattgtcagcgagtacaacgacctttaacctgtgaagtccagaaatagatgccggaaaatcaccggagaaattattctggttaagaaaaagggatttgagattagcgagaccagagagatcggggatttgaccattaatggagtttcctttgaagctaagaacacgaagttgatccaaacggtctaagatcttctggtccaaaaccccagtcaagttgagatattccagaacaagcttggagactcttccattcatgcattcctttacccctttccattgacaaacttgctcagtactccctctccatgggagtgaatctaaaggatcaatcgttgattttaaacgcataagcgtttctccatcgtccgatcgaaccagtacaaaacaaaccaataacaacaacaaaaacccaaacaaactcgactgatgtaaaaccaccattacgacttctttttctctcaaatcaaaaccaagtataataacaaaaaacccttcgaatattctcaacaaaaatcaatctatatctgtttccatgaatggaaaaaataaccaaaataagcaaaaatcataatgtttctgtttctgctctcttcttaattttttttttttt

SEQ ID NO: 186851 - DNA, 4453 bp, Cannabis indica
ctgaggtcctagtggaacagtcagacttctgcttctcatgctcagagctaagtgagttcttgcatggagatacaacagattgtggggagtccatcacactagatatgaatcctgagaaaagaaagatgaaaattgtctcatatagaatccaacaaaaagaaaaaaaactaaaccatgaagtttcttaaggactttttagaccacaaactaacccccaattgtggaaagaaacaatgcttaaaacacaaggacaaaaacaagcataatctgagaataaaactaaattcagcagccaaatttcccaggaagccttttcccccaaaacccagaaagtaaatatctaaaaatggcactaataagctgagcatcagaagtatactcttttgagtaaaatcattagctagctagttctcttctaacataaacagcttcgaaaaaagaagaaaaaaagacaaatgaatttacataccaacagaaatcaagtgaaaccaacaacacagagccaaggccagaaattcaaaagtatgataagataagcatacacgaactcaaaagctaaaaccccaaaaacaaaattgagactttccgtgaactctaccataaatatacccagcgacaaaatcataagcaagacccttttaagaaaagccaaaatatgaacagattccaataaagctgactattgaaacacagaaacactatgaccggaatccaaggaagtaaaacagggaatcccaagaagaaaaaaaggacacaatgacccaggagcatgtcacaaaattctaaaaacaaaatccactaaaattcccacacctttgaacaatccaagaccaattaacaaaaacaaaatattaatatctacccagaatagaaaaaccctgagatagataaagataattatctttaccctttgggctttctctctcatatacctcaaagtcaaagcgattatgggtgaaatcagtggctctataacaagatctgtccacgacccagttcgtgaatcgaggtggtggttcttcttgctggctataaccaagcagtggagctttcttttcttggtaacagtaaaatatatatatgtgtgtctgcggatatgtgagaaaatatatgtatatgaaaacaaggaattaaaaatagtaagaaagaataaactggaaaattcagatagcgtgtgttgaaacttgtcggaaagacttatgaagtgtactagagcagtatacaagggaagcgaaaggagcctatggtatggtatgtgttgtgtattatatgatatgaatgaaataaagatttttttttttaagatttattaattgatttgatgatggagacggaaagagcaaaagggcaaagatgagaagagagatgggttttgcaggtacacatatacacaccgtcccacgcgttgattgagtttatgtgagaccaatgagaagaggtttgagtgcgttttgtataggtggggacacacatctgactttttcatacagttccagttccatttccactcttgtctgcattttatttattatgtcactgcttactttcttttgcatttttcctaaatcccaatcattatttttgccctatttaaactaacccttattttaagttttctactctaatgtaaatagtcattttcttctaaataaaaaaattaaagtggatttcaattggattaagaacctgtcttaccattttgcttttttccttttgaaaattttattgattaattaacaaattttatttacttaaaacataagtatattgattagcgatattttataaaaaaaattattacattagacttgatatttaattgtactaatagtgatatgatatgttagaggatgctagtaatttctaaatagcattgttattggacattttaaggtcccaacattaggaatagttagcgattttctatattatttattaaattaaaatgtgtgagactcgatgctgaactgtatcaataatagtattcacctcttgtggtgcttagcaccttaaggtgctatttaacatttttcatttctaaggtcatctctaacccaaccataaaatgttatctataatgtgattttttcacaaaatgctccaaccgaactacaaaacttatcctacttttataggagtctacagtgccgcactaataatagtggacactgtaaactaccatattttttttttaactttttaataattaaatagtatcttttgttagaattagaaaaaaaaaattgtgctaaaataattaaataatataatagtgaggaaatattttttagtataacttatactgttgtagttggaattgaaagaaaatttagtgctaaaatagtactctattggtgttgaattagtaccaaatttaggtttcactgttggaattgccctaaggtcatctccaaccaaacgacaaaatgttatataaaatgtgactttttctaccaccgaactccaaaacttatccttattttatgagagtctacagtgtcccactaataatagtgggcactgtagaccacaacatttctgtcttttttttaactttttaataattaaataacattttttgggttagaattaaaattaaaaaaaaatagtgctagtaaaataaaataatataataataaaaaatattttttagtgtaatttatagtgttgtggttggaattgaaaaaaaaaaattattgctaaaatagtactcttttggtgttgaattaacacccaatttaagtttcatcatttgagttgccctaaatggtacatttttgcatttctccttaaagtatacatctagtaatttttttatgaaaagtgtttatcgagattttttaaaattaattaaataagagcgttaggaaagtaaataatgattaataaataagatggaagatttttacgtattttgggcgtcaattatccccagtccacgagtcggtgtattgaccttttaggctttaaaatatattataaatgagttttataaccaagaaccctaacccttgttctgaggtggttttctaggtttctcttggaaaaccagattgtttaaagtgaaaccagcagagcctcggctaaaaatctccaccccccccccctgcatgaaggaataatgtggtttgtataggcttgatttggggtccggacatatcgtgacccattcgagttttatcttgtaaacgcaagccttctattggggtaaaatacatatacacgtgactatgaggcccacttaaaatatttagctcgtagagtgatggttttgtactggcaaaaagatcgtttagtgcagggcacgtgttgcacagagatcacgtctggtagacaaaggtgtcagtggagtcatcgaacaaaaggggtgtatggtggtccacgcactaccattgtctgacctaggggacagtatcgaatcttgtgttagagaggtagacacattgttctaaggtaaacatccagcattcaccttgcggtagacatccgatacttatctttcagttgacatttggtactcaccttgcagtagacattaggctcccgatttgtggtaggctttctggtgtcatcctttgcgtcctacctctagatatgcccttaggaggcctgcaatccttccgtgtctcaaaagactaggcaccttctgcgctctggaaaaatgttaagttttggaggagatgcctttaacctttgctaagcttggatccattccaagtctggtttggacttccataaacgggaaggcttaggcccatttttagaaggtgattatctttcagttataccacgtatcaactttctaattaatatggataacatttaccgccaagcttcggggactcaatagtggcggaagcttgcagccttctttccggtagaccttagcgttttcaagcacgtggacacttctgaaatggaagcatttttatatttacagcactcgatagttgaagagtcgaaagttggtttcgagaacaactgacatcatgcacgtgtctccactccttgggtttatgaacgtcactcactctaaagaaggaatgctttacacaaaaggatggaatgatgactattcattgtcagcgcaaacctcgagcaggccttaatgatgtcaaaaatgcctcgatttccataaaggcatttaatgttgtcgcctcaattgtgtatccattggattgcaatttgtgatttttcgagagagatttcaacccttgatctcaaagcacatggatctccatcttcacttatatatagatgggaggaaaccattttcactacttttacattttcaaacctttgagctctcatcatcaaactttgagaaaaagctttctttttaccaaagaagaaaatctataaagaaaaatttagaaagcccaagtttccttgtttggtgaatgagcgagacctttgacgttctcatccacctgttactacaaattcgagcgag

SEQ ID NO: 186852 - DNA, 4689 bp, Cannabis indica
aatttccctttggttattatttttacttgaataaaacaataaaaaaaataaaataaaagggtaagttaaccgccagaagtgaagatcagagagaaccattaaaacaaagaaaagctttattcaattatgtgatacatacatacatacatacactaatgcccttttcttcttcctttggcttttgagcctcatttattatccccatcgccatcgcttcataagccttcactctcttcattcaggtatctctttttcaatctagggttttatttctgattaatttatcccccaatttatctatatcttcattgtttactcttttagatttttagttttcttataatttgagtatacaatcaaacactatttctgaatttctatcgcataaggtcttacgaacaatttgcttattattttcttattagaggtggtggtgtggattatgcttatgagtgttttattatgtgtttgtttacttggacaaacgtatggtgctgagaactctacaattttttatgtttttgttttcatagtcgattctcataatttaattgatgcttgtttagttttttagttttgggttgctcttaattttcaaaaatattgtactacatttatttattcttttaccttctattattgttgcccggatgtaaagaatggcatttcaagtagggtagaatttaaaacctatgctaaatctgtgtttgagaatttgctggttcctggatctattgattttagtatcgtgtgtgtgttcttagttgaagaattagttaattggcttatctgttttttcatattgaagcaatttacacctgatgtggtgtggaatattatgcttatgagtgtttatgtgtttgtttagttggaccaatgattgaagctgagaactctagaattgttctgtgtttgatcttatagtccattctcataacttaatagatgcttgtttatttttgggttgctcttgattttcaagatatggatttttttttccattgtaattttgttgcccgggtataaagaatggcatttgaagttgaaaaccaaattgtaaagttgaagagctaattctatattgaagaatttgtgggttcgtggatctattggttttagtagagtgtgtgtgttcttagttgaagaattatttgataggcttatctgtttttgatgttgaagcaatttacagctgattcctcgatggcggacctcaaagagcggttgcttcctccgaaacctgcatctgctatgaacttgagggaatcttcatatagaccgtcgccctctggaaggcaaccttttcaaggagtcgatgttgtaggactgaagaagcgtggccagggcatcaggtcttggattcgggttgactcatctggtaattctcaggtaattgaggttgacaaatttaccatgatgcgtcgctgtgacttacctgctcgcgatctgcgcctgcttgatcctctctttgtttatccttcaaccatccttggcagagagagagctattgttgttaatttggaacaaattcggtgtatcattacagcagatgaggttttaattctgaattccctggatagctgtgtattgcaatatgtagtggaactacaacggcgattgactccatctggggtaccggaagtctggcaatcagacaattctgatttgagtcggaggaggggaagtagaaattttgacaatgttttcggaaatacatctcctgactatttgccctttgagtttagggctttagaagttgctttagaggctgcttgcacatttcttgattctcaagtgagtaaagtactaacgctcaagttttaccgttatcttcatctatcccacaatctcacacatagagaaacagaataacattgtttatattatgaattaagtagcattagactttgacttatataaaagcagtattttgcacacatgttaaagtagtatgggtcagagtacaattacaaaagtttctaaaactgcactacaaaaaatggttttgcaaagtgaactatttttacatgtaaaatattgtgtttagcatttcatgtgaaatgccactttcacatgtaatgaatttttttacatgtacaattacagaatgatctttgccttagtcttttttacccctttctggtatgttgttgtgtttttcttttcctccccctgtgatcttaaattgactagttttcccttttctaaaggcagcagagttagaaatcgaagcatacccgttgttggatgaactgacatcgaagatcagtacattaaacttggagcgtgttcgtcgcctaaaaagcagacttgttgccttgactcggagagtgcagaaggtctacagaaatgcatattattgatttattttcctttattatctcagaatagcagaaaaaggtatccaacactttttccttttatttgtatgtttaggttagggatgagatagagcaactcatggatgatgatggggatatggctgagatgtatcttaccgagaagaaaagtaggatggaaacgtcattctatggcgatcagtctttaattggatacagatctaatgattgtgcatctatttctgctcctgtatctcctgtctcttcaccccctgagtctagaaggctcgagaagaccttgagcatcgcaaggagtcgacatgagagtatgaggagttcagacagcaatacagaaagtatagaagagcttgagatgttgctggaagcgtactttgttgttatagacagcactctaaacaagctgacatcggtattcacaaacgtttatcttcatttaattgctgttcatcaatattcgaatacatcgacatctaaacagtgtttaatcaatttttattcttctatgtttcagctgaaggaatacatcgacgacacagaagatttcatcaacattcagctggtattatgctctccctacaattcatagtatctctctattgcatatacaacaattcatagtgtgtagatatattctgttctgattcttgtacaaactaaattgaacctattaagtgcacagcttcttctttggaatgataatagccaaaatatcattcgattgattactaccgtctgtgtgtggtagtcttatgcttcaaatatttatgtttgcaggataatgttcgaaaccagcttattcaatttgagctacttctcacaactgcaacatttgtggtagccattttcggggtggttgcaggaatctttggcatgaacttccccatagcactgtttgacagtcccgtggcttttaaatgggtcctcattgttaccgggataacaggcatgaccatattttgtgcttttgtatggtttttcaagtatagaaggctcatgccattgtaggtgctttaagaccctcaattaaaatgatttaattgaaaagaggaagaattttgttttcttcctttattcttttccttttttactttatatatattcaatgagaaaataggaaataaaagctagtcctctttagctaccatttttttggcttgtcttgttctgaattgaagattaaaagtatatggggttgaaatgctttagctataaattattgggattgtttaagagaaaaattaaatctagagattcattgttataatcaaattattttaatcaaaatttcaagagggacattttcatgaaaacacttgcaaatgagtactaaatttcagagtcatataatattgcaacaaatttttttaatagtaaatgtgagtcaaaattgttttctgatttaacaataataaacacatcaaagtattagagagcagaatatgtcaagaaacagaagtaccatttaacccaacatacttatttgtactcaaaacttatcagaagccactcttatgcaaaagttggaaaaaacaaggtttttaacaacaaaaaactatgattaaccttccgacattaaatttctcaaaggagaagtatatccacttcatgtaaaagaagaaaaaacttatgcagcatcatttagcagatgatgaacttgacgacagtctttgactacgagctttatcagctttttccaagtagtcttgatgagactgatgctttgcccctgaaaagataagactcaagcatattagataggaagataagattgaccataaataacaattaagccacaaaaattgaatcaagagtcagtcatgcatagtataccacatcaggcaataagattagccaatcagatgaataactaggatcaaatattgatatgaaactagagaaaatcttactttcaatatagtagtcagattacatgtaaacatagatattggtaatatctgtatcttatccataatgcagcctaggtaagcctgttataagatctttgtttctctttaggcaaacaaccaacaaattgaataaaaatgaggaataaatcaaccaacaaattgaaaagctacatacatgtatgctgttctacgattacatttcatctgttaactcattgattttgaaaagtagtagcagcagaaaatatggaaatttaaaactagattttcgatcaatggcaagatcatgcatgtgagtgacattaaacatagaaaccaagttaaatgaaataagaaacaatctagaggtgaacacaaaatcaaaagaagctacttttgccaaggaattacatactacatactaagaaaacagcttaattttt

SEQ ID NO: 186853 - DNA, 1630 bp, Cannabis indica
aaaaaaaaaaaaaagaatagagatgaaaataaaatatcaagtagctagtccaaactaattgactaaataatttcatatagaagataattttttaacaaaaattgaaatgttcttaataaatcattttgtctagtaaaaaataattaattttttgtttttatgattaaaaatatttacaaagtttaaagtagatccgatctaatccgtactattttactcatattgtatttgattcgcactaagtgtggattttacattttgaatccaatccgtatagtaactcaaattcaatccaattcaattcgcaaaagtgcagattggatcgattattttgaattggctactttttaatattaaattatttaataattattaaaaaaatatttttttcgcataactaacaataaaataaaataaattattgttgttttatgtctctaacaattaattaaaataataaaataaaaaataacaaattcacaagaagaaaaaaaaatatctataaaaatatttaattttgtgttagattatattttccttataaataagaatattagaatatacatttgatctactatgtttcgaaatatatttacaccatatgtagtagatttttaaattacaatttttaaatagaaatattaatagtatatataattttttaaaaaatatataaatatgtgtagattgaattggatcggttacttttacatgtcaattaacattcaatccgtacaagtgcggattttaaattttgcaatccaatctgatcctcacagtggggatatctacactttgcaaattaaattgaattgaatcgtgcggattgaattgaattggttattttataaacaccactaattcaaagtggtagatacatttgtattaggtagaaatcaaacaaccacactcaaatacaaactaataaacatataaaactaattttaaaaacatattatattttaaccagtgaaattgtttgctaactcattaaaaactaatcaacatataaaaataaattaaaaaaaatgtttattttagtatgtatgtttaatttttattttgtttatatatttttagatatgagaatattgtgtatgtcaaccgaaggccacaagtaagctttttttatccaaatccaccaactgaaagcaagaaatttaccagttcagaattgtagaatctgattggaaaatagagcatgcaaaatagtacaaacagggcaaattagctactgaattatatagctcatgcaatttacttttattgtaggttgtgaagaagaagacttgaacaccatttaatgggcttggtatacatatactgtattttgttaatttttgtaaatttatttttccacatttttagattttaaaatttatggctaattaattggtacactcttccttcacaggtaaaatgggaaggaaatgtctcgaaaatgatacgaaatgccacggtagaacaaatatggcctttacttgcagacttcttcaatttcaacaaatggtttcctaccttagccacttgccaaggaatccacggtaccaacggtgaggttggctgcatcagatactgctcagggttctcaataccgtccaataacgttgatgatcaaattagcagtact

SEQ ID NO: 186854 - DNA, 5917 bp, Cannabis indica
tacctcaagatgaatcctgggaatggtgttctattcaagaaaagtgatagcattgggcaggagatgtaaataataataaaaggagtacttcaggatacttttcttttgtttggggcaatctagtaacacggagaagtaagaaacaataagtggtttgtaagagttcagctgaagcagaacttagagctctagcacttagtgtttgtgaagggatttggctgaaaagattatttggttgaactgagactctgataggcctccacttttgtatatgctacaaagaagactaggaaagctaaggatggggtagcagctgggaattaaatctgccttacaattctgttttgtgagaatggtttgggtagtactgaggtgtatgataagcctcacaaggattagctataaatattagttggtttctgtatgaaatggtgtgtaacattttgagtaaaactctttgtaagaaggatccaggctctcgaatacctgggttttctatcaatacaattccaatttccttcctagcttgctcttttatcatattttcctactgcatattaatttgcccaagaaaaattcctatcaaattagtatcagagcagtaactttccatggggccaaagaaagattcaatggtagaactcatcgaagagaaagtgagtgaaaaggtttataacctccgtgtggatgctcaaaaggtgacttagggattggcgaagatgcaagaggagtttcagggcgtcgtcactcaaatcgtagccaaacagttggaacccgtggtgagtcagatctcccagctctctcaactgtttctaccacagggaaaagacatcaccaaaagctacatcagctagagcaaacccgtttcgacgtgcgacagaggggaatggatctttgatgggggaacacagttctgcaagcgttccaatagctccccaacagccattcgtccaaccaacagggacctaccctcctaatacagtgtcgacgatggcaccgattcaactcagattgttttctccaagacagccgcatggtccagacttcagactacctcgaatggagataccattgttcaatggtgaaaatcccaatggatggatctatcgcgttgagcgatactttttgataacaaagatgacgaaaaccatgatgttggatattgctatagtgggtcttcacggagatgctctatcctggtttcaatgggagaatcagaggcgaaccatcacgtcatagttcttcgttttcctgaggtaccagtgggattgatttcagaggagtttctgtcagtggttcagtccgataccgtgaaagattaccgcgttcgttaggaggtgctagcctctcgtgtttctaatgtacctgatcacatcctagaaggaaattttattccttaagcaggagattaaggctactttgcacatattacaaaccaaagatctgctccaaattatggaagaagagggccatcatttaatgggccaacctcaaagcctaatacagccaaacctaattagagccccattttccctacctgacccagttacaacccatttacttcacgatctcatcacttgacaacacaaaccagatctcagagcttcccttcgaattccatggccacgacggcgtccaaggccagcatcaaccgatcaaccaccacgaactcctttaagcgacttactgagtaggaataccaagacaaacggtctcgggggctttgttttaaatgtgcaagaaatttcgttcggaacatgagtgtgagcacaagcttctccagatcacacttaccgccgacgaagagtctgaacttcctgacgaaaacccacctctatcaacagattttcgagccacagaagagaccttagcaactctctctctctctaaattctttagttggcatatccaccgctcacacgatgaagcttgctggtcacatcaaaaagcaaccagcgacggtgctaatcgatagcggagccacccataattgtgtcaatggaggtggtaacaacaattggattgcctatcaccgcaaccacctgctatgatattttattgggaacaagcgagaaagtccgaacatggggatttgtgcgcaagttgagttggattggggcgttgagcaagtcatcactgattttcttccccttgagctaggaagtgtagacatcatcatgggaattaagtggttggagacacttgggaatatgcaagtgaattggaagacaatggtaatgaagttcgaaacggcaggaacatgggtgacacaacaaggtgatcccagtttgtgtaagtctcccatatcactaaaggctatgattctgcagtggaaaaaggaggagaagggtattgggtccaattgaatgccatatccaatgacgaattagatgatcagtcgccacttccaaagcttatcgctgatcttctagagaagtatactgaggtcttcaaaatgccaccaatcttaccccccattcgctcttagaacatgccatcaccttgaaacctagcatcgaacccatctctcttcgaccctatagatatgctcagatacagaagagtgaaatagagtatatggtccgagaaatgtttcgagttggaatcgttcaacctagtacaagcccagttttgctcgtgaagaagagagatggtagttggcaattttgtctggactaccgggctcttaattgagagacaataacggacaagtttcccatttcggtaattgatgagcttttagacaagctccatggagccgcagtcttctctaaaattgatttgaaatcgggataccaccagattagaatggcacctcaagatgtggagaagatagtgtttcgcactcatgagggacactacgagtttttggtgatgccatttggattgacaaattcgccagccacttttcaagtacttatgaatgaggtatctcttaatttttgaggggattgtgcattagtcttttttgacgacattcacgtgtacaacccctcccttgaagctcacattactcatcttgagttggtactggagcgtctacagcatcacaaattgtatgcaaacaggaaggaatgcccttttgctcagtctcaaatcaattattttggccatgtgatctcttcccaaggagttgttgcggatccgagtaaaactgacaccatggtttcttggtcgagccctaccaacattaaagaattatgaggcttcttgggacttacggggtactgccgaaaatttgttcagggctatggaagtattgctagaccctttacagatcagctaaagaaggatgctttctcttggtcacaagaaacacaagaagctttcgaacaactcaaacgagttgtgttcagttcccgtgttggcactacctggttttacaaccccttttgtattagaaacggatgctttaggcatgacttaaacccagtcgtcctcaggcatcggtcttggggctgtcctcatgcaacatagtcgtcccatcgcttatttttgcaaggttttatcccctcgggcgcactagaagtcagttaatgagcgagaactaatggccattctcttggcaattcaaaaacggcattgatatctcttgggtcacaaattgatagtgcgtacggatcaaaggagcctcaagtacttgctggagcaacatttggcttccatggaacatcataaaatggcttacaaagatccccaggcatgacttcgaaattcaatacaaatcaggtctcgaaaatagagcaactgatgctctttcacgtgtcaatggggaggtttctcttgctgccatttctgtccccaacttcttctctatactagacttgcaagtgcaaatcgcagcagatcctatcctctcaggtgacccaagacttagccagaggtcaagacagcaggggatttaccatggttcaagggtgtctcaagttcaaaaggcggcgggtgttacctgcctcatctctcgtcatccccctactcctataagaatatcatagcaataacgttgggggacactccagggtgtttaagacatggcttctgagttctattggcaaggaatgtagaagacagttcaccagtttgtggcatctgcctatcccaacaaaataaatatttggctcaatcacctttattgcaacccctgcctatcccagagcaggtttgggaggatgttactatggattttatcgaaagccttcccaactctaatgggtatgactctattttggtggtggactattgtctcacaaagtatggccattttgtcccactccgccatccttatactgctcctacagtagccaacacttatgtcaaggaaattgtcaaactccatggtatcccacgctcaattgtctctaatcaagacaagatttttctcacttgttttggaaggaattattttgtttgcaaggcattaagctgaaacatagcacagcttaccacccacagtccgatggacaaacagaagttgtcaatcattgcttggaacctccgttgctttatgagtttcaaacccaatcagaccattcttcttctggcatgactcccttccgaactttatacaatcgcgacccaccacctctactccgttttgagcgtgctagtaccaaggtttcgttgaagtgcactccaagatcgtgattctgttttggacttgctgaaacaaacctgattcgtgcctaacaaaaatgaaggttcaagcaaaccgcaagcgttgtgatgttcaattccaagtcaaggacatatgtgaaactccgcccttatcgccaacgcattgtcgccaaacgacccagcgagaagttgtctccccctttttggaccttttcccatacttgatttgttaacttaactaagacaaaaaaaaaaattgggagcaaaacattatagtactcatgaatcctattgtgcaccttacaaaagatgggaaccatttaaagaccctaaaaagtatcagggttgttggaaagttgaattatcttactgtaacttgtccagatattgcattctctattagtatggtcaatcaatttatgtcgtctccaacaattaatcattgaacagcgttagagcaaattttgtgttattagaaatgagcacttggacgaggcatcatgtacacagatcatgggcacactcatatattgagtgtgtctcagatgtagattgggcaggttccaaagtagatagaagatccacttcaggttactgtatttttgttgtagggaatttggtttcttagaagagtaaaaagcataatgttatgtcacgatccaatgttatgtcacgatccaatgcacagtcaagatatagagctatggcacagtctgtgtgtgaggtgatatggatatatcagctattagctgaagtgagactcaaaacttcattgccagcaagattgtggtgtgataatcaagctgctcttcatattgcttctaatattgtgttccatgagcggactaagcacatcgaaattgattgtcattttgttcgtgagaagattcagcaaggttaagtttctacaagatatgtgaagactggagagcaactaggggccattttcacaaaacctgttaatggggtgcaagttgattatttttgtaacaagctatgcatgatcaagttgattattagctgcaaaattagctagaaattaggctaatcagtttcctttattctcttagtttcctaggatagattccctaagttgtgtacaaatgtatgttatttcctcaatggaatatacaagtgaaccattctcctcaccattgtttacatgtaccaccagggtacatcaattggtgtcagaacaccgactccagtgaatgcaatatatgtgaatggagtttcgaattgtgtgaaggtagtgcatattgttcaaagtgatgtcacttgattgaaggaattggtccaccac

SEQ ID NO: 186855 - DNA, 2751 bp, Cannabis indica
agttctggaaaaacctggccattagatatgaacttaatgaaatctatgtatgtcaaatttacttccatatatttgtttagaaatattaaggtgcagcaacattactggattctaattttggtaatttgccttctcagacatacactggaaatattctgatagcagtcaatccatttcaacgattggatcatctttatgatactcacatgatggcacaatataaaggagctccatttggagaactaagccctcatgttttcgcggttggagatgctgcatacaggtgaaatatgtattctatagttctctcaagaaacttacactatttcctgatgtttttgtcttgcgaaaatagggcaatgattaatgagggaaaaagtaattccattttggtaagtggagagagtggtgctggtaaaactgagacaacaaagatgctcatgagatatcttgcctatttgggtggccactcgggagtggaaggatgtacagttgaacaacaagttttggaggtaagataagcatgttgtttagcatgtcttgagttttatgtactatcataacgaagcgggtctaactaaagtttttggtgttttttgggctcaaatatattgtagtccaacccagtgcttgaagcatttggcaatgccaaaacagttagaaataacaactcaaggtatgcaatagttttatactgttatttgacctgttgaaggctgttttatatagctttgttaaagattctgatatccattatctcctctggatgtaatacacagtcgttttggaaaatttgttgaaattcaatttaataagtatgggaggatatctggggctgctatcaaaacctatctgcttgaaaggtctcgggtttgccaaatttctgatccagagagaaactaccattgtttctaccttctttgtgctgcaccaaaagaggtattttgacattgctgctcttaggttttctttgtttcgtaaccttctttaaaagtttgcacatttgacagaatgaaatattcattcttatagagttctgactacagtttcttcttctttttttaatggcaggatattgagaaatataaattgggtagccccaagtctttccattatttaaatcagtccaaatgttatgagctggatggggtgagtgatggtgatgaatatcttgctactagaagggcgatgagcattatcggaatcagtgaagaggagcaggttcatattctaatttgaagtgtcaactttcaattttatggtttaatcatatttctgattacttgtggttcttccaggagtcaatatttagagttgtagctgcaatacttcaccttggtaatatcaatttttccaaaggggaggaaatagattcctcagtcatcaaagatgatgaatcgagatatcatcttaatgtgacctcagaacttcttcggtattttgtcatggttaatttatttccatatatacatctagttattcctgtcacatattaactaaaatcatcatatagatgtgatgcccagagcttggaagaggctctcattaaacgagtaatggtgactccagaagaagttatcacaaaaactctcgaccctgataatgcgattaatagcagggatgcactagctaaaacattatattctcgcttattcgattggtgagccttgccttcccttgacctagatatatttatctatcttgtaattattgcatgaagataataacatgcattacgatattgtttcaggctggtggacaaaatcaacaattcaattgggcaggatccaaactcaaattcaataattggagttcttgatatttatggctttgaaagttttaagtgcaataggtatgatgagaaaggatagtgtactgtgccatgtgtcaagtaccaaagatactacatttatgaccgcgatttcgtacatcattattatttctttcaagaaaggaaactatacatgtgtgtaattattgatactatgctatgttcggtgtttaacgtaacagttttgagcagttttgtatcaactttacaaatgaaaaactacaacaacattttaatcaggttagtatttattgttgatatttgacgagactaaatttgctatactattcataaaaaaaaataaaataaataaactttgctatactccacatgtatttgagagtctaatttcttgctctcttgcgattgcagcatgtgtttaaaatggaacaagaggaatacaacaaagaagaaatagactggagctatattgagtttatcgataaccaagatgtgctggatctaattgaaaaggtttttagctgttgcttgttcctatttctgaccttttatacatgttgtggaagtgtaactctaaagtcatttttgataaatttattagtgttagtatcattgtgtttctaaggtaaatcaatttaattattcacagaaacctggaggaattatagcactcttagatgaagcctggtatgttgctcttgtttgatccttttttttttttttgcctaatttcgaatatattgttaacaataataaatacattgtatatcagtttatctctgtctgagtctgtggttgctccatttaatgtagttcttaatagtatctaaccttttccttctttagtcttcattctgtgtctcatatgcatactattgtttgtttgcagcatgtttccaaagtccactcatgaaacttttgcacagaagttgtatcagactttcaaaaatagagaaacg

SEQ ID NO: 186856 - DNA, 3008 bp, Cannabis indica
tcttcttcttcttctcccgcaatctgcggagttacagaccaccatagatgtagcttcaacaaaacctctaaagacaactcctttactcactttcacaaccaaacaaaccaaacccagatctcaaaaatggcggattctcaaccccacttcctaatttcatttcttcttcttcttcttcttctctttaccgttacagccgccataaaccctggctcatctctctacgcaagcaacccaaatcaaacttgggcttccccgaacagcacatactctctcggctttcttcccgccgatccacccacttcgccgccgacttacatcgccgccgtggcctacgccggtggcgtttccatctggtcagctggtggaatatccaacaccgccgtaaactccggtggcgcgcttcacttcgagtcgaatggaaatctcagactagtcaacggctccggtgccgctgtttggagctccgacaccggtgggcgtggtgtgtcttcgctcgatgttggggacgatggaaacttagttttgaaaaatgggtcttcttccaccgtttggtcctcgttcgatcatccaacggattcaatggttccttctcagaacttcagtcaagataaggttttgcgatctgggctttactcatttggggttactaagattggaaaccttactcttaggtggaataatagcatagtttattggactcaagggttgaattcttcgattagtactaatttgagttcacctagtttgggtttacaacccattgggattctttccatttctgatagaaatttagctactgctgccattgttgcttacagtagtgattatgctgaaggtagtgatattttgaggtttttgaaattagataatgatgggaatttaaggatttatagctctgctaggggtagtggtactaaaactgagagatgggctgctgttattgatcagtgtcaagtttttggttactgtggtgatatgggaatttgtagttataatcagtcttttcctgtttgtagttgcccttctcagaattttgaactagttgatgctaaagatagtagaaaagggtgtaagagaaaagttgagattgctgattgtcctggtaatgctactatgttggatttggatcatactaggttcttgacttatcctcctgagtatgaatcccaggttttctttgttgggatatcagcttgtagattgaattgtcttgtgagtggttcttgtgatgcttcaacttcattgtctgatggtacagggctttgtttgtataaaacacctggttttcttagtggatattcaagcccatctatgtctagtagctcttatatcaaagtttgtggtccggtgagtccgaaccctttgctttcttcacagaatggtggtaagaatgaggtgtggaagattcgtccttggattgttgctgttgtggttttggctactcttttcggtttgatggcattagagggtggtttgtggttttggttctgtcgaaataggcgtaatttcggtggattgtctgctcattacgcccttcttgagtatgcttctggtgcaccggttcaattctcgtataaggagttgcagcgtgctacgaagggattcaaggagaagcttggagctggtggatttggggcggtttatcgagctgttctttcgaataaaacagtggctgctgttaaacaacttgaggggatcgagcaaggtgagaaacagttcaggatggaggttgctactataagcagcacacaccatttgaatcttgtgagactgatcgggttttgctctgaagggcgtcacaggctgttagtttacgagttcatgaaaaatggatcgcttgattcattccttttcaatacagacgaaaacaattcgggaagattgttgaactgggaatatcgtttcaacattgctctcggtactgcaagaggaatcacttacctccatgaagagtgtagagactgcattgtgcattgtgatattaaaccagagaacattcttttaaatgaaaactattgtgctaaagtttcagactttggccttgcaaagcttgttaacccgaaggatcatcggtatagaactctcaagagtgtaagaggtactagaggttatttggcaccagaatggcttgcaaatctcccagtaacttcaaaatctgatgtttattcatatggaatggttctattggaaattgttagtggtaaaagaaattttgaagtgtctgctgaaacaaaccacaagaaattctctgtttgggcttatgaggagtttcttaatggcaacattaggaatattgttgacaaaaggcttgttgttgatgaagatatcgatatggatcaagttaggagggcggttcaggtgagcttctggtgcatacaagagcaaccgtctcatagacctatgatgggaaaagtggttcaaatgctcgaaggtatcatggaaatcgagagacccccagcaccaaaagcagccctggaagtgtctatttcgggaaatgcaagcagcaatgccagtgctctatcaactactgcaacatcagcagctccagcacagtcttcattttcgtcgttccaaactgctgggccatcgcctttagcttctgaaaaggcatcgtcaattctcttacattcagatcaaaagtgaggcgctcacccttttgtgtttttggctagactacaagcagatgcagcctcttcgagtctcaactggtactctcgagtactacattgcaattgttatagttttctgatcgaatgggttaaccttgtttaacaaaagaaatgaaattttgttaaaagaatttgcttgtaggtagcttagtatataagattgttcattgcattaaagtgtagagacatagtttaaaatgcatatatatacatataagtttgttatacgagagtgagatatataaaggggaagattatatcatagctttctgtctcctaagcacaatcaattgaataaaagttaaaagttccataactatggttattttatagtta

SEQ ID NO: 186857 - DNA, 3186 bp, Cannabis indica
ttcactgctgcaccatattgcatagactcctctacctgttttcaatccgaaataaatggaagaaaatattatgattgtggcattgagcactaatccaaaattttgtttcttctctataaagatacctgtgatttttgtataattagtgctgagagttaacttaacatggggcccaactcaatgtcactttcttgtataattaagcaataaatgtcttatgtcattggctgaaaaaagcttgttttgctaatgctagtgatctagagattggtagatattcccacttgacaaaagaaaaatcttttgcataatgctcatgcatgaatgaacacacaaacattcaagaatgtaatgacgtataatgtcaaagctttaatctttatagctgtgtttatcttctttttatgctttataacttgatatatataaatacatattcaaaagggaagagcttttaatggaggttcttgctggcccttttctttatttgtctttctttataacttgatatatgatttggcagtacattctttaaggaatgccacaaagggcttgcacaagttgtcaaaaacttgttgaaaaaagtgggaccttgtgaagccatatttttcagcccgaaaagaggtgattcattggacaagttcctagaagaaattaaagaaaatggcttgcagttcagcataacagagaaatacgacgcagaaatttggaatcgtcatcagcgctttatgaacggtgatgatcacgacgcctggcccagctacgaaaaggatcactcctaccctttactggtcagaatcacgccatgaacttcgtttggttactagtttcttgttgaattttcctgcacataatttaacattattttcaaggccccatttgaatagcatgcattattattgtgtgtacttataattttcaccagaaaaatctaggtacatacagtacaggaactagttcagtcagtgtacagactattattattcttgtccttgtgtttggtgggatcccatactttaaaatgcactattatagtccaagtctatttatgtaactactaagtagggtcatggtcaatatgtgggcttggtttcacccaaaattagttaaattaaaagaatgaattgattgttttgttaatggattaattactttattagtcttccatttggatcattgaaaaagttttcttttacttaaaatatttggtttatacaattctgttttggattcctcttgttcttttcttcaatattagtttggactcgcgattttactgagaacaacatgtagtcgactgatccacaaacgacaaaaatatctcttttgattacttctaccctggtgagccgaaaccaaagcttattggaagaccaaaaaagattcttctaatgcattatttttagtctaataagattcataggtatagaaaaaaatcctctcaaatacaaatttattctttcgacaatctttctattgttatatggtatacaaggtccgctactacaaacaatgaaaatcgagactatttttgagttttgtcaccaaatattctatacaaaaagaaaaagaattttgtcacaatttttttagaagcaaagggaaaacaatttgatgtaaaagggtatcaaatgaagaagagaagcactgcaacttttgacataaaattcctttatctctgaacaaaaattgagtcactttctagagctttaaaatatgaccgtcaaagactctttaattaaattgatctcatttgttttatatataatatatacatttatatatttatatataaaagatgctgcaaagttttaaagcattaaattttgatcgattatttcatgatttctccatcttatcattgattcattgttattaataaagatatgatatcattcatgtattaattatactaaaagaaaaatgtaaaaaaaatacacaaaagtaaaagattctgcctcaattaagttctttatacaagatcaattaaatttttgttttttctcaagcaaaatacaatgaaaattgtataattatgttacctctaaaataccttataagtatttatatatagaatgtccacaatcaatagtaaaattattggatatttttcctatttataactaatattaataataatattattgatagaatataatatgtaagtttatatgcacattttatgctacactcctttaaaaatcaacattgaaaaattactgaaaaaaaaatgcatcttattgtcatagacagtaattattaatctaattaaatcattcaattaaatctacacagtcttaatatattctcacatgatgtgaaattacacaacttattttttttttacgaatcacaatacatcgaatgtcacattttggttaataaattatagacaaaaatgaaaaagtgatgatgataaagtaatatatagatgtagggtaccatatgtttgtgttcttatcttgttctttggagaattaaagtaaatgaagctttctttaaattctctcttcttctttttatttctttatgatttttactttgtgctatatatttccccacacactagacactagttggtggtgaaggaatagaataacctcttacacccctttaccaagaatctcaaaattaccactacattcattttggaccattttcatcatcaacttttggagagagttgatcccccttcacttttggagtcacaattattgatttgtagtttataaataattaaccattattattgcttaattagatatttgaaaccaagattaattaattagagtaataataataataatcacttcttttaattatgataattgatatttattaatgtcctatcatagtattagaagatatatttatatatatatgcaaaattatgtagagttagtgtagtgactatccttttcaacttactaattcatgattataaattgaaaaaatcacttactcatcatcatgctctacttatataaatgtacatgtatatatatcttagtatcttactccttttcatggttggcatcatctctaagtttttttttaatcattggaatttgaagtgtgactattttattttagttttttttttaaaaaaaaaaaaattatgatagcatgaaaaaagcagaattttatggccattccacaacttgtaatttgctattttttttgtcc

SEQ ID NO: 186858 - DNA, 5560 bp, Cannabis indica
gagagagagagaggagtaacaagtaaaatttgctaaccttaactagatcgtcaaactcagggaactcaaaatattttgccaattccattcttccgtatttcacagcctcctctagtgctccaacctaattatcatagttacactcaacgagaataaatatatacttgaagaaacaaataagatggactcgaaagaatgacaatgcatgttcccaatttaattttaagtgacagtaacagcaaacaggaaataggaatccaagagatgcagtgatacacctttatttatttatttgcaaaaatatcaggataaagagtacttgactttctgtaagagtaaattcaacgtatttaagacaacagaataaaatcatactcgaattaattcaatgaatttttgacagtgaagcagaaagcaagttgctgatttatcatcctgcagaaagaaaaagtgactcgttataattaacaaattctgataaggttaataatgacataaaatcatcaaataaagagtgcaaagaatcaaagtttagaaacaatatggtgtgtcacaatcagaacatggattagaaaatgtgagatgtatcagtgaatccaacatgaaagtgtaatgacaactgcaaaacaaggaactccattcagtaatcaattagaattactgcaaagatgccattcacgatgatcaccatatgatgaatgataagatcaccataacccaatcagaacaagactgaaaaatagaatattctcccctggaaacatatggccctaatgcacaacatagttccacatggcagtagctcaatttcttgggtgagctgggcgagcaataattgaaagtagtccaaaattcaagtctaagtaaatatatctcatcggaaaagaaaatgcattgtgtaagactatatttgcagaactacatcagctggaaatatggatatgaaaaaaagtggtaagtctcttttgtaatgtaagatgcatattgtaatgaaggagcaaaaatataaagtcacctgaacaatctggggataccactcacgaagttttccaagtgcagcatcaatatctccattcctaattagcttcattcaaacaagcacatcaaaacaatatcatattagaaaccaatatatttttacgaaggaaagaaaattgcaaaatggaaggtatattattaaagaatagtgatcaaatcccatgatacatgtacttgcatatgataggcctagtataatgcaagacgtaggtgatgttaactggagtattatttgggaataatagggactggttttagaaagtgtatttgtctaaaatcagattactttgggaaggtttcataggacaaatagaaagactgagcgtgctggagttatcatttggtgttgtgtttcaaaccttggctctaggagagaaccaggtctctctattacctgtggatactgtttttccttttttaattcaataaagcacacttcataagtcctcataatatactttatgtttgttatctgtaagtatatcaatttattagaccccacatatgggtagaatataataaacaatgaggtatatgggctattgtaatgagggggtgctgggaatgagcatgaataggatactactatacatataagggaaagagaatgagggcaaagtcaatagagcttaactattatgacttcaaacaattcaattataagcagctaagaaatatgacaaaattcaccaagtagttacaaacctgtctgagaatctttctctgactcaatgcatatactatatcatgctcatcaaacccattttcttgagctatgtatattggaggaacagtacttttagtagccgtgtcaaaagaatgaagtgtatcttcatagccataatattgcaaatatgagcgcacaagtctggttagcaaatgcaaatgtcaaactcggtactaacatgtatagaggacattatgcatgagcttcacttcaacattgaagtcctcagatattgtaaatactaagagctcgtttagtataccgttttgtattgtgttgtattaatattatttaatacaatacaatgtttggcattgatttgcattaatagatattgtaaaaatatactttctttactacaaacttgacccaaccccgacctcgatcctagacctgaatcccatctccggccccggccacaaaccccgacccgaaccagaaccccaaaccccgaccttggacctagtccggggtccaagttggggtcgtgatccaggtctaggtccgaggttgggtctgggtttgtgtccgaggtccggattcgagtccaagtctcgatccggtcccagtccgaggtcaagtccgtgtttgctaccgagtccgagtccctaaccccataccctttgtaaatattattatataagctaatacggatcatttgttatgtattaaataatataattcacattgtattgaaattcatagttgtaataattaatacaatacaaagttttatccaaacatagtatttttgttatttaatacaatacgactcttatacggtataccaaacgagccctaaaacaaaaaactggacatactgattagttcatactcaaaagagctagagtaaacttacccatgactaacatttgttggtaaagacattttatcaactgtcatttgtagcttcatcctctcttgtacttcaaactcctaatcatacagcaatgatcaaattagaaggaaaacacaatttacaaacttagagagcaatctactatatcagatatggcagattttgtttcgctttgcagaccatcttgaatctgaacttgattacaaataagaagacagcaagaagaaaatctgtatactcaacaaacacgtctataggaaaataaaaatttgacgttaaatcaagacattctcatttagtaacatggagttctttcagggaccacgcttgagttgtgtagattagatcatatcgtgaataaaggtagtatagaaataaaaaaaacagaggaaagaaagtatctcttgccttaagattaaaagcaaaaggtttctgcccaaagttaacctgcactctgcaaaggaaacactgtatttaagaaaatcattctcgtttgcactagcaaaataattatgatcgaataaatggcatgtgtgatgtggtaagcaataatgcatcaggatagcatgtaaagaatcatcaactcaaccacaattctaacacctggaagatcacacgtaaaacctattagttaaaaggtaaaacttactttcaagccaaaactagaatcatagaaaagaagttgccaggaattattccacacacacacaaaaaaaaaaccataatcagaatttgaaattcacaaacaaaatctaaaacttatctcctaaatatgtagtaattaaaaactaactactttcaagcaataagaagattaattatttgaaaaaggataagccttatcttactcttcattttgactatgaacagcaatggtaggaaacaatggacccttcacttccttgaaagctgtccctactacagccccatttttactggcatcaacacaaaagagaagtacagaattttaaggcagagaacagttaataaaatacaacaaacaaaacggtaaatgcatccaaaatcaaattcgacaaataaaatctcttccagaataaatgaactaagaaatcaattaacttacgtaaaaaagtattcctgtgatgcatagttaataccacccccaactatatcaccagaagtgtacgtcggtccaaattcatcactcttgcctggtccacgataaagatttccatcatctccatgataaccacaactgtttgcctcccatctaggaataaatatgttcatcaaaaaagtgaaatataaccaatatatacaaggaactgtctactaaaagaaagattcgcctcatgaacacaaagggctgaactcaaattcttgagtttgccttttctgttctactttcctactaagcaatcaatttgctccattagtgttgcggtttattttgaaatttagtccaaataactaaagagtattgaccaaatacatgaagaaactacataggcttgctgtaataaaaaaatgggttaaccgtgtctctaatctctacaaacctaaacagtatttttacacgcaaacccagaaccaaatagtttgaattaacaaaaacaaaaagattgcaataatcagctcattgatcacaacgaaaccaaaaactttgcattagtatttccgtcgttgagcatggataagcccaattaataaattctcagaagcctactttttctcacttcactttcccggcaatcaaccaaagcaaaattattaaaccaaatattcaaccaacaccgaaagtaaagaaatacgattctcacccaggctgcctccgcatcttgaagttctcgctagtgaaaccaattgcgatttgacccttagttccggcatccttaacaaaaatctcgaaatagtaaacaagccgtttcaccggagccggtctattaccctgaacgacaccgacgtcgtggccgtgaagattaacattagtgtacttcaccgaaagcttatcgggagagacaacaaggaatccaccggagctgttaatggtgttgagctcggtaggagcctcttcgtcctcgtccatgtcgcatagacctcgagccaagcttagtcgagagcgatcgaggaagtagcgagcgagatcttcaccattagtggcgttgatcgctgacatggccttcagtcccgaaacctaaccaattcaaaatttcatatagggaatcgaacaaagacctgaaataattttggctcaagatgaaaagcttacaaattggttgaagacaaagggagaaccagagcagagtggagaaaattcccgctttgattcggtgtgtgtataattttctccgatgaaatgaaattggagagaatagaagtgcaaaagtagagtgttttgtaaaactagcatcaaaatttttattattaaaataattttacaacaaaaaaatggggaattagtcgttttaaaaaaaaaattacagttttaattattctaattgttactttgatagttttgcgattatcataataatacagtaaatgttatttacattattagtttaacaaatttgacaagatgaaaaataagaaagaattaaattaagagagttttatttacacaaaaaattatatgttgttggaggaattttgacaacacaaataaataaaaatataattatttaatgaaaatgtgcaagtacttaatctagaatgacgagtattcaaagagcaggcacagacgtactagaaaatataatgaacacaagagaattatagtgtcagtcagatcacggtctgcttagtctactattgcaatgattttctatctttttttttattcatgttagatcactcatttatatacaaaacaagtgtctttggttacacagaacttaattgattattaaaccgttttactttgaatattggcattaaattaagaaaaacgaaaataaaataaatgaagaacaatt

SEQ ID NO: 186859 - DNA, 4614 bp, Cannabis indica
tttttttttttgtttaatttaaaacttttgcaaacaaagtagtttctctagttttggtacaatttaaggatatttaactcaataaaaaaatgaaacaaaaatcaaaataagtggcagaaatagtaaataataaaaaaaaaaagaaaagtattaagcaaaataaagaaatgattggtttgaacctcaacaaaaggcaactcccctctataacccaaattataaattactaataaaacttagaataatttatacatttcctaattcaaaaaaagaataatttataattttcaaatctattcttttggtgcaaatgaagaaattagaaattactctttatagaccaaatacatataaaagtaatcactctggtcaaacataccttcaattagacttttcttcagttatatcttttagtcaaagaaattgtaatgtaattatcattctcaacaaaatcttaagttgtgtttggcacacactaattgtggaggcatatatgatataatatggtacaaaagaaaaactagtaaagaagtgaaaaaccccttttgcatgctaaaacatttttttttacaaataaaccaatttcataaataaaaacaaaacctcttttcatagtatttaaatatcataaaaaaaaaagagtaggtaaattattctaacttataaaaaattaaatattaaaaagaattattctaacttttagttgttagtttttgacaataataataaataagttatatttctaaaatttacgtaactattaattgtcaagtgatcattcacataatacttttttattggtatatttaaattaatttttaaataaaaataaaatttaatgacttgaaccagtcaataattgctacatggcaatttacttacacttaaccgtcagatatatacaaaaatttaaaaattataatttaagtattattaccgtaaaaaattaaacttaattatttatatcgtaaattactcgtattaataaaataatttttttattttttatcttattactctcatatgaactttttataatcctagaagcttaaaaaagctaagccaaacaggctaaaaagaaccttaattttttttttccagcctgatacaatctgttcaaccaaacacagtctaaagttattaattaaacaaaaaatactttttagaaaaacatttaattaaatcacaaacaaaatccctaaaagataatattaatattaataatattgtctggtaatttctctcaataatccaaagtcaatgggggctattctgttcaaccctctcccaccaccatcttcaaaccccatcttcaaccatggtaatggtactgctacgcccaaagtagaagacactttctttctttgatccttctttactacccaaacaaaaacaaaagacccaaactttaaatttttaaacgacccaaaaaaaataaaaattgagggggagtttctattttcgccatgaaaggatcagaagctcttcttaatcttatatgggttgtggtttttgtgttgagtttttctgggtattattccagagttgcagaagatgatgtgaggtgtttacaggggatcaggcaatcgttggtagaccctcaggggaagctatcttcatgggattttaagaacacatctgtgggagttatgtgcaagttcatcggagttacatgctggaatgatcgggagaatcgtgtgttgaatcttgaacttagggatatgaagctttctggtaagatacctcaagcgttggagtactgtggtagccttcagaagctggatctaggtggaaatgaattctctggtacgattccttcacagatctgtgattgggttcctttcattactactttagatctgtctggtaatgctttttcggggtctatcccacctgagttgggaaagtgttcttaccttaatgagcttgttctttcggataatcgactttctggtactataccttatgaaattgctactttgggtaggcttaagaagttttctgtggccaataatcaactcacgggtactattcctacgtctcttaatcatttttttgaggaggattttagtgggaatagtgggctttgtggtgagcctttagggaagtgtggtgggttgagtaagaagagtcttgctataatcatagctgctggggtttttggtgctgcagcttctttgttgttggcttttggggtttggtggtggtatcatttgagattgagtaagaggaggaaacatggtcatggtattggaagagatgatgattgggctgagaggttaagggctcataggcttactcaagtttctttgtttcaaaaaccacttgttaaggttaagttggctgatttaatggctgctacaaacaattttagtcaagataatgtgattatttcgactagaacagggacaacttttaaggctgtacttcctgatgggtcagctttggctgtcaagaggcttaatacttgtaaacttggtgagaagcagtttaggttggagatgaatcgattaggacagataaggcatccaaacttgacaccccttttggggttttgtgtggttgaggaagaaaagcttctggtttataagcacttgtcaaatggtacacttcattctttgttgcatggatatgggagttcattggattggccaactagatttaggattgccttgggagctgctaggggtcttgcttggcttcaccatggttgccaccctccaatcatccaccagaacatatgctctaatgtgattttaattgatgaggattttgattctaggataatggattttggattggcaaggctaatgacttctgatgctcatgaaagtagttttgttaatggagacttgggtgagcttggttatgtggctccagaatacccaagtactatggttgcttcattgaaaggagatgcttatggttttggggttgtacttctacaactggttacagggcaaaaacctcttgaggttaacactggtgatgaaagttttaagggtaaactagtggattgggtaaaccagctgactagttctggtagatcaaaggatgtcattgataagactctccttggaaaagggtatgaagaggaaatcatgcagtttttgaagattgcttgtaattctgttgttgcccggcccaaagaaaggtggtctatgtaccaggtttaccaatcattgaagaatatgaataaagaacgcggtctctccgaacatgatgatgaatttccacttatttttgggaagcaagagaatgattaatagggggtgagagagaatatgggagaagcatgcaaatggttagagacttttcatcttgaggtaagttctcaaggccctgtgtatgtaaatggtctggtctccattttagctgattttcatttagtcttagctgtaaaatacaataaacaatctgaagggtggggtcctgaggtaaagaaattaatcttgtttgctattattataaatacagtgcctaatgaggctttggtaatgtttgtaactttgtaatgtgcattccttttttgtttagctttagaaattcaacattagagattgcaaatgtgaatttagtgaagaaatacaatgttggtaggtgactatctaaaacaatgtgttttgcatcacatcacttgtggacctctataactgaaataatttcaagtttttttttttagttttcttatacatcattgttgaattttgaataactcatctcatcctaccaaaggggtcatgaattttgagcctgactagcaagtgttgaaatagagtaatgctcatgctatttatcagtatagaattggacaggacgattcacatggcactatgcgaagtggttggaaggttgcaaaaggctgttgagcagcaacctttgtaagtcttcaaacactcatgtggtagtgccacgtggctcaggctgcccaattttaccggtacctaagtcaattttggtttaaataatctggtttcttactaagctggtcacctcaataaaccaacttgtcaatgattctcgttagtccatcattactatgtaatcaagaaacagatcagtgacttcaacgagtattacaattaagaaaaagtaaatcttgatatattatctttcggtcttcaaccatggttgctgctctttcatcattattttttttttagtatatgcactctcttaaatctgattattctactactttttgttcaatgtagtctacactcaattctcccaattgagatatttatttatttaaatctctctatttctattggttcattttaaatgatgttattttatgagtaatgacttcacacgatgtaacctgcttctagcttctattgggtattcacctacgtacttatacctcttatgggtatccacccatcatagactactttaaatcaaacatatttaactttggagttcttaagtgatagactaccgaaaagaacatggacttaggtagtgttatacttgcacagtcttagaatcattacacttgaccttttccaagcaatgtgcattttactcgatctttttgctacgaacacccaaatcatacattgtagttacatatattggcattgtcataattaaattcaataatataat

SEQ ID NO: 186860 - DNA, 2207 bp, Cannabis indica
  modified_base (228)..(228): a, c, t, g, unknown or other
ttatgataagttgtgaccaactgaaataatcgtagagtaatttctttttttgcagtcacaaattcgatcgtgtgggaacttatgttttattatttatttttaataaagtgtatatatacaatagaaaaaaaggtgagtggattcgactttgccctataaaattaatgattcttaaccaacagtcctatcttactatatattataagtctacataatttcaaaaaaagnaaaaaaaacggctattatggatttttcctaaaatatatatgaaacatgtctccctaaataaaatatcttaataaaaagacaaaactgaaataacggaaaaagtgaaaggaacatataaaaaagaaggaaaaaaaaaaagaaataaattattccccacatccttcttccatacaatttacctttaattagtagcttttaataccaattacactctctaaagaatttttaatagttcttactcaaatctttagaccaaacaatccataccgtcatatttgtttagacatctgctcaaatctttgactctctgcatgactaataaaataaattaattagacattttgtgtgcaaatatttctgacaataccaaatacttgtcattttaatggccggattatgaataaaatactagttacgttgggcagattgctaaatttttttattcaaagttaatcccaaataataatctaatatatgcttatatataattatagtacttttgtttaaattttaacaaaaatgagaggcagagcagagaccatttcgttttgaatggttggtgtcttggtggggttgtgttgagtgatgttagttattttttacagtaacatttcgacaccaagtgtattcattgcctttttgtcctggaatattaattaactcttgcataatttaattgaatagtatagtggaattttagccaaaccatgacctctccaatccaaagccatctcaattttaaattcttttgacaactggatactaataattgaatcgaacttccaaagagcctatcaattcacagctagcgtctagcctaagtagtagtagtatgtggttactactactacgatgtactatcaagttaagctctttcaaaacagtccacacacacaccccttctaaattcgggtctagaataaggcctcaccctagctaaattgtctaaattcagccaaaaccatcttcaacttgcatcctgattccaacgctgtttctattttttaagaaaatctctattgaaaacatgagcaataattcgcaggccgaaaagggaaaagaaagcgactcacatatatatgtatgtaaaatatatattgtccttatcctgcttaaatgaataaaaaataatttaattttcaaataagggtggcttgacttgcaaaatgttggaatagaaatagaagcaatgaggttggaggcccacagtgggttttggaagagttaaggagggccaccccggcctatggtgaagtcaccatccagattctattcccaggattcgcttttggagatcgggtgggtcccattggccataatctcgtattcacacgtgccagccttggtcaccctctcgatttgcacttgcctttcttcctttcacactgaaaacccaaaaacgtcatcatccccatctattaaaaatgtatatatatatatatatatatatatttatatatatactgctggggtgtgtaaattcctccaaataacaatttatgtagaatgtgctcgcccaacttgaacattttgtatagttgaatctctttctaatacggtattggaaaacgaaatcacatttctttgcacgaagtcactcatgtccaaatttacttaaagtaaccaaaataattataataatctaatccctcaaggcctcaaatggaataagatgtgtggtatttataagaaaatatacttattccactttctaatgccatgtgcggaaaatctttgctccgtgtattgattgctctagtttataattcgcttatttaaatgaaacggtgcatcgatgtgttatgcttatacaaaaacctaatatccttcctttgatattattggtcaatagtaaatggcccaattttttttttcttcctttcattttcatgggttatgtaattgagattaatgatatttgttataaataacgagtgaaaaattcctcttgttattaattttatttattctatttattt

SEQ ID NO: 186861 - DNA, 815 bp, Cannabis indica
cccatttgaattcaaaaacataaatttgtcttttaattagctagtgatcaacctaccatgcatttcgcttatgattattgtagctccataatatgtatttaaaaatataatttagattaattatgaaataatatatggaaattattcctttaaaatccgtgataaagaagcttctaatttttttttctcctctaatgatattttttcagtcacaattttttttttattttagtaattttttttagttttagtttcaaattttgttgtaccggccaattttagtcaaaaaaaaaaaaattgtagtgtaattgtaatatatatagagaaatttcctttagaatccgtggtaaagaatagctatgtttttccctctctatctctactctgtaccactatatataagggtccctaaccctttggcctttgtatcagtacaaacaaacatctttctctatattatcacttccttctttatcgattttcatttagccttccatggaaaagattgtgaatatcaaacgtacgacacgtatagtccgatcgacggtggtgccaccagccgagtattattatacggcgccaagagaagactaccctctggagatgaccatgtggaaacaaaatgggaaacaataccaagaaaatgcttttgttgatgatgacgatgatcagtttcatcaaaacccaatttcatcatatactactactactcactatcttcaaagtccttgtgttgcttataatacaaggccttattatggggagactagaaaaattgctcctaattacaaattacctcatcatgacaactacct

SEQ ID NO: 186862 - DNA, 10127 bp, Cannabis indica
ttctattcactgttctctatagggttgttgcatgtgtagtgtgtacaatgttaaaactattgtaaccacagtttccctccgcctcgtgagactttccaacctaagacaagtggcctatttctcttttcaaaaaaaaaaaaacgtagaccaaaagcaaagctggagacaatttgcatccaacacgcaccacaaaccaagaaaacaaaaatagataaataaacttttactaataaaatatgaattctttggatttagggtacctaaccaaacatttggttagatccaatattgcattcagaatgaaaatagataagaatttatctttgcagttcttgaaaccgagggtgtgaaaagcataagacaaacctatattaacacaaaacaagtctaaacaggaacaaaaacaagattacacaggcacacaaagaagtatattagcctgaaatgtgccctaacttttcttttttcattttgcattctaaatgttgcctagttttctcttttgcaatgtgtcatactttgctattgtaataaccatttttcaccaaattgagctcttaattttgattctttgttatgtagagtgagagatccaagagacaaaacttgtcatcaatgtgagtggtgcttccatgactttgggagtttactttttattgccttggatttttaacagtgcaagtttaaagctagcatgttaactattgcagattcggaatagaagaaataaattcagatgttgacttcttgaaaggaaattgccttccaagatcagcaaaggtgacctcaatcgagtctgaaactaagagctatagtatgaaagttgcatcagagaaaatctcctcattaaaatggttacactccccaaaaagaggctattgtgaactggagtcaccgaattcattgaaatccaaaacgaaactttcagaggatgaggatagcaacacaagatctatgcccttaaaatctattgatcgagttgtgtcttctgaaaaacatttaagatcttcaaggccagaatcaactactgaaaacaatataagtgaagattttgaaaaagtaatatctgaaatatcaaatgaaagatcttgtaaatattcctcaacattaactacaaaggaatccatcaacctgtgtacctctgataaattgtgtactttgtcagaggattgtatgtctatgagtaatttgacatattctagagaattggaagtaatgtcattagatggggaggcagaatgtgacttcactgattttcctgagccatgtgaaaaacttccaaagaaaattaaaacgtcaaattttgcaaagagcaaaccgaagaaatccaattgttctttctttgttggagatcctattcctgatgatgaagctcgagaacggtggctctggcgttatgaattgaaggtaatggaccaggactaatttttcttttgtctttgctgttaatttttcaattttagttgaagttttcatttaaaaagtggtatgcgtagtcatatacacattttatagctcttttgagatattttagttgcatcttatatggttactaggataatatatttagcttcatttattttaataaaattagcccacttcctgccatttatgttattgacaactacttatctaacatggtattgaatctttctataaaatgatctttcttccttccacatagttttttactttgctgtgctttctcatgaagaggagttgaaattcatacccaaaaagcttctatggaatattcttgaaatgcagtaactttattttgtttgttacatcgttttcatcccatcttgtgtgtttgataatggttatgtcctacttctatatgcaaaaatgtatatatttatatatatacatacttatgtatatttacacagctttcgatcttaattcttgtattttatgatcttgatcttgtaaattaactacagtttcttaacaagttctctgttactttctgttacatcatacgaacatgtatgcaatttgatagcatgttaagataaatatggatgggagatctttttattttaatgttccgaccgatgtccatttttattttgatgttcttgtttaatgataaagtatgaggttgatttaatactaagttgattagtggggcttgctttaaaaggcatagatgggggaaagacagaaagttgtgtgtattaccaattcttctgttttacttgagtttgtattacttggataaagaaatctgaatttcatataatcttggattttcagataaccaaaagcttatttggcaaaaaattctcttacaatgttgctttgctgtctatcaactactttatttggagttttttcatagatattgattgtgctattttggtacttgcagacacaaaggtcccatgataaaaagtcgaaacaaaagtaagtaacaattctgttaggtaatattgttgtcttctttgctagtttaaattctttttgaagttagattttgatacattatgaacaagtattatgagtacattgtagtgatgatgaagaggacgaggtagttttgaatgtggagtgccattttgctcaagctaacattcggagtcgcatatataatcttggagattgtgcttatatacaggtaactgcctttacagtacatgcttttgctaaaactaaatttctttcagggtacatatttcttagatattttctttcttatttttcatttatcatatgcatcttaaagctttggtttaacaaaaagttgtactatggttgtgcttatctatttgatgttttgttgcatctcattgtagatgtgcttaatctagagatatattttctgtgggaaaaaaattgtcaggtgacagggtttgagtcacatatgcatttttgttgtgaaatcagtttaggagttttatgatttatgacataataacagggaaaggagaaaagtatcaacaatcccacaatctaaccaagtttggattctcagattgtttattattatctatgatcataatatttgggaaagattgcaggagagaacaaaacaaaagattaaggttacatgtgtagggtctaagttttgttttctggcatttttgtataactcttgtattggagttttgctttgttaccacggttttcctctgccttaagtaggctccctaataaacttggggagaggccagtctaagacacatgacctttgtctcttaaaaacaaaagattgccaagcatcttcatatgtttcttatagtagaacgagggttggagttctacatgaaagtaaatgttttttgcataaaacaatttatttctccagtagctataattaaattgttactgtaaagacttgcagtaacagattggtgatttgcgattgcagaagacttgcaataacataaataaagtatgcagaatttaaaacttaacacaagagatttatacgtggtattagtattctttcgaatactacttgtccacggggtcacgcacagtgaatgaagtctcaaaaattacaaatacaattgactaaaatattttagacttcctttaaagctttgccgcaatcttttgtatccaatttactaatataatttttgaaccacaccaaacagtaaactccctttagcttttgatgcggctcacttcctcccgaagtgagtctttgtcaagttttctcccaaagacctttctcttgttcaatgaaaactcttcaacctaatctaagaacagtaagagaacaatatcacaaaagttgaacactctaggtttttacatagaatactcttctcacaaagatgaaatataaaataataagactggaagagataaaatgtatggctgctatctaggttttatttatagatcataggaactctaaacacagccacaaatatgtttttacagctgttagaagcattccttgaataaaagccaatcatccttgaaatctgccagatctgccgtagcagaatcgcaagctgcagtggcagatcagacaagatcttcctttatttgcatataaatctaaggccaggattttagctctaattcatgccataaaaagactaatttgtcaaactttagagagataccaatttgtcaaaccttctgaggccacatggtcaaactttagaaagatatcaatttgtaccagattggatagattcttatttaccaatgagtgaaatatgacattccctttcgtgagacaagaaatgatgatgagattggtgtaagaacataccttcacttcttggatatcaatgctcactatggcatcgaatcagaatggatgcatttgtggaataacataccttcacttcttgctgcatttttcggagttttaattttgttcatctctttcaatatattacaagtgtatcattattttatacaatcttatgcttttgttttagggtgacggtaaaaagaaacatataggcagaattgtggagtttttcaaaactacagatggtgagaagtacttcagagtccaatggttttatcgtgttgaagatacagtgagttaattagtattattttttttaatttgaattgggcatgtcataatgcatttctagtaattgttattttccaatttattgtattgaagatgcaatgagttaatttgtcttttttgtcccttatttgtcctggttgtgtcatagtgctttttccactgatatttatttcctttttgcgtattcttgtcaggttatcaaagaagtgggtgctttccatgacaaaaggcgtttattctattctaccataatgaatgataacatattagactgcattatttcaaaagtgctagttacgaaagtaacacctagggtatgtatggtctcaattatttttagtttgtagctgcttgaatcatgtctcttttcttgttttcttgcatggcttgattgatgtttttagtaggctgataaggaccgatactctaaactcaagaaaaggaatagaacaatagccaaacagtaggagaatagaagagtgatattgaattcagtaaagctagttactattggagtccttaggctcttgtgatgcaaagagtgactactcaattcttgcataccctctctatttccttactcagttatttatactatcatattctctactcagaccccctcaatacaatttgtagacagattttgtattggaaatcaaatcagaataaaatcaaatcaaaatgatttgataatagttgcatgatcagtgtgtaaatgtatactttcttagtttgtaggatttaatttgttttgtatttattagctttatttgtacaaccctcttatttgtacatctccccaaagaacaccaggaatgttccaaagtatctttgggaagatgttatcttaatggcaatatatcttactaattgtgtacctagttgtccccttcggtttcaaacatcattctcgatacttcatatttctcatccccatgtttccaccaacacctcttctagtaaagacctttggttgtgtcgcttttgtccatatccatgctcatgattgcagcaaacttgaccctagggctatcaagacaatttttgttggctattctcctcctcaaacaggctattggtgttactttcctctcaccaaaaagaactatgtttcatgtgatgtgaggttttttgaagacactccatatcatcctcctcccttgcttcatgaggagcacactcattcagagcaagaagctcagtggttgtccctagagttagagttaccactagatttcctactccaacttcttctcattctcttcttcctaatgttttagtctgcagactcgacaagtcaccctatggagaaatctccttgagcttggttcgatcgtttttcaaaggtggtcgagaatcttgggtacactcaaggacagacttttgtttgccaagcatccagagaaagggaaagtaattgtcctaatagtttatgttgatgatattattaaaattggtgcctcacttgtggcggaggaaaaccttgataacaagggataaagcacaaacactgtaaaacaaagcagttacaaagaaactatatcaatgttttccacactctacacaaatcaaggaaggaaaactccttaaaatgtttagtcttaaagactgaagtagctgtcgagattccagaacctaattttctcccataaatgctttgctgaactttcaatactttcaaaggaaggagttctagtcgacaaaggaagataccaacagttgcttggcaagcttatctatctctcacacactcgaccaaacattgccttttttgtagttgtgtgagttagtatatgcatagtccttgtcaaggacatctaaatgctgtctatagaattttgaggtacttaaagcaatcaccaaggaaagggccatatttcgaaaaagctagggattttaaagtcaaaattttcacagatgctggttgggctggatcaattgttgcaaggaacagcgcagaagcagggtacaaagctatggcccatggagtgtgtgaaaccatctggttagaaaggttacttgacaaattgaagattaagtataaaaatcccattcaactctattgtgacaacaaatccaccatcaatatggctcataatcctgtttaccacgataggaccaagcatgtagaagtggattgtcactttatcaaaaagaagattgatggaggaattatatgtattaagtatgtgcctactaatcaacagttggctgacatatgtacaaagggatggatagagcaagtgtttgatttcctattagacaagcttggactcatcaatatctacagtcaagcttgagggggtgtgtaaatagatttggtataggaatcaaatcagaacaaaatcagatctaagtgatttgataatagttgcatgatcagtgtgtaaatgtatacttttgttgtttgtaggatttaatttattttgtatttattagctttgtttgtacaaccctagatatatgtatcccttttttttactcgaaataatatccaagaatgattttcataactttttcacaacaatgagtcatactgatacaccaccaattaggtttacttattctaggagacctaagaaataagctgtaaataatagcagtaaaaattgcatagagaatagaaatattagctgaggtggtagttttatgcatgagctgtcaaaataattagttaatggtttggatagtgttgtctataaatattactgaggattgtaattggatggaaggaaaaagagtcacgttgtaacaaagtcttgaacttagggagaccccaagcttctcgaattgcctagcaccattgttgcttgttgaaattcaataaaacttcaattctttctactccattcttgtacctgtcctagtgtgtatcaaagtggtatcagagcagttcttctgggaaggaaagaatgctgaagaaaccagaaaaaccagaccaagaacgagcggaggagttttcggagatggaggaggttgtcaactccaagattggtgaagttaaagcggaggttggctctgttcgagcagaaatcggggatttcagggaagagatgcggcaactcaaggaattggtcgaacgtcttttggaaaacaaacggaagagtcgggttctatcggaaatcaagaacgcggcgctgataacccgacctctcagacgccagaaggaatggcgaggatgggacagcgactgggtcatgagaaatcttcgatgccagagagggaaactagtagtgccaccttcgaacatcgtcgggatgttggattacgccgtttggcgttgccactttttgaaggagttgatcccgatgggtggttgatgcaggctgagaagtactttgcactccaaagatttaacaatgaagaaatggttgaggcagccaccattagcttcgaaggaaaggcgctaacttggtttcgatgggagctacgtcggagaccaatcttactttgggaagatcttaagttatttctcttgaataaattccgaacaacttcaaaaggatccttacatgaacaatttcttgattttcggcaaaccggcacggttgaggaatattgtgagggattcttggagttgctggcacacttagatggggtatccgacgctgtggctttgggtcaatttctttctggtctcaaacggggtttgaaagaggaattgcgattgtttgaacctagtacgttgaataaagcaatggagatggcagccaagatcgagagcaagaaccagtcattatttggaaatcgttctccttggggcgattccaaatacacgagccaccacgaagatcgcaagggcaccgaattttcacccaaggatcggaaacccatgggccaatatcggaggatgaccgactcaaaattgcaagagaagcgacgaaagggtatttgttatcggtgtgacaacaaatggtcgccgggacatcgatgtgaaaagaaagagctcagtgttattgtgatccatgacgatgagagtgatcgaggttgcgaggaggactcaaattctatgcaagaggaggatctcaacctagataatgcgaagctgaccggtgctgcagaagtctctttaaattcagtcacaggtgtgactgctcccaagaccatgaagatcaaaggaaccatcggtagccaagaggtaactgtgcttattgatttaggagcaacacataattttatttccaagaacttagttgagcaacacaacttgcctttgacgaaaactggggtttatggagtgactcttggttcgggtaaatcaattaaaggtgaaggaatttgccgggaagtagttttggagctacaagggttgaccattgtagatgattttttaccttttgggttgggttgcactgatgtgatacttggaatccagcggctggcaactttagggaccacccattttaattggaatcaacaaacaataaagtttcagattggggattaaccagtaacaattaagggggatacttccttgggcaaaagtgtgggaactttgaagtccttagtgcaaaattgtcaaaggaagcagccccagccaaatggcgggcacaacccaatatatccagcattgaaacagtggaggagacagaacaaccaatttttttggaagagcttttggtgaaatttgaccttgtgtttcaatcgccaaagggttaaccccaatacacggtcatgagcatgcaataaacctcaaagaagggactccaccagtgagtgttcggccttatcggtacccccaattttagaaaactgagattgaaaagaagacagcagaaatgctacaagggggaatcatacaggacagccaaagtcctttctctagtccagtcttgttagtgaaaaagaaagatgagacttggagattttgtgtcaactaccgggcactaaatagggctaccattcctgacaaattttctataccaatcatcgacgagctcttggatgaactccacggtgcacaagtattctctaagctcgatcttaagtccggaaaccatcaaattcgggttagagaagaggatgtgccgaaaactgcttttagaacccatgaaggacactatgagtttaaggtaatgccgttcggtctcaccaatgctccagccacctttcaatccctaatgaatgctattttttgctcttatttgaggaaatctgtgctggtttttttcgatgacattttggtttatagcccgagtaacgaagaccacattggacatctcaccatagtactacaactactccaacagcaccagcttttcgcaaacaggaaaaaatgtgagtttgggcagcgccaaatggcttatttgggccacatcatctcgggtcaaggagtggcagctgacccaagcaaggtggatgctatgacagattggccggttccccgaaacatccgcgagcttagaggatttttgggtctcacagggtattaccgtaaatttgtggttgtgtatgcgcaaataacttggccatcctaggagaatttcacaccactcctatgggagttcattcgggagaaatgaagacataccaacggttgaaatctgagattttttgggtagggatgcgaaaaggtgtgccgaaattcatccaagagtgcgccatttgtcaa

SEQ ID NO: 186863 - DNA, 2325 bp, Cannabis indica
cttctttttgttaaagtttataaattacttgagaaataaagaaacagcagagtatttcccaaccttttcatggtgtttctttgagtggtcagcaccagattcatgatgtccacttttatccttcttcttatccttgtctttacttcgatccttatgacgatgcttgtgcttcttatgctctttatccctgtccttgtgctttttatgtttcctctccttatccttcgactcgctctttgacttccctgcaatagtcggagtccctttctctgactgaaaaaaaggaagaagcaaatttaagacttttgaggaattactttggcaaagagaacacggcgagatctctcatccagaatgagaaaattttaatgaagttaatggaaagtcaaggtgacatatatcttacaggtggcaattcaacaagaccagtttccctgagctggaaggcctcttggagaacatctaagtcaaaaggttgtatacgtgcattagtgtctcttgagtacgatgtactctgaataagttgatccaattgcattccgtctcctttcctgatttctgtgtcccccaccacattatgaagatagtgagtatctgcaattgataaaggaagtggcttcttgcaaaaaaaatcgtgttgggcctgcaacttgaagtgacttataagatctacagctccagtaagctccctcggtcctaaatattgaaacataaaattaggacaatatcgtaaaatcaaccatcaagctcatacagatttgcataatcataataagcctaacaagaaaatacaagatcccacaaaaagcaacaatatgatgtaaaataatactataacagagcacaacttgaacacattttaaaaaaatctatgcactcttcaataaaaatattgttacatctttctacaacaaccaaaaacacaaatatctttccatgttgttaacagcttcaaccaaatcccagtccaagaataaggatttaattcaagattaaaatctaaaatgcaaccgaaatatataagcataaccttttttttttttgaaaacaatagggatttgagcccttcccccatcccacacataatcacacacccaaccaaataaaaatttctgcaatagaattgattgtcaatttttggcaaaaccacacttatcttacagagcaaatgcttgtttgtttttcaataaataagttaaagttcacagcaagatgttttgataaatagtatcacttaatcagaatggtacgtaaagatatttagcccataacttaacttagaagttttaccaatagctacgaaaaagcacgaatccaacaagcaatatcaagataacttaaacgaaatgcaaatacaataaatattatacctcttccaaacttcttgtactcagagtccattggtctatctcatgaaacagggagattttatcaactgcagttccaagacacgggaacaatgaaaaaacatcaagcatcaacagatttgaaatttcacaattacatcaagcacattgtacaaaatctgtccgcaatttcttctcagctagattacacttaaagaaagaaaagcatatccccaagaagaggtccaaaatggggaaaaacttcaaccagttcctaatcacctaaggcttttacatcataacagtacattatgtccaacacggtgtcgaaatcagtaaggggcatcttagtggtagccaatatatttatgcagcatgcatcataagaggcaatatttctttttaaatattgttagcaataggctgatcccaaaatgtactttctcaaacacgacctatttacctgtcatgcaattcattttaagctcatttacattcccaatatatacaactagcacgttttggttacactgctaatatttttgccttgacaagacttgtagatgtgtgttggagatcctaatttaataatccttaatttctttcaatccttagaactatctaaacttgttcacctatccaccaaatcttattttcagctaaaaaacataaccttcactaaaatttcttttcaacccaaacattagaaattacatgaaacccggtaaaagattggattaaaagatctaaaggacttccaaaaacacccacaagaaaagactcggactttagccattaaaacaaagtttccaatttcattttattgcacaaaaaataaggttcgattctaaaccgttgaagatttaaaaaaaatgaaagcaaactctcgttttatttcactcatttgcgacatgaacaatcaaagtaaaataaactcgaacgaaaaatcaagaaataaataaaaagggaagagttaagc

SEQ ID NO: 186864 - DNA, 1433 bp, Cannabis indica
gagaacacgacaaacacatataatgtatattgtattggtatatataatataaggtagacaaacagcaatcaaacaataataccaagtaaaaggggaaaataataaccaaaataaataaaaaaataaaatatataatatatatatataggctatataatcatatcatgggagaaaaaaaaatagggaagaaaactctgttaatgtgtgtataaggaaagacgtgtagaatagtaacagagattagagagagaatgtaatctataacctgaacctaaacttacagctactattacgaattctaatattattattaggggagagactatcgacatcgaggttgcacctcaccaagaacttgaccttgaaaagcttgagtttccccagcttgattctcacaggctgcctcaccctaagaaggatggggatatacccaatctgctgctgctgctgctgaacagaacccaaaagccctgacgcgttctgagtctgcccggacagtgccaccaccagcagcgtcgtgttgcgatgcccttggtagaacttaggcagagcaccctccgacagctttgtaccctcgtaccacacgctaatcctgctcccactctcgtagtaaatcccgatcttcttgttaggatttcttgcagtgatcgtcacgtcgaatgtcgccgaaaggctctgatcgtttcccatgttgaactgcgttatctggagcttgtccaccgtgtacttaggcagctttggtcggaacaccaggtaaaggattcctccggctatggctacggctattataagaaaagtgattagggagattatccagcagaggaatctgcataggcagcttcttcgcttctttggtggttttgattgtgtcattggaatggttcggcggaatggagctgggtatggctctgttgtcccggcggccgggtcgccgtgtgggacttagtggctccatgtgggaccaaaggaacctctgccgttgccggcgcttctacatctctagctgggtggattctctgatgatctgccatggtatttgatgtatataaattgtgtatagctatagagaaattggagtgaccaactatagctagttctttagctgctaaatgttatatattaataaagtaaaataagaaatggtttgtaaaatggttgaaagagagtatgtcttatattatatatatagacaatacattgtatatagtattgtattttttatgtatagactacaatattggttcatttgctttctttgactttaatatagtgaaagatctttgtatctagaatatagacacgtattatcatatataggggaggcgccttcagtacgtaatacatataacctgaaattcaacaatgaacgcttttgttctcgcttttctattaattaatctaagaattttgtgatgtttggaccttactttatt

SEQ ID NO: 186865 - DNA, 4241 bp, Cannabis indica
gggggagaaagtggtggtgtttggacagatgtggtagaggtaagtaggttgattagctccaacgcttagaccgatcgagataaatagaaatgacagttgtaataaaattagggtactggaattttttatggaatttagcatcattatattttcgttcagctttctcaggtttgataaaaagctcacaaaagttgagtttgttatgtttatgagctttcttaatttcttatgaattatgatgtgatcatggactatggtagtaagcataaaaaagaaaaagaaaaaaaagaaagaaaatgatgagaaatgaaatattgaaaactgggtaagtcaaccgtggatgaattgtttgcctcttctattgatgcccaacaacaaggagagaatttagggaaagattatacttgaagatggatcgtgatccttacgcataagtcgttatgtatatagtcattaagtcaaatacgattggctgaaaataaaaataaatgtgagaagataccggagcttttactttatttacaggtgatgaataacattcaaggaaaagtattggcattttgttgcacgatatggacatcagtgaaactaaataatataatattcaggtagctgatgaaatgtgcttattaattattagagtatattttgaacaaagttcgaattgtttttattttgttttttaatgactcatattataattagtaattcatgtcaataatataaattgttgcagtgtgttataattgtaatcgttttgtttattacttaatattatatagatggatttgaaacaaagacaatatttttttgaagccttctagccgtccatgacttaacattacctaagcaactaataaagttacatatttagaaggtaaaatataaaggatgagcatacattttgtataatatttaataacttaaatatactaatcatcgagggtataattcggtgattgatgcttcattgattgaaactggaaacccaacacttgttgaatcatccaactttagtcccatggaaggcatatccacatctgttctattgtaaaatgcaggctgttttggtactcccagagtgattgagtaactattaaacataagaactattgtcttcattgttggtctatcctctggatcttcttgaacacacagtagcccaatattgatgcatctcacaacctcattctctgaataagattgtaccagtgttggatccagtaattttaatggatttccatctttccaaagtttccaagcctgtaattacaatgtatacttattaatcaatcaataacttcatacatataatggatatcttattctctttgcattttagaatcaaaataaaattgtaaattttttaatcaaactcacatagctcaggaggtcctcagcataatccgattcataaaaactactgtttcttttaccactgataatctcaagtactaagacgccaaaactatacacatcagacttgagggaaaattgtccgtgcattgcatactctggagacatgtaaccactgccaatgatatgacacaataaaacaatttactcatgaagttaaagaaaatgttgtaataactatataactatatatatcttgtatttttgtatataagagagcactaaagtcgaagaacttactatgtgccaacaattctatttgtatttcctcgagtttgatcaacatcaaacattctagccattccaaagtcagatatctttgagttcatattggcatctaataaaatattactagccttgagatcacgatgtataattctaagctgagaatcttcgtggagatataaaatgcctcgagcaatccctcctataatcttgtaacgtatctcccaggttaactgtccttgtctctcggtgtctgcacacatacttagaaaatgtctaagcacctagctacataagtaatattgaaaataaatttatgaataataagacaggacataccaaatagaaaagtgtcaaggcttttgttggcaagaaattcatagacaagcaacttctcttctccttccaagcaaaatcccaataatctcacaaggtttctatgttcaagcttagctaatactacaacttcattcttaaattctattgcaccttgtccagaaccttttgatagcctcttcacagctatttgttgtccatttgaaagtgtgccctgacaatgaattttaagtattcgttttgagtaactaatgcataacgccaacgtatatcaatgagtaaccacttgggaaatctataccttgtaaacctcaccaaatccgccttcacctaacttataatcagctgagaacttgtttgtggcagcttcaattgtagccaagtcaaactgtaaggactccggggtagtaatatcgtcaaccctcttagctgcacaaccaaaatgtatttcatgcttagccaaattttattttattgttgtttcttccctttccaaggtaagatatgaataaatatagtaaataacaaattattgaaggcatctagattaatctttacccaaagtgtacttttttgctctctttgttaagaaacagaatcctaatatgaataggagtatagcaacaacaattggaaccacaatggcaatgatcgttcgggctgagattttcccttgtcctgggaaaataagacataattaacacttataaattcacatttttttcaaaatagagccatcatatatcgtatctaatctaactaattaatgacaatccaagagagtagtaggcacgtttcttttttcttccaaataacaacaaatacttttttattctacacgagtaaaatagggttttgaaagataaattagcagtcacatagtaacattataaaactcaaataaaaccaattatgaatttaaatgagaccagccattgtggagaaaaataccatttgagctcgatgtgaaacttggaggagccggtgtaggttgtgctgttggtggcggtaagggggttgttgaattttgattgtaaaagggatagacctcgtacctaacattacagctaggaaacagaactcttcccccaagctttccagagcagcatatgggaagacttccgatggcatcggtgagacatgtgctgcaacctgacgcgttcaggtccggtgtacactgcgcaagggtgtatagcctttggaacccgttgaaattgttatctttagttgcgaatttcttgtcccctgccaagccttttgcagcctcagctgccgccgccttggtggtctcgttgactagccgattgaaccggttttggtcagtaatattaccgctgttcagaagatatactccaggacgtgtgtatacggtgccgaagaacgaccggttggagtagcgcaattggcactcgtcgtaccatatcacagtctctttctcaacaggacaccgcttgaggatgtctttgacggcgaacgttacgcagtctcggcatgcagtggtgttgacatctccacggcagaggaagtggccgtatacaggggagggggatccttcaccggcgctggtgttatggaattcgctggtggcattcgatgaaagggaggagagaaggttgttgagattagtttgataaatgctgtttggggcgaaagtggtggtgtttggacaggagtggtagaggtaaacggggttagctccaaggcttcgcccgatcgagatgtatagtaacgacgaaataaacaaaagagtattgggaatttttatgggaatgagcatgatcattttagtaagcgtgtagttttttcagctttgataaaggcacagaaagttgactggttataagcttttccttatgatgatttataagcaagaacaacgagagggtatttcgaagcatttaattactagcctagtaatttaagatagtaattacactatacgataactatatagtattagatgtaagtagtaatttaagatgtaattacactataaaaatataaaatttataataaaaattcaaatatctaaaaatattaaattacataaaaattataatattacaccttaattattatttaaaacacaacttaaaattcataaaaaaaaaatactaatttagtaaaaaaaaatacaaacataaattataatctttgttccaggttcgtttctcatttagaccggaaatccctgccctattaggggcgggtactcgtgaggttccatccccataggaaaaaatgtgcattcctagatataaagt

SEQ ID NO: 186866 - DNA, 6876 bp, Cannabis indica
ttatttattaaattaaaatgttttgtactccactttaatttaataaggataaacttaaggctttttttctttatatattatgatgcaaattcgattatttaaagctagtttatttgagtaataatacattcttattatttggatggtttttttttggtgttgttttgtgtaggtgagatcattagtaggtgatagaatggctcttcttgtacaaacctgctcagctgtaatagtagcatgcacaatgggcatggtaattgcatggagactagcccttgttatgatagccgtacaacccctcatcatcgtttgcttctacacacgtcgagtcctactaaaaagcatgtccaatcaagccattaaagcccaaggcgagagcagcaaactggctgccgaagctgtttccaatctccgaatcatcacagctttctcttcccaagacagaattctcatgatgcttcaaaaagcccaagaaggcccaagtcgagagagcatgcgccaatcttggtatgcaggaattgggcttgcttgctctcaaagcctcactacttgtacttgggcttttgacttttggtacggtggaaaactcattgctaaccactacatctcatccaaagccttatttgaaaccttcatgattttggagtactggccgtgtcatagctgatgctggtagcatgaccacggacttagctaagggctcggacgctgttgggtcagtctttgcaatattggaccgttacacacgtattgagcccgaagacccggagggccatcagcccgaaaagataatgggccacgttgagcttcgtgatgttcactttgcgtacccagctaggcccgatgtgatgatatttcaaggcttctcgattaaaatcgaagcagggaaatcaactgctttagtgggccaaagtggttccggcaaatcaaccattattggattaatcgaaagattctacgacccacttaaaggagtagttaaaatcaacggtcgagatataaagtcgtaccatctaagatcgttgcgaaaacacgtggcactagttagccaagagccaactctattcgctggaactattaaagagaacattaaatatggagcgtccgataagattagtgaggcggagatcatagaagcggctaaagcagcgaacgctcacgatttcatctcggcattaaaggacggattcgaaacatggtgcggggacagaggagtacagctctctgggggtcaaaagcaaagaattgcaattgcaagggccatactgaaaaatccagctattcttctattggacgaggccactagtgcccttgatagtcaatcggagaaagtagtacaagacgcgttagagcgcgtgatgattggtaggacgagcgtggtggttgctcataggttgagtacaattcagaagtgtgataccattgctgttttggacaaagggaaagtgattgagaaaggtactcattcttctctgttagataaaggtcctcaaggagcttattattctcttgttagccttcaacaaacgccagcttccaccactcacgcgctcaactaacatattcagcccctcgtgtcatctacgcgctggtaattcactacttgtctaattttactgtattttttaagcccttttgaagtaatgggtggaaatgtacagtgatttagtaaattggtattattgttcgagaactttcaaaggaggtttatttagtaatatatatatatataattttgtttaataataatatggtctgtaattgtacgtgtactgaaacaaagtgtttcagaatattgaactgtgtatctgtgactgtgtatatatatttataattaatatcttaatgtatgtttatttctctttattttaatttaaactataaagccaacattattgctaacaactgagtgggtactagtactacattatcttctatttctcaggactaaagcacccaaatatcattaaggatgttacctatatgcacatatatatatagataagtacttattatagtcaaacaaaactcattattcttgctgttcaaaacttgcatacagtataattttagtgagaaagaagagattttgagctgccccacgaagtgggcacctattgagtgtactattgacagttttgttaatgtagtagtttagctagtttgttatgttgtttgagtattttcaaactctttattatttagtaaaattttagctaaaatagttcaaatattaaaatagagttatttttttttaatgttactctaactattttctctattttaattaagattgattattttaatagtattttttaaggtgaattagttaaatatgaattaatttaataaattaattaaaaatagtagttttttaaaatattattaaaaatatttggcgaaaaaaaggagccttattcattctctcatagagagtgaatttcaataactttggagttcatttttttaaaaatacactctatattttagctaaaaaatatatttagaaagcatggttagaaatgcttagttttgttgattttgttaagcttatattattctatttctcttaatgctcattctaaatttctaatgcattagtcttacttgtaatgctgaaagacagtcttttctttcaagaaccaagcaccaccttctcatgaacattgtaataacataaataatatggcctttatgtgatttacagaaatgaaaaataaaattacaagtggtacttcatcataaaaagtaaatttttaagagattaagaaagaaaacaggatggacaattatagaggccatggtcaaatcaaaagggtcattgacagttctatgcttgatgatttgtcttacaattggacaccaattaagatgcatggtttccttatggaaaacttgacatgatccttagtaattaatatggagtgaatgctggtattttccttgcatataaattttgttacttggattaatagtggttggttctagaattcgggaacaactatagtgagaagaatttggctaatgtataaaagataacatgaatgaatgaagtatatagaagatttggtatcatgccatttggtactgtccaaaattacaaagccaaactgatatggaaggattgtgtatccactattggcattggcacaacatggccatcgacgagttcagcgacaatggggggttttgagatgcaagtggttggtgctcgagacaagggcgccaaagatgcctcagttgatgcgcaataccactcaaatatggcatttaatgtcccattcaactctccattcaacataaaaccccaaactaaatacacaccagtatgccagcaaaccagtggacataacaaatcgcatggagatattgagttgtcaatatgggcttcggccttagcccaattaccaatctggtgttggaccaaatgagagttcaaagcgataaaggcctgcctctcacagaacatgtgtaactcatttaattgataagtacattttgagtactcaaacatgctcactctgcaattgcaagaggataagtcctcccccttaacttcactttgtttggttgtactacttgtattgtttcatctgaaaaacaagcgtttttatagtttgggcccgaactaagaagcccatccaaaatcttagccccaaactaaactcaaagtacactaaatatagcggcaactgggtacaaaaccccccaacacaagctattcctcacaacaatttcgaattttataattttattatagttttaatatctacaatttcgtctttttaacactatgtttccatgttttactaatttcccattttctatttttaaccgaagattaaaactccataaaaacccaaattttcttttcaaaattgcttaaatatatttttttttctcttaacgtactgagccatagagatttgatactattcattattttcgcttgtttcgtcttctgtgggcgatcaagccctttcttttacttattttattttctctccggagatctgttcggcttattttctcgagaaaatatctaaggtaagaatttatgcttttgttaatgaatgtttattctatttgtcttgttctgagcgattatgatttgttttctgtgacagaaatgaagcgaataagagatgatgtttacgttagtgctcaattcaaacgtccttttggttcttcccgtggggactcgtaagtctctatctctaggtgtataattttctgaattgcatgtttgcttaagtttttgtttggtttggtggaaaatgtttgttaatgtaagcctattgagtgtttttttgtttggttttttcattgtttacccttattgatgaataaatggttacctgatctttgtaacttgagatttataacatttgattgtggtatttttttttttactcacatgtttgggcttttctcttcaaattctttggaaagctttctggattttgtttaaagctgttttaatttttttttccaattttttttatttcttttgttgagttttacacgaattaggttggtgtggtttcatcgaatttgtttaaaattgaacctgttaatgagtgatccatattctataccgtcggtaacctagttttttttttggaattttagatttaatagaacagacatgataaagtaatgtataatttctttggatcagtaactaattgtgcaaaaggtgaaatgttgcatttgttattggtttctggaaataaaagtttaaattaatatcatgttctagttggcttgggttagaggaacgttcgttatgagcgcatggtattagagagaagttgagtacagattaaatatgtcattggtaagtatttatttatttatttaatgagtacttactcatcttttgggtgtgaagctatgggcagtcctcagtctcaggaccaggagatgggggagggggaggggtaggaggaggaggaggaggaggagggggaggagtagttggtgttgatgttgggttgctgttgatgttggcgttggtgtcggtattggcggcggtggtgttggtgtcggtattggcggcggtggtgttggtggtggcagcaacggtggtggtgttggtggtggagggcctgtggcagcagctgcttctcagaaacttacaacgaatgatgccttgacttatctcaaagaagtgaaggacatgtttcaagatcaaagggataaatatgaaaagtttcttgaggtcatgaaagatttcaaggcccaaaggtttgctagtttcatctgtcaagcacttccttttgtgatgtgaactgtttgctgccattaactgccaatcgattaatggctttgtttatgtgtttcagaactgacactactggtgtcattggaagagtgaaagagttatttaaagggcatagcaacctaattttgggatttaataccttcttgccaaaaggttacgagataactattgatgaggatgatgctccaccaaaaaagatagttgaatttgatgaggctattagttttgtaaacaagataaaggtgaagttatactattacttgtgtttcagcgttcaatttgcaagttcagttgccagttgtttaacagatggatgactattttgcagaagcgttttcaaaatgatgaacatgtgtataaatcatttctagacatactgaatatgtatagaaaagaacacaaagatattaatgcggtctatgatgaggtaaaacattttgttgtatcgattttatttccactgcaataccttcccttttgttcttcatctaaagtttatatttattatctattctcttttcaggtttcagctttatttcgtaagcatccagatttgctagaggaattcactagatttttaccagataattctgccacagctacacaacaacttccatttggccgtaattcacttccgcgttttaatgaacgaagctctgtgtcacctgccttgcatcaagtgcatatggagaaggtaattgcacttgtagaagatatttgctattgccttagcttcctttctgtgtcaaaatttgatggattcttggtggtgctgaaatttatatctttcttagcagcaacgtcgacgagataggattattgctccccatgcagatcgtgatcttagtgttgatcgtcctgagttggatgatgataaatccctaaaaatgcacaaggatcaaaggaggcgtgtcgaaaaggagagtagagataggagaaatcgtgaccatgatgacagggaacctgagaacaatagcaataaggatttcagttaccagcgactcccagacaagaagaaatctgcaaggaaggttgaaggatttggagcaacggccaatattgcttcttatgatgacaaagactccttgaagagtaagtactttctgctctcatttatttttttttctttttctcattgttgcattttcaagtggtacgagtcatccctacatctttccatttttattctccctcactgggttttttaatccaatttccctcactgataatgcattgcacgagtatttttagtttaagagagtttgagacatttgctgtaattgattgggaaaggattctgatagatcttatgtgagtcaaatgaagcctattgtgtagtttagtgagtagttaattttttaattatttattctgaaatggggcttcatgcctagccctacaatgatgaaatagaaaactgtaactgttactatttagggtgaatttgaactttgttaggttttgtgtcatgcttgttgtatcctgttagttgggtatcaactgtatatatgggtagatagaaggagatgaaagttaggagctttatggtcggattctggatttgggagaactagccctctttaagtacc

SEQ ID NO: 186867 - DNA, 4088 bp, Cannabis indica
atatatatataagtaatttaaaaaaaacaaataaaataaagaaccttcataaaaagaaaaaaaagaaaagttggtcagcaaataggtaagcaagagcgaagtgtgttatgcaaggagtttgtgggggtgtggtgtggccaacacaatacaaactgggtactgatgttggcacactgtgactacccctaactaagctcatggtttttgacttttatgctacaacattcacaacataaggcctaaatataatcatattaatgactgagtgggtggggcatggaccatggtcggctctcatttacttaatctattttcgtacaagcaaaattttataatattaattagaacaacttatgagatttaaatgaagagcattgtttttcggtgtcaaagtatattgtaaattgtaaaatatttattttcacttatctaattattgccatactaattgtctaaaagttgaagcatatctatttagataactgaacttaaataaattaaattatacaccaattcatttaagatgagtctcaagaatcattgatcatttctttgatcgatgatggtatgctctataagtagtttgattagtcacttgttcgaagtaatatagccaaatgagcattggcactcttattcaggaattattcttcattttttgatctctggtgttatgctttgcaatatctatcattggtctggtggtttaacatataatgaattttcattagaaaaaaaatgtgattcgttatataagtgtataaagtatgtgtcaaataacgtatttatattgtatagataacattatcatcaaacaaccaatatcagaccattaataatggcaatcattatacgaacaaaaaaaaacggcaatcattatttactgaatcaatgatagaaaccaaaaactttcagttttgttttttttctttcattaacaataaaaactgtgtgcttggcagtgagatgagaagggctatatatggattaaagagtgggatttagtcccacatggaaaattgagagagattagtgtaaaaagtgagaagataaaataaggataggatgaaatggaagaagcatgatccttcaggcagaaacgggatatgatgagtggtctaatcttgctatgtatgcaagatgagtgtctgccccaaagcctgttacgacatggggcactcatttgaaccatctgatccttattttaattcagtcttaaaaattaattttaaaaagtgtagaaaatggagaaatttaattttctttttaagagaaatgctaaaggtataagtggtgtttagtatttttttcatgtgttaatatcgttatattaagtattgggttctatataatttaatataatagctgagtgctagtcaattacaacgcgacatatcacaaaggtgctaggcattactggtgtgctcttttttttaatattaaaatccattagtttttgagagaaaatgggtgggaaatggaaaaattcaatttttcatactccctagttttataagttaatttttttattattattattagtttttacacattttttgttggctatatttcttctttttttttttttatttcttcattaaaatttaacttttaaaattttgacattttttttctttagaggattgagagattcttgactctttattttcatttttattacaaataagtacaagtgaaacttaatttatttttattagtacagtaaaacaatgatgttatacctgtcctgtcaatataaaacaaactaatttaatttttgacaaagtttagcaacaatcaatatttgtacatatatgtctactttcctagaaattcttgagaaacaaaattcaagtgtctcactcaacactcaacagtcttttctagaaaaggaaaataaagtttagcttacatttattttaatgtctcattactcttaatatatatgtattaaaatgtatagacagaagatctagttgtggagaatttggtgatcaagtaatttagacctgattttttacaatataataatttgatacaatactgaattgttgaatatctagaacaagaagttgtcttatgacatgcagatttttagataaataaaaaagtaatgagttgtgttccatagatataattagatttatataatatgatgctaaccaatacacatgtcaccacacaatttccagtccatgatgctacccaatacacatgtcaccacacaattttcagtccaaattttctattcttattaaataggagtgttattttcaatcttttattataattttttagtaaatttttgtgttcgaaaatgtatattaaaatattttattttttaattctttttttatagcaatgtttgttatactaataatattattcctgtaatttttatattttaaataatctataatatcgaaaaaatttaaatttttttaactaggtataataaattggaataataagatctttgttttctatactataaattatttaaaaattttaaaaacttattgatattgtaaatataacaaataccacaataaaaataaacttaaaaaaaatatttcaatatgtaatttcaaatatagaaattgactaaaaaatttatagttgaaagttatagttagcactcttccatattaaaatcaagagaaaaaaatgttacaaaagtcaaaacatctagaagcggtcaaaaccatgcatttggttttcctgatcattaaaaagaaattataattaaaaaagtttctttggtatttttccaaactaactttaataatttttcataatacaaattaagaagaagccaaaaaagaccacaccaccatgaccaagctaggctagcttattatttctctaagaacacatcaaccactacataaaaaataacaacttaatttctatcttcatagatgtttctagttattatctctatatatataaagctctctttcaaatcattgttgtagaagaagattgagaaaccagaaattaataagaagcataataatatccaaagtagtgatcaaattgataatggtaggtgcttgctttattccattcaataataggaatttggatataagcatctttgcttttaggccaactgtggttttggttggtgatcttattgaagcactaaagcatttctctttgtctactgagactcttggttgtgttcaaagttctttacttcagagcatccatggaaatatggtaatatatttatttatttatttatatatattcattttgggttagctttacatgatcatatatggtaaaacaaattagtgtaatgtttatttataatgttttatatatgaaagaatttatctgttatgactatttcagattctatggtatggtgcatggttgaagaagtcttgtgagaacaaagaatcactaattgcaacccttgtaagttctttatttagttccaataacaactagatgtgcattatggtacattgtagtaaatttcataaaaagacacatatttcatatatatttgattcagacacatattcattcatttgtatttttgttaaaaaataataaggtaaatattattttgaattctgtgttttgtaaaagttacaaatttgacaatctgttttgttaaatgacaaaaatgatcctgtattttttaaaatagtataaatataggaccttgagcttaattttcaatatttttttaatataaccaacttgaagacaatttctaacacaaatagatgcagaaaattttatcagttttgtcataacacctctagattacattattattaagttttattttaaccaaaattagttcaggatattatttgtactattttagaaaatacatagtttattttgtcatttaacaaaacaaaaagtccaatttataatttttgtaaaatacagggtctaattaaaatgatatttacccaaagtaataactaaaataaagcaatgaagatcttatgtttctccatagattttgtaatgtcaaacaaaatataggcattttaaccattttgtattaaggagagaaattgtacaacaaaatgttgcttatttattctttttttttt

SEQ ID NO: 186868 - DNA, 2415 bp, Cannabis indica
cttaaaaatcactataaaccgcgttgttgttgtgtttcacaaaattaaaaataaattttatagtgtggaaagcaaatagagtactaattaattagaaccaaccaaaaaaagactctaaacctatatatatatatagtttgattcctttcttcattcatggcggtttaattatataccactgtaccataattttacattgatgtagatgatcatgatcgtggaggaagacttgctttgattacgaagtttttttgaagtgtttagtctctttcatctttctctgctacaaatttcacctttgtcttttctctgctgcttttgattttagtttctcttccgcgttaacatgtcaattcactgagattcccctcaaaatcaacgcgtccgagagttcgataaaaaacttctgcctcatttctcattttgaattaataatacattgaccgaaatattgattgatttgattgatttctcaagaaattttcgatgagggattttccgaagcacgagcgacgttgggcgtctgattcggttcctgttaaatcggcggtgagtgctggatcatcgccgggatacgattccagttcgactgcggcggaagaggagtttgttgaggttacgcttgatcttcaagatgataatacgattttacttcggagtgttgaaccggcgacggtgattaacatcgatgacgcaatctctgtcgttggtggtgccggaagtgaaactccagcttcggtgtcgagatctccgtctacgtttaggcggagctcgtccagtcggcttcgtcagttttctcatgagcttaaagcggaagccgtcgctaaggcgaagcaattttcgcaggaactaagagctgagctaaagcgattctcgtggagccaccacggtcacggctcgcgtgtgctctcggcggcggcgtctacatcagctactcctcaaaatggcgttagtgccggacctggagctggattcgactcggctttagcggctagagctttgaggaaacagcgagctcagctcgatcggactcgttctggagctcataaggctcttcgtggattgaaatttatcagtaactgtaagactaacagagtcgatgcatggaacgaagttgaggcaaatttcgaaaagctctccaaagacggttttctctatcgctccgatttcgccaaatgcattggtaataattatttttaattgttattttcttaattacattttcatttttttatatataaatttttatttattaataaataaaaataggaatggcgaattcgaacgagtttgctctggaattagttgacgctttgggaagaagacgaagattgaaagttgacaaaatcagcaaagaagaactctacgagttttggtcacaaattaccgatcaaagtttcgattccaggcttcagatcttctttgacatgtatgcattaattaatttaatcattattacaaaaaaaaaaattaaactatttcactaatctaatctttttcagtgattacgtttttcttaattattatatatatttaaaatgcaagcacttatgctcaacgacgtaggggcaaaaccgtcttttcatatttactaattatgtgttttttcttgttattgatgttgaagggtggacaagaacgaagatggtagaattactgaagaagaagtaaaagaggtaaattaactaattattatattataataattaactaaaaaaaaagaaaaaattgttggacttttttatttttgagatgatgtgtgaccttactcttcattaattagtgagtattttttaaggctgctgcttgattagttatattaattaaattaatgattattgtataatatgcatgaattagccaacttgctttctgatttaaattattttatattaaagaataaataataataataaaaagaagtaaatatatatatatatatatattgagccgacccttcttgctagagtgaccaaaagtgacactgagagtctttaatttttgcataatcttcttcgattatatgtgaccatctttaattttagtctacggtaggcaaggattgggtgaccttaatccatgagtttgtaaaactaaccactccctcaaatattataattatattttaattgataaaataattaattaatttttttgttgttttcttggtcttataatgtttgccatgttcttaagcatctttaatactattattagatgtaatattcaagagttagtgaactaggactcttgaacagagaccctgggctttagacaggtggacacagtgttttctaattttacccaaaaagttttgtagaaaatattatgacgatttttttagtggggttggtgagagggccttttcgtaatatcatgcaattgcttcttcatctcttattttctttttttttt

SEQ ID NO: 186869 - DNA, 2030 bp, Cannabis indica
atagtggcctcaatgaatccaatatactttaattctcatgagataccatacttgaaaatgcttcatcaagttgaagaatatatttgaaaatgtggggcctatatattcttttttgcactttaaatatctaattaccaaatatggcccatcgctctctctttgatacaattcttcactttataagttcctttgattatttattgaatgcctacttttttttctcatggctttaaatcattcccaaagacccatacccatagaggaagcaaaaacaaacccatgtttattctaaaattcatacaaaaaccaacctcatcatttcatgagttcatgatttttactataatatgagaaaatatttggtaaaatagaagtccactcaatattacatatttataaatatttatagactaggccttctaattggtccagcatatcttttgagctttttatgcatcataattccctccactttaattataattgttattaatataaaaatagtccaatatgccaaacatatcttccttaaataaatgcacttcaacttcttgtacttgtactctccattcattaaaaatctcaacaaaaaaaagaaaattaagatatctttgattaagattcaattttttttttttaaattttcattctccttacaacaacacttccataacaaaattaagaagccaaaaacaagaatagggttagtgttgttgttgttgttgttgtttttgaacataaggggaatttgaagaaatttacagggatgattaaagtgatgggacatatattatatattgattgagattaatattataataaagaaagaaatgataagatttgatgacattttatgtgggacaacaagacctcattactatatattatagtagggaccaatttgttatgatgctggttaaaaccacacttggtttggttagtggagaggtgggagctaatgaagtgttaagcattcccattaagaataacgtggaaaagatttgatgataacccaactagcaaatgtttccgccgttacctctctaataatataaatatatatatttctataatttatatatttattatataataatataaagtttcggctctatgcagtggctttctaaatctaaagctagccctatacaatgatgagtagtgtgacaaggaatagtccaaaatagaataaggcagtcccttatatggggttattaattaagaccagtcaacttaaagcattaaattcctacttgacttaagagagccttaaaaccaaaatgtggggattttgttggacactagaggaggagggtgggcatggttgagccggcgtggacggcggggcacatcaaactaggaacttgaaattggaatggaacaacattatttttttcttttggggtataataagatttacctaccaaagtaaagagagagagagagagattaaaggtaccctttgagaggggagaagctcatcaatttcccaagtccaaaattcacattaatatctctataggaagatagatgaggaatagtaatagtattgtatatagcatagagcaacccccacctttaaagttggtagcttctaagaactatagccgtcaaaagaagagggaccccaacacttaaaagtgggataagtgaccttgttttgaaggacatgtgccctaagtttaagcttcaaagggaaacttcatttcatacaaattacaattgcttagtaataaagattaagagaacaaaccttaccaaaaagaaaaattttaagaatgatgaaaaacaaatactattcttgtataaaacgatattatcactatttatgtgtaacatttaaatctttattgtaataaataatttttaattgtgaatgttaatgacgtaaataactaaatttattattttttttactatataaaataataaaaaaaaagtaaaagttagtaacaaaaattaaaaatgaaatatttatacggccaatatcacattcgaaagctaaactatcacaatctgtgttcatttca

SEQ ID NO: 186870 - DNA, 2196 bp, Cannabis indica
agtatacgattgagaggtgtacaatgtgaggaagtgaaattagcaaattaaccctgttgttacacagaacatgtttatagagttgtcttgatggtcatttaataatttattttttaaagttattatttcatttttactgagcacttgtaaagagttcatattagttcatgcctgaccttgctaatttcatcattttgataattgtacactttggaaaatctcagcatcattgccgaagatgtgggggtttgttctgcagtagttgcacccagcaaaggatggtattacgtggacagggcgattcacctgtgcgtatttgtgaaccttgcaaaactctagaggaggcagcacggtttgaactccgccatggacacaggagcagagttgggagaggtaggcctttagatgaactcagattgctagttgaattgtcatcccgtgagctaggaactctttttgttgggtcattcactgtgtggttgggtcacaacaagtgccaagtgctttattcttgcatcttctatattgtcttcaattcggaatttctaatttacactaagcccattacgtttggcaccattgccccatgtagtgtggtcatttccttaatggaacctcttttcctatttatgtctatcattaaatggctcctcaagatatcctcatttccttaatggtttatgtgctctcgcatttagtttttgaatcgcggtgttaatatgaatccacatgttcatcacttacataatattactttgaattgcggtgtcttttatgcttgtgatcattcccatctcataaaatcttttctattttaggtagtttaaaatcaacatcaaagtccgagaatgaagtctcaaatcagattctaaatgatgaaaagaaggaagctcttgcatcgggacttggttcaagcagtaaacaattggtgtctagtcctcaaggagcagcaaggtcaaataccgaagttttcaatttggacggggagggggaattatgtagaagtcaatctattgatgagtttggttcttcatcgaccgagaaggaagctgcaagtcctgatgatttgcgccagcaagctttggatgaaaagaagatgtataagcaattaaaaggagaagggaaatctgatgaagcactaaaagcttttaaaagaggaaaggagcttgaaaggcaagctgatgcgttggagaaaaatttaagaaaaaatcgtagaaaggttttgctttctgggaatgccgaggatgttcagattaaagatgttcttggtgagtctagaaaaaggaatagggttggtcattctgagggtaaagagaaagatgaccttgcggccgagcttagagaacttgggtggtccgatatggatctgcatagtgaagacaaaaaagtaacaaatttgactttggaaggtgaattctcttctctcctaggtgaagtctcggtgaagggcgccggaaaaagtaagggtgctaatttgatagacaaaactcaggttgttgcacataaaaagaaagctcttgcactaaagcgcgaaggaaaattggcggaagcaaaagaagaattaaagagagctaaagttttagaaaaggaacttgaagaacaggaacttctcggtgaggctgaagattctgacgatgacctttcggcattgattcgtagtatggatagcgataaacaagatctatattctgatccaattgagcaagaacatggttttgattttaacagtcttttaggtgctgctgacgatcagattatcgatagtagtcttgatgtgacggaagaggatatggaagaccctgagatggctgctgctttaaaatcattaggatggagtgaagattctgttaattctgatatttcatttgacaaggaagcgctattaagtgaaattttatctttgaaaagagaggctgtgaataaaaaacgagcaggtaatgtttccgaggcaatgaatctgttaaagaaggcaaaactactcgaaagagaccttgaaggctttgagcctcgaaaaggaaacgttgctcatgaacctgcaagagttcaaaaagattcaaatgatctaaatgctcatgcagctaaagacacagattccaaaatcgtacccaagagtaagttaatgattcaaaagagcttttgggattgaagaagaaggctcttgcgttaaggagggaagggcggttggatgagtctgaa

SEQ ID NO: 186871 - DNA, 4432 bp, Cannabis indica
ctctctctctctctatctctctagtatataattataatatctattagtttagccaaactctttagtcttgactctctcaccagattggtttacacattttaatgatatagcaacatcttcctgtctctcctgagctgtctttccacttgttcctcaaggaaaaatctcgtcttggatctgcagagattcctttttacaaaccggttttgcataggttttagtttctttttaggaaaattgaaggtaatgttaggtgttgctggttaaaaagaaaagaaaaaactctgggttctgttctgtgtttcgttgttgtaacttgtaatattagtaaaatgttaatgggtccctctctccgttttctttaggccctttgatgggagacactgttttgcctgatttgtttctatgaaaccaaacaaggttctttctttccactcattgggtttgtgatattgtcttctgggtatgttccttttccctgttgcggattgaaaagttatagttgttttggggggaaacccgtgaaatactcaaaagcttacttacttcatcagaagttttgtctttaatttgtttatttccttggcgggttttcaaggaagataaagtttattgctttgagctgtagctagcagaactaattggattttcagagcaattgtggagtagattaacttgattttggctgtattggatttaaaagaatgaataatgcagtgtgcttaaattaagctgcttgtttattacgccattaagagcaggaactataggagggcaagtcaagattttcttggtacttaaaaaattggatattgccgtcagaggaagtcaaggttattgaggtgtgtgaaattcttgagttacccgagaataccaagcacattcaactgcaaatttctgatattactgatttttgtgtcagaactcacagagaagaggtatatttctgagttaggttaggtgtctgaaaaattcctggtatagaggttgaggtttataaatggtcttgagaattgtaaagcttcaaagactggtcccaacattgtggaataaactcaattatttgtttttttagatggagactgataacggtatcatctggttttaagaaagtttgagtaagaggagagtttaattttgtgaaaatagcgaattaagatggctgctaagcttttgcattccttagctgatgagaatccagatttgcaaaagcaaataggatgcatgactgggatttttcagatttttgatcgtcaccctgttcttactgggaaacgcattagccccaagagacttcctccttcaggtattttttctttccatctgtgcttaattaaactactgtacttttcataaaccttagttttttcttaattgctttacccttttaagctagcaccagtctcaatttaatgaaattgttaatgcttctcccaccaagttctttcattttttatcttcaaactttgcacttagattagcattcttttccataggtttatatgaatctataatttctgcctttgctcagattttttttttgtttttgttttttatatgatatcccccaagattgaaaagttggggagtcttcaggcttctaaagtttgcgctttcattttttttataggaaattccagtttaagcaacagtactctggaaagacagcctaataatttgcactatcagcagacttcaggagtaagctattttatcattactttattcttatactcttttggagttgtattatggttattttcagtccagaacagtacaaactaaaaaaaaaataaaagaaatggaatgattcaatttcatagtcataacatctattatggttacttgattctttagcatacacaaatatgtactgaaccttttctgcttgttattttaggaagtgaattcaaacaagagtgttaatgaaaagcaaagattttctacagaatcgtcaagagcctctgtctcatcctcttgttcatcagtatcatctttggaatgtaacaaaacagctcaactggaagtttcttcatttgatcgaattattttccatgaatcttcatcaaaggatccggtgaggaaccaatcaagcacctctccgcggttagggaggcagtcccttgatctccgagatgtggtgaaggactctatgtatagggaagcccgggggttatcagttagaactgcaaccaaagaggaagcagcaggaggtcatggagtagagcatagagactccccaaggccctcactgctttccaaacatgtggatgaatctaatggagtaggaattagcagaaaacgaaatacaccagttgacctgaaggagtctcttaaagttcttgctaaactgagagaagctccatggtattataatgattctagagaagatccaagatcatcaaacaagtctaaagatggttcgtggcactcagcgtcaaaggatgctcgtcgattttcatgtgatggaagagaaacaaatcgtctatcatttgaatcacgagattccttcaaatcaactgctaagctaaaagagtcgccgagactttcattggatagcagagaatgttcggtacgaggttccaactttgattcaaaactacataacctttcaaaaattgccaagagtagtagaatgttgaatgataaagaccctagtttgccggagtcatcaggatctcaaaaccgacctcatagtgttgtggcaaagttgatgggcttggatgcattgccagattctacttcagctggggatgctcagttgggtttgatcaaaacatttctaactcaagatggtgatttgtccacaagatcacttgcaacaaataatcttagcaggcctattggagtttcaaactccccaagaaacttacagaaagagccagcatcaccacaatggaagaatggtgactttgtcatgaagcccatttcaagttcgaggtttccaattgaaccagctccatggaaaatgcaagatggaaataaaagttctcagaaaactagttccagacctgtaaaagtaccagcaaggacttcaaactccttcccatctgtttatagtgaaattgaaaagagactaaaagatctagaatttaaacaatctgggaaggatctcagggctcttaaacagatattggaagcaatgcaatcaaagggactgctagacaccagaaaagaagaacaagattctaattatggagctgaagggcaccatgaaaatgttagtcacaatgttaatcaaaggtctgctgaccaaagatattcacagagtacccatcttaatggctcctcacatagagggcctggttcctcaaggacctttgaatctccgatagtgatcatgaaaccagctaaacttgttgaaaaatctgttacatctacttcgtcagtagtttctgcggatggcctttctgagatcaataaatctcataatggtgaagctgtagatggtaaaaaggttccaaataacaaccgaacggctcctaaggtcaatcgtagggatgctgttgtcacttctgttgacaagagaggaagtgccaggaacacaaaatcagctcagtctaggtcccaacaacttccaatagaaaacactgcaacatcagtgaagagctcagcatctgtgagcccgagaccgcagaagaagcttgagatggagagacgaagtcgtccaccaacccctccatctaattcaaacaagcctagaaggcaaactaacaagcagtcaacagactcaggttcaccaggtggaagagccaggccaaagtatcataactcacaacaatgtgatgatcaactaagtgagataagtaatgaatcaaagtctttgagttgccaaggtgacaacatatctctgcattcagaagacaatacgcttctggactcgaaaacagacgtcgaagtcactagtgttctactatctgctgacatgaattgcagtctcagtccatccatgaaggttgccaaatacttggaatctggctcaatacagaaggtataggttgccctttaccttattttccccagttagttttatcatttacctgtcaatttttttttttccttgtctcagaaagcaactccaaggcttgatgaagaagattcatttgcagaacttgccacagtcgcacccgaacatcctagtcctgtttctgttcttgatacctctgcttacaaagatgataccccatctccagtaagacagataacatctgtactcaaaggtaaatttatgatagttattaacaaaaaaaaaaaaaaacaaaaaaacaaaaacaaaaacaaaaaaatctcattttaatatggtattttatttttttggggtaaaaaggagtagagtagagttctgtaggaaacaaaaaatctcattttaatatggtattttatttctttggggtaaaaaggagtagagtagagttctgtaggaagtcctaat

SEQ ID NO: 186872 - DNA, 1815 bp, Cannabis indica
cgaagaggactattatctaacacattctttgtcaccttctcgagcagttaccattgatatatatgccatgattgatatattatacttggaacgtaatgtttagatttaatatctaggattttgagttctgggctgagttgagcttaagatattagtatcttatgtgtaaatattgtaatggatgttttgttttgttaccttgatgtccctccgccataagtgaggcttcctaaaattgggacatccaagaggttagtcgaccgttatctctttctcaagaaaatatatgccttgtctgaaagatctctttttcactatatgccttgtctgaaagggtagggttactttcgaagttcctggtacaaatcttcagctagtgtctgttgatgattacaagtgactgtacatcaagagaaggaagtaatagcaaaaagaaaaaaaaatctgcatgattacaaattggctgatttaattcaatgaaaaatgggtttctcttggtaccttaatggggtgtttattatgtgggttagacttggagggagtaaagttagagggtgcttagattaagagaatatgaaacttaagtgttggaggggttaatattaccatcgattaaacttaaaaagtaagacccacttggaaacataaacccattgatctttaaaatgtaatttatcaaacatgggttaagtttgacattcccattcccatttccatcaaatctaaacttttaccaaacacaaataagctgaactttgctatccaatatggccatattatatgagacgcacctgaaatttatcttgttctacttggtggctattttgttaaactaaaataaaattaatctcatatttgtttcaggtatttactcaaaattcttgaaagtggtgaaaatgtccgactgcaatatcgctctttgagaaagatccagaatccgtttggtatcgaggaaagatgttcgtcacagcctgttcagaacaacagctcataaaaacaaatatatcattcagccctaaatcctctccaaatcttaatggtaagatatggccagaaattcctggtaattggtgtattaagtgatgttgtaagtttgatattgtattttaatgtaccttataagtgttttgagagatttgaattgtagtcatttttaggggagttctctgttagacacttgtaaatagaagcagtaaggcacattgttggcagttgtggtctaacattgagacctacaatttgttttctaaattaatatatatattttttttcttccctaattgaattatccaagtagactatgagcttcttcaacaaagagttctgaatctgatccttgtaaagttgagttaaggtgtaaagtatgatttttttttcttctttcttttgggttaagttttccaatcctaccttttataagcacatctgaatgtaaactattcatcttcacaatttaatttcttgtaaaatttatatttgtatgtagtccaattttaatcctaagagattgcgaaatgctttgaagaaagactagtcaaacaaaaatggggtaactacgacactaaaaggcatattctttattattttcttatataattaagaatattcactttaatattaaactatttataaaattataacaaaattaattatattggtaaaaatattacaaaacaacacacattaaagataataatttaaaatactcgatccacaaatgttcaattaatacatttcgaagtttattgtgtatcacccaactttgcacttcagttttcattagttgcattaacatcaccttcatccttcatgcac

SEQ ID NO: 186873 - DNA, 1121 bp, Cannabis indica
aacagaatttgttatcctaatagttttgaaatggaaataacaaaattaatgaatgtgaagtctcaagtttatgacttatttataggttgtatagttctaattgtagtagaaatagttcaatattaaaacgccgtacagtgtatagttgtattagtaattcacaaatattttattgaaattcataataaatataaaaatactgcttacaattaaacatgtctaattaaattcaaatattagatgagtcggtcaatcctagttctaatagtaataggacaagaattacagatataatgatatatatatatatatttctcttttttttttttctgaaatagaaatatatatttttaaattgtaaatgtgtaatatttcaaaaatataaattcacttctatattctatatttgaaatggtacatgcatcatgcaattttagttgatatttcttttacaatataccattttaacattattattgagtgttatattaatactagatatttacgaaaagaattacaaaaattaataattttttctttttaaaaaaaaagactattacccaaaattaataatttaaatgaaaagacaactgtaaactactttgatattggtaagcatagttgatagatcaaaataatacaatacttatgggcaaaaagattgagcccattaggtgggatggttattctactgggcttcccacccattttccaaattgtgtagtcttgttacatgattaatgatggtcgacttcgagtatttggtatttttggctccttcaaatttcaaagttaagaatatattgctgcaaataataataataataataataataataataataataatttatttattttattacaaaaagatattaagtagcactataacagagccaaaatgggtcgaccataacaaccaattaaaaaaaattaatataaaaatattctgacatggtgccaactcttggaatgacaccacacctgatgggataagcacttattattattatgacatccttattttttaaacatcggagatcctattatagggaacattgttttccaatttttttttaacaagattacaacatctttcacattagtaggaagtatttatc

SEQ ID NO: 186874 - DNA, 2715 bp, Cannabis indica
atcacttatccattagaaaaccatgataaatgagtctagcttaacatagtatattttgacttatcatgactttattaggcctacgtgacacaagatgatagtttaatgaccacactaacagtaagagaggctgtttactactcagctcaactccaacttcctaattcaatgtcaacatcagagaagagagaaagagctgaggcaacaatacgagagatgggtttacaaggctcagtggatacaagaattggaggttggagtgtaaaaggccttagtggtggacaaatgagaagagtaagcatatgtatcgaaatcttaactcagccaaagcttctctttcttgatgagcctactagtggtcttgatagtgcagcctctttccatgtcatgagtcgcattgttaagcttgcacgccgagatgaacgaactgttatcgcctcaattcatcaaccaagtagtgaagtttttgagctttttcataatctatgccttctctcctctggtagaactgtgtattttggtcccgttttagcagcagaagaggtaatttctaacaagaagttggccatacattatacactgtcaatgagtgccttaattttattttagttagaaattgagtaaatagtactaatatataacttgcatttgtagtttttcacttcaaatggcttcccttgcccatcattaagaaacccatctgatcactaccttagaactatcaacaaggactttgatgttgtgagtgctgcaatttgtttttttttttaatttaattttcttgttcaagaatgagattgagcacaaaatataagctcatagactttaaaaataactctatggctgatttgttataggacttagaacaaggttgctgtagtaatacaagaactgaaaaggccattaacactcttgtggagtcctacgaatcttctgaaacttttaaacaagttaagcaacaagtttctgagatacgccaaaaggtaaattaaatagatatgtgactttataatggctaaaagaaaattaaagagctcatgtaaaattagcttatatacattatttcgttttactatacatatatatttatatttacagaaagatgggagtgtaaagaataggggatgtcaatcaagtttcattacacaatgcagtgttctcactaggagatcctttgtgaacatgtaccgcgatcttggttactattggcttcgtcttgcaatctatattgccttgtgtttatgtgtaggaaccctttttcatgacattggctccagttatggctcaatacaggtaattctaatttatacacctaattatcatcttataaaatagagaaaaatatgcaagattctataggtttgtaagggaattgaatactaaattgtatgagttttcattgttcactttaggctagaggatcaatgctgatgtttgtggcagcatttttgactttcatggctattggtggattcccatcttttgtagaagacatgaaggttagtcaaataacaagttcatgtttaagagtttaacttagtatgtacactaatatgatttattatttgtatgaaactatatcttatatttttatgtattggaatttcaaaacatagcaatcgtaaactaatatgattcttaactttaatttgttaattagatatttgggagagaaagactgaatggacactatggagtggcttcatttgtagtggggaacactttttcttcaataccttatttggttctcatatctgtaattcccggagccatagcctattaccttgtaggacttcaaaagagcattgaacactttgcctacttttcaatcatgctctttgtatgtatgatgttggttgagagccttatgatgattgtggcaagcatagttccagactttctaatggggatcatcacaggtgctgggatccaaggtgtcatgatgttaaatggtggcttttttcgcttaccaaatgatattcccaagcccttttggaggtatccaatgtattatattgcattccacaagtatgcaaatcaaggattctacaagaatgagtttcaaggattgacatttccaaatggtcaagctggaggagagttgtccaccattagtggtgaagaagttctaaagagtgtttggcaagtggagttaagctactccaagtgggttgatgttggaatcttgattgggatggtggtaatttatagactcttgtttttgacaataattaagaccaaagaaatgataaagtcacactaatttgacctttaagggttacatgttgttaaccagtaattaactttcaatatttagttaaaattgtttttttggattattagaattttgttcttattgtattgccacatattataacaattcttattctagtcagttttaatgtatttattatactattgtatggtgtatgaaaattctgatgcatagcaatgaaaagttacagaatagcttgttcaattatgttgcaatgcaatttttttgcttgaaataacttctcatatccatcctataaaaaatctacttgatcaatatctcataattatcatgatgatatggttcttttacatagtaagaatgtcctactattttgttgtctgatcaatttttatttctcataattttatatagcatgcatatcatattattattatcattaagaaacgtaatctgatgactatatcataactatcaac

SEQ ID NO: 186875 - DNA, 7630 bp, Cannabis indica
ttttttttatattttttatatggagaggttttgtgtttgagcagtattattttggagacaaataagtggagattattgtttaaaatgttaaatatatttttttttcagtactctgcatttgaattgttgacataggcttacttgcactagttggaagaggtcctttaatcgggggaggcaggggataacagtatggtgttaattttttttggctaattatgtgaatatttactggttaaaaagactattctggttaatgaatggacataagattgttttattgattctcaattgtttgcttgattatggttgctacctgcacacacacatgtctatgatcgttaatttttgattgtttacttgatcgttgtaaccttatttgccaagtgttttcttcacacttgctgcagacaacaaatctgttgccccagtatggaagctgaaaaatctgatgtttcacgagccgaggaattcaaagtccaggcaaatgaagcatttaaaggtcataaaacattcttctggaatctgcttctaaggttattactttttttttaataaaatacttattatcaaggtattggaccaagattttgaccttgattgaaagtctgacttgaatccatatcatctaacttgactttctactccatgtattgtattagattaaatttagtttattaatggtttgagttcttaattagaaattagaaactaaattgtcgctgcagtaaagaagtagaaattagaatgtataaggtgagcatacaaggcaaatgttatttgttaccaattttacctcaactaagaatccttttaattattttaaatctttttttgtcaaatactttagaactattacgggaattgtgctatatttctacgtctttgttgtgctgatggcaatgctttgatttcagtccgcaaatatgctcaagctattgatttgtacacacaagcaattgaaatagacagtcaaaatgctgtatattgggctaaccggtcatttgctcatctcaaactggaggaatatggcagtgctatacaggatgcttctacagctattgaagttgatcctaaatattccaaggcatgcttttgtggcctaactttctataggttctcatcatcctaatattttttaatcatgttttgataattctctgctgttacagggttattacaggagaggtgcagcttatcttgccatgggaaaattcaaagaagcactcaaagattttcagcaggttaatttctctttttgtccccgtgtgtctcaagttttttctttcaaaggcacatttttcaatgctaggatttcactgataatacttgaaggttattcatcttgtagacttagtagtttcatgatatcatctcatgtgtattgatttctttctacctaattttaatacctaagtgcagttaggttctataaaaggcggtgcttgtaattagtgcaatgtatatgtttttcgtaaagcttcagttgaccttttgttgtgttattttcagttcttcctttgtttctgattagttaataaccactttgcaggccaccttttatttttagatgctattcattttgtagcgtctctattgttaactagttcaatttcctatttgaaacaggtgaagagaatatgtcccaatgatcctgatgctaccaagaagttgaaagagtgtgagaaagcagtgatgaagattaaatttgaagaagcaattgctgcaccacaatctgaaaagagatctgttgcagaatctattgatttccatactataggtatccatattattaatatcatgttgtttctttttgttattattgagtttagatattgttacaaatttttgaagcagttttgttgagttatttggtttattgtcttcatcattcatcaattttacttgctttgcttttcttttttctttcaagtgacttttgttttcaagcaatatttctggttttttttttgtttgtttgtttctggattcattagttttgctgatatatatacctacctaattaatattccagtgattgtttgggttcgttaataaaattattatttgaggcggaaaacgtgtagaaattcaggccattcactaaaagctctatatgatttgtaattgagtcgtacttagtgaatgaccgatttcaggcacttgacttgagtcattaccctcatcatttggcagggctgtagtgtctcttacacggggtatatggttagctccatactccacagaccacaaacgtttcttgtgtctacatgtaagaggctagacacatcattgatcccatttggtactaacaatcttcccttgatatgtctttccaaattgacagtgattcttgagcattttttaactaaagtctctatgccattcgtatgatgcattttttattttaatgtcagacttgtcatcctagccacatttcaacctctgatttgtacaagtacctatcattttcaatatttaatttgcttttaaaaaatctcaaacctttgtggagctacgtaactgtgaaaaatggtgcagtcctactggtctttgaggttatgtcatatagacaaatgtacttgttaaagcgggtctcaatgtagttgacaaaccagaacctgtggctctgatcttggggtttcaatatggaaaaatttgaaaggtgaccagacattaggtaaattaccttggacccaagtaactaaatggagtaattaactgttcatggggaacctgttttaagtgattagttagggctttatttaccaatgtatccagctttgttcagtgtcactgtggttggacagatttccagtgttgactctaagtactgaatagaaagttattctagttttgccattcccatatggaatcagtgaccttctgtagcgtaggtttcatgtagaagcttggttaattcattgatcatattgatgatcactgttatgtttactgttatatattgacaattaactagtttatttttcaaacaaaaacaaaaaattaactagtttatttatagtattcttgtataatttatcattataggagcaacccccagttcaccatcagtttccactcaagtggctgtagcagctgtgacagtagcaattgcggcagcgatggtgatgagagtgggaacaacaacaggcatagtggtagccacaatattgggggtgctgctgattgttcttggggcatattggtggtctggctgcattggtggtgttcgtgtcaaaaatcgagttaatgacctaggtttgagttcacaataagtcgtaccacaacaattttaataagctttaaaaatgtaggaactgaatgattgattatattcattcactaatggcaaattcatagatctgctattaaagattgcatcatacatttctttgggagtacaatttttcagtgtaatgggtagaaaagaaatgttctggagggaatctttattgtgagctctggtcatgtgcctgatgtagggagtcaaatggtatgacaatatgttgggtatgatagcctaagttgacaggtcaaacattgcatgatttgcgttatttcttaatggtatcatatgtagtcatgacattcttttgatattttttagtaattgagagggagtggtttactgaagtacatagccatgatagagttcaacagtgtgagataattttgctagctaactaagttgtaggagtttaatctctttccattctctctcatcaggttgatgggagactggtttaagattacttatgaaactattaaaaacaaaccagagaatttccctgtggtccaaatttagattcaaatgttttgagatatggattataatgtgcaatatccaaattagcgaatcttcaatgcaattagaattgtaagtaaagctcttattggtaagttaaagttgatgactgtgcagttgtactagctttatctgtaaccacaactttgttgaaacttactattcatcttgtactgatttgtgattttgaaaggtctctcttgtattttaagattagctgttgatataaatggttgctggtatcctctgggatgataaaatcctgcaaattgcaatttttccatttgggggaaaatgagcattctgtgatttattacctttataaatgggcaactctacctcaacgttgctttgaaactcacactttgtttttttttttgttaattttggttggactaggaataatattttttgtcaagataaacattggctttctttgagattttttcaaaatgaaatagggcatagaaggatacgcttttcctatggtttagggtttacttttaggcatgaggctcttacattaattgccgagttgcttagtcttttgtctgtataccaatttgtatctcagctaagtttctgtatctttcttgtactaaaggaacttaatgatatgtgctaaccctctaggtattcattaagttgctttttgttttaacatccagatgtggagccacagtattcaggcgcacggatagaaggagatactattacgatggaatttgtaaagaaaatgatggaggattttaagaatcaaaagtgtttacacaaacggtacaatgatagacatcattcagagtgtcttattcataacttgacatcatcattgttgtctaatttggttttcatattgcagatatgcattccaaatcgtattacaaacaagagaaatgttgcaggccctgccttctttagttgatgtaactgttccagagggcaatcactttactgtttgtggtgatgtgcatggtcaggtaacttgtttgtctcttctcactggtactacacaatatgacatattagacccaacactgaacgaatgaagttgagagaacaaatgaagtttattaaacacaagcctagtaaattaatagtgatggaggtatggttgaactttcatagtgagattaaatggtggttgtttagtatggtctatatcaaatcagtcaatgttaatggtctaaaattgtatgactttcatttcagttcataccttgtcatataaccattatcccttgttttcaatgtttgactgtcttctattacttgtctaaaagacagcactttgatggcctttgattagtttttctcccttctgtatttcatatcctgaatgatggtttcaattcatatactaataatgctttcaaaattttctgttcatgtccatgaccgcatcttgtagccacgtcgttattgggttacaatttcttaattttcttttattttccctgtgatgcagttctatgacctcttaaatatttttgagcttaacgggcttccttcagatgataatccctatttattcaatggtgattttgtggatagaggatcgttttctttggaggtcatcctcacactgtttgcattcaagtgcatgtctccatcaggtaaaccatctgtaatttgcaattggtttactgccatttttgtttagttttatttaggagtatcatctgtgtcttgatgttgtgctatcatgggctgattgtggtagcaagtagcaaataaaaagctcgcgagtgtttcaggagcttcttgctttttttaatttatgaattcatattagtaacttttcttttggttttgtttatttatttcaaaaagaagttatgtacttgtaaattttaatagattgtttgtgcactattcatgtctaattagctgttttattaacatatttgtatattttcagccatgtaccttgcaaggggaaatcatgagagcaaaagcatgaacaagatatatggttttgaaggagaagttcgctccaagttgaatgaaacatttgtggaactatttgcagaagttttttgctgcttacctctggctcatgtaatcaatcagaaggtctttattgttcatgggggtctttttagtgttgatggagtgaaactttctgacattagagctattgaccgcttctgtgaacctcccgaggaaggtttaaattataacttttgtcatgtcatcattggcaagctacacatccaaatatgatgcagtagacattctgtgaattgctctatggatttatgcttgttcattttcatttacttattttccttttgatagggttgatgtgtgaattgctgtggagtgatccacaaccttcactgggaagaggacctagcaaacgtggtgttggcctttcttttggtggtgatgtgacgaaaagatttttgcaggaaaacaatctaggtatgtttcatgctgtttccttatagtcttgctccatagtcagtaaactcacatgcttgatccaatgacagatttagttgtgcgctctcatgaagtaaaggatgaagggtatgagattgagcatgacggtaaactaattactgtattttctgcaccaaactactgtgatcaggtaatgctattttgtcaagtgttttagattccactataatgtcccaaggagtggttaagcattttttttttaaaaataaacgagtggttaagcatttttgaacctttgcagtatgtactgttttgcttttgtcaatgactcgatgaatcttcactttgacatgacatacccaaattatttctgaacattacataggctggctcattcaatcaggatgagtcaccagttgttgaatctttgttaaaaatcaggaaatcttgtactggtttttctgctttgttttcttgattgtagatgctaacagtttgtgcatgaatcttttttatttattttgctaattgatacaatgcaccacataatatttgtatagtaaagatgatttaatagtattctcctttacataatagctctgttaagatggccatgtcctgctttaatgccatatgcagggtcatagcttccttacattgcatatcaacctgcattgctatatatattgcgttttctgattggtatttggatgtgctctgaatctgaaatatttcatgattctgtctatcatgcatcggtttattccttgtgatatgaaaggtggactgtggccaaaattaatcgatatattgaagatcaaatatatgatcattttggtgtttttgatgtcttgtattctagaattagagcaatgaaatctattcagtaattcaagtacattgtgggcttgaaatgccttgcctgcttagtttacatttgatggcttttttgcagatgggcaataaaggtgcttttataagattcgaagcacctgaactaaaaccaaacattgttacattctcagcagtggtaagttgtttctgccttctgctacaaaacaatgctttcatatttaatgcttattcatccatttacctttccctcccctaaacagttctagttaaagtaaatattaatattttgagtaattttaatctccttacagccacaccctgatgtgaagccaatggcatatgcaaataacttcctgcgaatgtttcaatagttcccttcccggaaggggaaagacgaacaaattgcattttgtgcacagtagattgtctgcaaaaatacaaaagaaaatggagatagcccaaatacagtaatgacgtgtttgtgatgtgatgatgatctgctagagaaaacaccacacaattcgtttatttaatattttggagtcacttgcacctttgaag

SEQ ID NO: 186876 - DNA, 5370 bp, Cannabis indica
tttttttcttcttttcattttaatggctttggctgatttcagttgattgcatcttttgtgtccaccgtcatacaggaaatctctaaattttataaccatatgttgcatatttatatagcattcatggatttgttaaattaaattttctacggtgttcatgtcaggggggtgcattttggttccagaatttgactgaattttctcatgggatttcaggctccatattccctgtagtaattgctggtttgcactataccaatgttcaggtattcagttggttaccaattacagctgataactacagttctaattactttgtcttagttatatgttgatgtaagataactagtctacaagcaaacaaaagatacttaaaaaaaatctctctaaatggcagatagttagataaagatatttttactatgagcctgtcagcatactttaccatgttactgtaagctaatttgaaagagggtagcctgatatcttgttattcaacttttcagatttccttcagaaaatctgcaattaaaaaggtcaccagcctgcttgacttattagtaaaagtaagtattctcaactacataagtcttgtatatattttagacgacaactattctttttctccttagtggcatgtatctcattagttctatattttctcttagtagttatatttccatcgatttttgttaactgttaaaagtattttagtttgtgaagatgatttgagcttttaaccttgtgcagtactacaagcactacttggatttcttgacactacctatactcttaagctgttattttgttcctcaggtaacttgatatttattgctgtgatttcgttatttgttattattattactattgaacttaggttttgtaatatcagattacataattgtacatttcaaggcattacaaaatgtagcagttagctttaaagtaaggggaatagtgagacagaagatcaaccaattttcgccacaactttcaactttctacgcatcttctctgttggtctttccctagcaaccaaaccacctttggaatcttctaagatgttatatttttgacagcattgctcattttaagacatagttcagtctctcctatttatttcggaaaactagcaaatatttagatcatttgttgtggactgaaggctgtctaactaagcccacgtaattataacatagactatcatcagtaaaatataaaaggggtaaacaatgtattgtatttgtttcttggtattgcttgcatatgtgaagtggcatgctctgacaaagttaggcctcacaattttaccattgttttgcagggaagtcttgtctattgggtcacaaatagttcactcacggctatacaggtgaattcttcttcttcattgaaacaaaacaaccacagagagaaacccagttagccacacttgaaatcatggtgtgattgtaacaggttttcctccgccacaaatgaggcttttcaattcatattggagggtcctgtctaagaaagaggatcctttctcttttttcaaaaaaaaatcatggtgtgattaatgagcaaaattttttttatatacatttttattataacagaattcattacagttggcctaagataacaacgacactagcaacctaaactaacttcctaaccagaatcaagccatcccccctcaaacgaaaaggggtatttacaactttgagtttggttttgagatacaaattggatctttaggcaagcatttagttagaatatcgaccacttggtcaactgatggcacaaaacgaactgaaagtgtattattcagaatctgttcacgaacaaagtgttgatcgatctcgatgtgcttacactgagcatgaaagaaaaggtttgcggctatggcagctaccccttaattatcgacccaaactatgggaacatcaacaagagtgacttgcagttcagaaaacaaggatcgtaaccacatgatttcagcagcggtattggctaaggatcgaaattctgattcggtagaagagcgagcaacaacttgctgcttcttagcagaccacgaaatgagatttagaccaaaaaagaccggaaagccaccagtagaatgcctgtcatcaatacaattggcccaatcggcatccgaataagttacaattgacattcgagaagcaagtttgagaagaagtcctttagttatagtacctttcagatatctcaacaagcgtttacatgcttcccaatggacaaaagtgggggcatgaataaattgagaaagtttattgataatgaaagccatatcgggcctagtgagagtcaaatattgcaaggctcctaaggtacttcgatagagagttttgtcttcaaaaggagacccttcagtaagtgaaagtttgtgagcactactagtaggactagaacagcttttggctccttccaaatgaactttgacacgtaaattagtaatatacttgctttgggaaagatacatgccattcgagtctatataaatctctacaccaagaaaataatgaacctgtcccaaatcttttaaggcaagaaagttgttcaagtcagcaataagcttgcaaatcaactgagaatttggtccagttatgagaatgtcatctacataaattagtagaatgaccatagtcacagtagtcccaaaaataaacaacgaagtattagccttagaagtggtgaaatcccaactcaacaaagtttgctttaactgtcattccaagctcgaggagcttgttcgaggccatataaagctttgtgaaaatgacaaacatgattaggtttagatggatcttcacaaccttgaggttgagtcatataaatggtctcttgtgaattgccatttagaaaagcattagagacatctagttatctaacttcctagttggaagatacaacaagagttaagaccattcaaacagtgattggtttaactacagggctgaaagtatcttcataatcgatacctggctgctgcagatatcctcgtgccacaacgaaattcatgactcatagcagcattccaagcaggatccttaagagcaacaactgtggatttaggctcagttggcaacagagattcaggaagtttatgcttcatggcaagatacgcctttggtttatgaatcccattttgagctctagtgcgcataggatgtattctctgagttgtagcttgttgagaggaggcaggtgaagctgacttagatgcagaagaaaaagaaacctcttgaccaccaagagttgctaactcatgaacggatgctgctgatgaacttggtgaattgtcctgactagaatgcaaggtaggagcttcaagatgaactgcctgagaccaggaactgacttagaggaagaggcatcaacaacattcaacatcagcaacatttgagcgaacaacaatagtcatgtcaacagcagcaacacgagagtgagactcggggataccatcattaggagaagatgcagaaggcatattagtattgaaatatactggactagtatgaaatgaagcagtgggacaagaatccagaaaagaaggtacttgagaggcagatgttgatgaagagatagaagctggataatgtgactcattaaaaatcacatttcgagctataaaaacttgacttgcagcattcccacacaagtaacctttgtgcttagaagagtatcctagaaaaatgcattcttctaacttgaattctatcttatgatgattataagggcgcaagtgaggaaaacaagaacactcaaaaggtttcatgatagtataatctggttgctgtccaaataagcagtcaaaaggactaatgttgccattgatagcagtaggcatccgattaatagagtaagctgctgtgtggaaagcataccaccaacatgacatatctaaacctaatttggcaagcaaagttaaaccagtctctgttatatgtcgatgtttacgttccaccctttcattttgctcatgggaatggggacaaggcttttggtttttaaagccttgatcacttaaaaatctctcaaatggtagtctatacccaccactaccatcagcttggacatcttttatgggaagattaaattatttgtcaacgaagcttttgaattgaacaaataattcaaacgcttgagacttgactttatgaggaaatatccaagaaaactgactataatcatcaacaaatacaatatagtatttgtaattatctttagacgcgacatgggaaggaccccataagtcgctatgaatatgttctagaggttgtgaagctctactagaggacaaagagtaaggaagtttatggcttttaccaagttgacaagcagtacaaaagctgagatttttaagtgaatgaggaatattggcactagacaacatcttaatcaatatagtaggtgcaggatgacccaatttgatatgccacaaatttatatcacaagaagctatagataaatgaacactaggtgattcaagaacaggaaaagaagctttatttatttgacattgcagtagcagtgcaagtacaatgagaattacaatcatttttgaattgagacatagcactagaagtgacaagattgcaatccagaaatgttggagagatatttgagctaccatcacctagaagatacagaccatctttattcttccctgtgatcagaacagcacctgtttgcttgtccttaccaaaacagcaagatgtgaaatttcaagaaaacattattattttcaatcaacttcgagacactaatgaagttttttgtaattgagggcacttgcaaaacagtttttagttctaaagatttagtggaattagaaggaatggtggcatgaccaagatgagagataaaaagcttcttaccattgccaacagcaagagtttcttgaccattgtatggagtagttaaatcaaggttggcatgactgaaagcaagatgattcgtggcaccagtatccacataccacccaacatcatcaccaaaatcaagaactgattgagtaacaaaggcctgagattcatattcttgagacaactcaatgagatgagcttgagaaggggatgaagaatgcttcggagtcacccaattacgatcgaacttgtaatgacaggttggtgcagtatggccaaaactcatacaaacttgacaaagaggcctgttcatattgggaggtcgattcgagcttcgaggattaaatcgggactgatggtcagagggaatgcctcttctagaccgcaagtctggtctattcgatctagatcttgatccaaaagtcagattcgcagacatctttgtagaaagatccataacagaagtgtggctggttatcatcccgaccagttc

SEQ ID NO: 186877 - DNA, 1671 bp, Cannabis indica
ctgaaaaaattgaagatgcattaattagagcccgcttgtccttcctattcctttcgaatttggaagagaacttcactttggaagcaatagaagaatcctccttggatgctggaaggagacgcacaccaagacccattttcttggaagcagactcttcttcagcaattctcttcttttgaccctgaaatggttaagggacaaaacattatttcttttcttatttgtttcctttttcccaaatcaataataaaaaatagttcttcaaaacaaactatattttaactaaatgcattcaagcaacatagcaaaacatactgttatctttatagaggtcaaagaaaacagggtacatgagaatggagtgaacactacaagataaataacatactctaagtttcgctcggagagccctgtttagggagtagtcatctgcatgccgggcatctgaagatcgctgcaagcgcactaacactggctctgcttctttcttcttcttcagatcctgctcttcatgttcgagacgataaaatggatctgctagcttgcctctttctgaagaaagaaaccataatggttaataacttataatacttgaaaacaaactaaaatccaaagactgtcagacaacaaagagatcacaggttagtgtttttagttttagtaattgttttggatgaaaaaaggctagcggcaaacattacaacaaaataaatcacaccttcatctgcaggaagttcaaaagtttctgcatcctcaacgtcataatcctcagttttttttgtggcgccactgacgatgatgtactcgcagttcttcggatctgtgtggataacaatttcatgtttacagcatgcagccttcatagtaaagctccatatctgaacaaaagaacaatacctttaaaggatatctcgataagggggtaaattcaagtaggaaatgcatgtacttgcatctgaacaaatattaacagtgtaaaatatagtcatagtttctacaatataagattaagcatttaaatattcagcttgcacaaagtacctttgtggaatagtaatttcccacttgcttcttttctgcattaaaccgaacaccctttgctatcatagaattgcatccaccacaccatatgttgaatggcatctcaaacctgaaatttcacacatgatttagcaactgagttaagactctttacttgtcaccaacatccactgtttagaattggcacttggatgacaaagttatcagcaattgtaagagaaaattggataaacattataaccaacagaacctttccaatcattcttagttatatttatgggagaaaaagcatgataaagatatgtatgctttattaccttataaccaaaataccctggtctattttctttgctctttccctcagagcatgctgaccatgaaacttgttcagagaaccctgagaagcaaagccatgtaagtatgctaaaagcgaatcaatacacaatgttctcaaaaactatggttcatacatacctgatctggggtccattctggtggatagtaaaagttgtctgctcgtgcagctgcaagtgaagactgtagaaatccaaataaaagcaggcttagcagactgaagatactcatgagagagagagagagagagagagagagagagagagagagagagag

SEQ ID NO: 186878 - DNA, 2608 bp, Cannabis indica
aaatcctaattagcctatattatttatgtggcaaactatattttcaacacgcttctcggatgttttctttttcggaatttaacttctcttttcatatttctcaagaaaataaacaagcttcttcagttcttaattctgtacataaaccaccaaatctatcttcacttacctttttgttttgataataaacttgaaaagagcatagaaagttgagtaatgggcagaaataatgaaacttgttcagtttggtgttggagtttagacatttctaccttggatattcttagtctaagcagttggtatttcaaattagtgcttcctaaagttaagaaaagcttattttagatagcacaacaaaaattggtccaacttctttgatattatatactaaaacaattgtagtgtaccttctggcgatttctgaataaacatcagcaggtttgtctccggcaactaagttgactgcagctgcttccaactgagaaagggcaacatgaatgcaattcaaggcaattagcaaatccctatcaataatacaatctaaaagatatatgtgcaaatgacagacgttcttcaatttgactaaaagatatgatcctcgtgggcagctacttttctatcaacctttcaccgttacagattagaatcttatcgttgaagtttttacattaaatggttcaattggcatattctactatatccagaatgaagtaatataatgaagaaaaaaatgtatagtacagaagaaacaaagtttggagatggagaaagcatacactgtttctccccaaggcagcgtagtgctgcaagccgttacatgaaccgtcctgtaaaatttaaagttctgcattaataaaatcatccaacacaacataaacatacattgtatgtgttcagagagaagacaaaaaacccgaagggagggaaaggaaaaatagataatgatgggcagagcttacgattccactagcaaatggaggacatatatgtttatcgctatgattaatcccatgataagatatcaaaaggtgatcaaaaatttatgttgactgatataaagggaagctataatcccctttaaaatacagaggcttttgatgaagcatttacctgatgaatgggcaagtgagaaataacggtatgtggtgatgagctagttaatgcttctgatagattaatacaagcagctaagcactgaaaaggatcttcagcccccaaccaccagcgatctccatgaacaggattttttgctgaatcaaatatatcctcaatatggttatccacaaacgctagtcgcccatcatatgaaagcttttcaactccaccagcatacaggtttgctaattgtatcttaagccagcgtagtccagacttgcctaatggccgtccttcagcaaactcaagaactccacgacaaagatcagagctcaaatgattcaaatgagggtgcatagggtatgctctacctctgaaatcaagattatgcggataataaaagccgtcctcatctttcatctttcgagccaccttttcaaaatcaattttctcactatcagtacacacaaattaaactaaaatactgcaaagtgaacacaactcttgaaagcattgtctactggtttgttgcttcaaattccaaatacagtaattacaactgaagcttatgtgttgtaagttgtgacatgatgttttattattaaaaggagaagaaagacacttaccgaaagcttgagttcaacatcacaccgtaaagaatgtctctccgagttaatttccttgcctttctcactttccacttccattgatggatttctgttaaatcatctgagcttggtttctctggtacagtaacctatgaccaattaagatgaatgaaacaattaatggagattaactaacatataatgcagtaaaagagcccaacaatgatgccaagcaagtttattaagggagttggatacaagatcccactccaatttcttgcaagtctaattgaaagaaatattcagaggcattaattttttacaacattcctcagatcatttgatcaattttgtctaatgctggtagaaaactaaactaatctttttaggagctaaaaaattaacatagaagactattttatcttggggaaaaaaactacggaaattgaaaagattaatcctgtacatacatctttacgattaactaagccggcaacattgccacctccatcccaaatgctctccaccacactaaatacttttttgttcaccctccacttgacactcccaagcatatccagagcctgagacgcgaacagcgaaatattcggttaaaaaataattcataaggcattataatttgaatatatatgtgatttaaagtttgcagttcaaatagaagagccgaagagaaaacacaatgattataattattacttcaaatgaaaaaaaaaattctaattctacacaaagataatagatgaaattctcacctcaaatactttctgcatttgctttccaggagcagccctaagtacttctcgctgcttcctagatccatgagtgcgcataacataagaaggtagaaacaaatgcccgcccttgtcatatctgaaaaagaaaag

SEQ ID NO: 186879 - DNA, 2306 bp, Cannabis indica
caataataaattaacacgatcacaacatgaaatatttcttttaaataaaatggtttaaagttttgtaactaattatgtattgaaggatcgatgtgaacaccacatgattaatggttgcgaaaatcatattttattaaaattgtagtcaaacaaatattataaatcttacccataacttcagttacaactaattacaacttgcatacatacataagtgtcaccaatatatagttatatacacacacaatatccgcatttattgatttaaaatcatataatacattccatgtgaattgtgtattactttaattatatatatacatatgtcacttaattaattttacgtcaaaaaacgtgtcaatatcgtttgatctcattatatattttccccatgatctcactacaactacaatatgtatatatatatatactactatatatagacacaagaatggtgattggtgaaaatgtcaagatctaaatgagcagagagtattataataatagtgattgaagatgatgatgaggatggtgattttggtgatgggtttattattatggggatctgcaagccaattaggattaatagtaatggctcatattcctccggcattgtatgtgtttggagattcattattggatagtggtaataacaattttttgcttactcttgccaaagccaattaccttccttatggttttaatttccaagatggtcctaccggaaggtacaccaatggcagaacagtcgccgattacataggtatttatatctatatataaatatatatatatattaatttgtaaatagtaatttattttgttttctgatgatatatattattaattataattgtagctgaaaatcttaagttaccatatgctcctccatatctaagtataagagaatcgacctcccttactggattgaattatgcatctggctcttgtgggattcttccagaaactggcactcaatttgtaagatttatatacatatatatatatatataatatattatcataataaatactagcttgcttctagttaattccatattccatcatacatgcatatttttgtgttcatattttaagtataatgaggattatattgacgcattttcataaaattaagtattgataattaagcaaattactaattaaggatatttatgcctagatgcacatactattatgcatcaatacatatattttagtatgttaattaaacgtgattattagtctcacactcacgtaatatatatcaacacaatttgatcaggctttaattgttctaaaagaaaatttggagttgaatatgaaagagtcattaatataatactgaaacctgaaatgattaattaattaataaattaatgaataagtaatcatgttttacatgtaataataatcctataaatatatattgatgatttttgcagggggaatgcttgaatctgaaccaacagatgggtttgtttgaaatcacaataaatacagagttgaaaaaaaaattcagtaataatgaattttccaactacctctcaaaatctatatttatattctccattggcaacaatgattacataaacaattatcttaccgatcccaccaagcgtattaaatattctcctcaaacatttgcacaacttcttatcaattcactcgctcaacaacttgaggtaataataataactctctctacatattaatattaatatataatataattaattaattaatttacagagattatataaattgggaggtcgaaaggtaatagtgttcgaactgggtcccattggttgcatcccatcaataacaaggaaaagaaagatgcagagcaacaaatgtgtggaagagatcaataaaatggttcaaatattcaaccaaaggcttggtgtaatgcttcaaaatctaacttcatctctcaaagcctcacatttcattcttggtcgtgttcatgcgctaggctacgacgcaatcaaaaatcctaaaaattatggtaaaaattatttaattatatctagctattataagttaaggatataattaataagttgaatttaattatttataattgttttattattaggattggtggatacaagcagtggatgttgtaagagtttgttgaatgggacatcagggtgcattcctttgcaacagccgtgcaaagaaagtacaagtcattatttctgggatgctttttcatcttactgaaactgtttgttcactcatagctaatggttgttttactgactcatatatatgctctcccactattaaccaacttgtacaaa

SEQ ID NO: 186880 - DNA, 2606 bp, Cannabis indica
ttctcgcataattgaggagatatctaaaattgattaatctacttcttggtggtgagtttctgactgcattgcttttttggctctattcgtaattccgagctgcgtttggtccctcaaattagttctctttctatgttttagttgttaagtggcttgatgttccaacatttatatgaacgtgtggataagtagtttaattcttggatatctctcgaatggatccaatttaacaccattttttatgtataattcttctgggtatgtaatttataattacgcatgctagtcgctctctctcacacacacattccaaaatatgtacatattgtatagttgtaagcatatattccaaaatattgtcatttttttaaactccattatcttacatgacctgtgtgcaagctgttgcaagcctttaactaaggctgattttgaagtattatataatgcagaaaccacacgttttccatgtcgttttctttataacgaggatcctgtcattagttctcattttatagtctttattacaaccaaccacattagaacatgtattgtcaatatgtataaagcttttgttgcaagtcaatgtgcgatggtcatgtggtgtgggggcgttgtagtcacttgaagcagtgctcctctgtctgtcctatccatgtgctcgttctgagaaatcttgagtccccataaatttgcaaacacagaacccaaaaaagaatagaacactagatctttatttagattgatacacactgtcactgagctagctagtgctacactttattaccctacaaaactcaacatagaaaataataaagatcccccaaaacacagtggtggactagttattgcttgctataactcgatattacaactcaacttctatctatggtaattcgagtggctgaatgttccatatgtccttggcgtattcatgaatggttctgtcactgctgaacttgtatgagccagctgtgttgaggattgacattcttgtccatttctatgcaaaaacaatggtcacccgagttttgctgagttagatagagtttgaaccatggatttgaaaggagaaaaagaaacatgttaagagttataatgggaatttggaaatgtatatgcgtaccttctggtcacggtatgcctcatcaactttatcttggcattctaagtaactggggaagtccttccccaccaggaaatagtccgcacggccataaccttcatttccttccaaggatccaatcatttcatcatagttgtaaggcccgaatacaccgcttctcacgaattctttcacttcttcgaaacgtgggtccggaacaaactaccagatcgtaccagtttgtaggttaatatgagaagattggataaacaaagtcattgtgctcatgagcagcattggaatggataaagacgttaaaacaaacaaaaattgagtaacatgaaaccgtcaaaatggttattattaatacaaacctttccttcagctctttcttttcggagatcagcaatctcatgagccttagcaccaaagaggaaaaagttatcttcaccaacctcttctcttatttcaacattggccccatccaaagttccaatcaggatacagccgttcatggaaaatttcatgttgctggttccactggcttccattccagcagtactaaagggagaagggaaaaggaaaataagcatttcagataaaagagaccttcacaagtcagggtatgactttctgctcaatcttgctcatgaataaagtatgagtggtggccaaacttaagaaagcggtctttcatttcggatatatgcagatgactgaaaacaagtgcaaacaacaaaattcttgtatgcaaaagtacaaagaattacctaatgtgctgtgagagctcacttgcgggtatcagcaattcagcaacactaacattataatccgggacgaagataacctaataaaacaaagcataaaggtatgatgtaagagaaatgacgctaaacttaacggcaacatgcatgtgctcaaagaaattcggtgatttgagaaaaccaactcatctatgtttaaagtgtaactaattcaaaaattgatttgacataaatacagtagatacgtacatggaggagttatatcatcatctcaaaactattcaaaacgaaacctactggagagatatactgtttcctcaaatcagagaaaataatctcagcccaaaaattaagatattgtgaagtgacgcaattttgagtaagcaattaaataaaaacactcagtacccaatatggagtacgaaagctatgcgtagcttcattttcaggaaaaaaaactacgcgtaccttcaataggtcaccaatttcaggatcatgatttatagtagcgccaacatctgtgataaacttcacaattctttttgcctgaacatatgttgcaaatgcttttcctccaaaaatacatactcggggaacaaacatttcttttctttctgaagcagtcatttctttcatcttcttgtagcgataaacaattcccaagatatttaaaagctgtctcttatattcgtgaatgcgcttcacctgagagtagttggtccaatttaagtcagaca

SEQ ID NO: 186881 - DNA, 2300 bp, Cannabis indica
atttttcatttgatttcagaagtacatgccgcgaaggaaaactggagaagagatgaacttcacttatgttgagtgcttgttgtatacatttcatcatcttgctcaaaaggttcctactttacatttgattgtcttgttaatgtacttatttgatgtgaattactcgtgctaagtattttactattcttactggattaggttcccaatgccacaaacagtttatgtggttacaaaatagtaacaggccaaccctcagataggcttggagaggacttctcagagcagtacaaagatttaactgaaaggtaattgtatctatctgtatactcttttgtttaaaatatatatgtttgtaaattgaaggtggtagctagctcactaagtaggcaataatgttagatacttggttatgccatgagagttacctctaatttctatcataataaaaataatatattaatgagcctggctcaacagtttggttattatttaattacaacgacaaggaatattggtctttgttggctcgatgctttcttcttttctgtctatttattttatttagcgaacattaaacctcctgctgagtccagagttttacttgaatataagtaaccttggcctagggttgtttgtgaaagaaacttgggactgtattgctttatgttaggtagatgcaatctgattttcagtatattattgttgttccgggtggaatatctgtttaagtcggagtcagagtctattttgtgttggaatgtggtcattcatagctcctactgttatacccatgaatggtagcttgaatgatcagacctttgtttactcccacaatgtcagaggtgcaagtccctcctgcctacttccatagaaatttctaagagtctggttcccactattattgggaattaaataaggggttatcatggaatttagaattctacgatagtaacgaataactgctgtagtttaactatctagcgtaaagggggttattaattttgcaataaaaaaatatcatgtcattcaatacttgtctgtagtaagttgctacacatgcaatcattttattatgtcactctttcagctatgtgaaactgtcttgataatctattaaacattaaaattcttgtatttcattggaatccttgtgtatttaaaaagaaagtagatgatgaatttttaatcatctatcttagacattagatgaagttaatgttgctaccccattacactgttttcattgctatcatttgttgagcttctctctatattttcttttccttttgtcaaataactgttaacttatggtttaggttgacgagtgtggaggagctgactagagctaccatgaagaagttaactcagggaatggctgagcacaacaaagcaatggctgcagccaaatctgatgaggcaaagggtagcattgtgagtattcgtagaagacttcatcatatcgtttcttgcttccttcttacaaactttgaagcaattttctttttatgttcagaaaactcaaaagcagaacacaacaactggactgcgaacctgcaataacattttggcaatgacaaaggttgtaaaacactggacttttgatgtttacattcatgttcttttatgcataaactgtcaaaactaacccctttattattcctttaacttctgatgattcagccattacatgtgaaaacaccgacatttattggagacaagagcataaatttgtcttggaaagaggcaaccaaacctgctgtgtcgtcctctaatactgttgggtatgagagatctgcctgacttttctccctttatttgttcagaatgtattattttctggttcttaatcctttttctttctgtatcgaattactctataatgttagttgtagccgtgttctgaatcattatatctttgcttagttataagcagagctgtaggaatctattttagcatagttaagaatttacagtccgtgggcacttaatttttataaatattgcttgtttttagtaaaatggttgggctggaagtgcactattaaagtagtgtttactggaaataaagctatacttacgcattatatgttaaatctattttcagaggtaaacgtccatctacagctgctaatggatcaggcaatgctacttcaaaaaaaggccgtggaggtggtggtttgccgagccagcttgttaatagggcgtttgaagggttatctcaaggtggcagaggcggtgggagaggcataggcagaggcagaggatggggtggtcgtggaagaggaagggggttccggtag

SEQ ID NO: 186882 - DNA, 6987 bp, Cannabis indica
atcattaaatgagaacacaagtatttaatgtttccagattacactttatgttttttaagccacaggctatgttctaaacaagtgaccaggaaagtggacacatccacacttctcagctcacttgggggtaccgtgcctagccggttgcgaccctaaacaacatgcagtgtgccatgttttactttatttttgataaatttgtgtttaagaggcattttaaacaaagttccttcaaaaaggaacaatcgcttgaatcctttcttaaaaaacacaatcaatattaaagagaggcgtttctagctaaaaatccctaaaatgggaagtacccgcttgaacctcttctcaataattatcaagaaaggagttgtacaaaaagattaaaactattaaggcttttcttgaactcccatagattttggtattatcctgaccaggaaaataccattcgaaatctatagcgtgtgaaactggcctcctagataaaaagcccttggtgctcgacaaaatgccaaagtctcgtgatcagaaggaacagtctggaaaaccatttatgtctttagcaccattacttggctcatgagaaattggtcaagactatcccacctgatgaaaggacacaggtacttcctagagtaccacgtaagctagcagagggagaaaaagtcacaaagctaaagtaacggccgttggaactgtatacttcgagatagcccttaacaatcaactacacattgaaaatactaaagcctagttataatgttatgtcaacaggctttcttgggaacaagtgtcataaatagccccgcggaccaggcaaaaattagtaccgtcccgcgttacaaaaatagagagagaaaaagaaggctaaaaggtccttaatggtctaggggaggtaatggtggtgctaacaaagttggggctggaacatccgattgctttatcggttctagattagcctccacagccacctgagcaactctctctcccaactaagtggaagatacctcgatctccgtagactcttgagaatgagaagtcgtggtaatagtatcccctccactatcactatcgacaataagtggatacttttggaggtattctccacggatcatggaaatcaccttcctaataatcttccccctgacagcctttgaaataagaaaaagtattgaatgatctttctacccctaatcgtgaagaactgtaatatagaacatttccatgcaacgaagacggtacctgtttgccttatcagctgccctgttagctggcctggttgcatctaaaattagttggggagcagtctcccgcatctggcacatggcagcccaagcaatgtgtccttttatattatttgagcagccctaattaatttgctcttgcaacctattgatggtctcttgatggagattattgaattatggctccttggtagagaagggtctgggtaccaaatttggactcccaagcagttgcccgctccttcgccccatttacctctttctcgaggtctttaaagcgtaagtccttcttgtatatgtccccttgaaggctggtaacctgacaagtttgggcaagaatagtctcagacttctccatcattcgggctttaacacagtctttttcctctacagctttggttaatttctcctcgagtgagtgcgccttcttctcaacttctcctaccgactttgcagcctcctgctcaatatgcgccttatggtctagatactttcccttgtacttggtgtcccattacctcttttcgacagctaatttggcctcccactcttcacgagtcatgaaggcaccgggggttatttgagcttcagcccgttcggccctgttgtgtaaagcctcattctcaaagatcaaggattgaaatctggtgtggagttggcttagctctatggccatgttctcggtctccctagcggccctctatgcgaacaacgccatctaagaaagagaggacaagagcaaattaccaaggttatctcgagaataaggattatgttacaaataaaagggaagatgggaatttaagacttacccttgcagcctattgcttgatggctatcgatagagtgtaaaagtcagcaatgatgctcatcacacacttttccaaagtaagctcactcacattacgaccaatactgtctatcatttccgccgcataggcagcgactgctttacccactaaaggttctagatgttggctcaccactggaaggtctaaaactgggcctgggggtaatggttgacgagtcccattaacaatctgagctgtcttattggaagatagccgagtaaccctcttctggagggtaacttgttctcgttcccgactcttcttcaaggtggcggccctcataagactgtcgtggctaatgggtggagtaacaggaaaagtgaatcctagtgtaggagccttacctctcttattgggttaaggcagattagcagcggtcggcctgggctgagtctaagctgaaggtggaataaattgagaagccactttttacaagtggtgaggggatcgccgtcagtgttgcagggatgcttgtccagatggtgagagtgattgtggctgttgttcttgatgtgattgttgctgcagttgtggctcttgtcgttggggttattgttgatgttgttataactgttgctgaggttgtgacaaaggcagattcgacgatagtgcatctttttccctaagttcctgaatagaggatcttgccctttttgtaatagggtcgagggaagaccccaacactctgtgtttcaatttagctggagtcctttttaagggaaagacatgaccatccaaactgtctttggaacccttacctccagtacagcctccgggattgatcctcctacagggggaactacttgggcaggttgttcaccccaagtagtaggaacttcacgagctctccgagaactgtcagacttccttcccccactacccgacgtagaatgaccgggtgtggcacacccagtcttggtaggaagcaggatttcccagacatctgatgatgaggaagtcgatggaggaggtggtttaccagtccaggatgccctagtttgaatcttccatttccgttttttgtaagacttcttagcctcatccaccgcaacctcaattcgagagttccacgacttcaacattttggattttagggtatctccacaataaagccacaatgtaagcaaggaacaaaggtagtcaccagccacacgatcataataaacaatagtagtaacaagaaaagaaatctaaggtgctatagggttgcccccagacaaaagataaaatactcctatggcttgtgaagctgccatattcttcaaattcaggaaagaacatggttttaaagggtcaactctgacagtgcctgagggatatttttcaaatcctccttggttctgccaggacatgcgactcaggctaggggtccggaaaatacagaaagggttgttaccttttcgtgatgtactggcctcgagtacccccacatcggggtaggcggcaacaaatttctctaagatttcctcttcctcgggcaaagggttaggatggtgtaatacccattcaaagtgttggacatggtcagttttggccgccttggtaattatatcaacaacactagccactattgcttccttcacctcccttggaagttgacgttgcccgcaaatgctgacagtgcctatgctctggtacttagtgattagacctgacctagagagaagtccggtcatcactaagccgtcaaccttcaattactcttcagagaagaccttgtattggccctatttcctgacgctttgaggaggaagttaagctgcaaacacaaaagaaaatgctaagtcacatgcaagaattagtggaatccaaaaatgagtaagacttgtaatattaatacctgggagttggaagcttaattgaagagatgccactctattgataggaaacccagagtaaaaaaaccaatattctcagagatcgtgggtacagtctatttggcaaataggacaataagagtttggatgtttatccagtcagaaaaaccctaacttagacctgtccgtcctcatgggattagccttaacaccgtaaaagtagaggatttcctccggggaaggaacttccagtttattaatcttgcaaaatacataccacccatccaagagcctataagatgaagggatcagctggaagggcgcaatcccaatttttgtaattatgtgcacaaagtaagtccttagagggagatgggcaccgctggaaattgggaccaactccatgcgctaaaccgtcaacgctcgtggatgtagattctctaagaacggagagtctgcgccacatcagaccagggacaggcccacgacctcagagtatgcttgtaacattctatagaatcaaaagcagttggccttctagtccatctcccacatagattcaggacaaacctgggctggcgaggaaagcccacctctcctgatagttgcgggtaaatttttctccgtagtaggcccatcttcagggacagtttctaaaacctccaaaagctgaggtgtcgctatggggatttcagtttggtcttgttccccaagagcatttcagcaggacgaacagagtccctagcggcggacatgactacgtccgcaagaggatcttggttcaaatccagggaaggaaggttaaactctttaaaaaaaacgtaaacagatgaaaaggagagattttttacgcacacagtattgtcgtacctcccaagtacggccctggccttcacctagactaaaaccttttttgaaacaaaaaatgccaagaaactcagacaggaggttagagcacttacttgacagaacaaaacgggtagtcggtgatcccaaaatgttcgtcctaaaactctgtagctagctgatacaacggtcacactcatcctaaaagttaagagtcccctttgacgaagaactttgcaagttcagttgaagggagacagcgttttgaaaaagctcagcacgatgatgagtaaacgttgaattaaaccatttaattcttcctgcatgcaaaagataacaagaagaaagaaaaaagacaaggagttgcagagaaaaagtggagctttgaataaaagaataaaaaatggtaatgccgccattgacagcttttatgtcaaaaagaaatggaaattttacaagatcaacgacttggagaggccacaaagaatcatatggctagggaaattaggggtcccatatgctgatcttgggacccacaaaaatatcaagaccttttttcttcataacattcagccgtcaaagcactcctcctttcttgctaagcacgctttggaaagtaagggagagatcaaggaacaccctcaagcgtaccgcgtggtcatcacgtggaaggtggtaaaaatcatgaatacctctcaaagaatacagttcattcgaagaagggtccgtgatcgaagattttataacacatgtccgcgatcaacactgaaaataatggcaagcttccacgatccaagaaatctggaaagcttaggaaataaatgttattcaaattttccttcaatagacacgtgtggcacaatcaaggcagggatacgagttccgcatgggacattcgggaaaattatgggaaaataattcccggatctgggtgtcgataagaggtaatgtctaccgggagcagtttctttcagtaaggaatatgaacagcgatgtaggttttgaaagcccaggacacgtcagctccttgcaaaatggcacttcaaagacggttagacctttttttgacataggatcaaatcttgtccctgtgctagcccatggtaatgcgtgtacgcatctttgaacacactttttgccccacagcctgcatagagactatttcgtagaggagagacctttgcacgacacgtgtccaacgtcgtacatggcccctcaccagtcatgttaaactgcatgatgaagaaagttcctactagtggatggtcagatcgtccttcctgcagtaccaaccttagtaacgtgtggaagatgaaatcctaagtaggcaaagagcatgccctttgccccatatgcgcctatatatactatagttcttttgaagagaagggcaagagacttttatctaccattaccctgcaaaaataccttgccgtaactcttttgatacaaatttcccacgctataatacattgtaatctcatactatccgccctaagaggctaataatattaactcgtggactaaggatctttaacatctaaaccacgtaaaaacttgatgttcatattatttatagcttaacattttctttaatctcttaatagttcccaaaaaactcggtaaacaataatggtgaactattttataaaattggtgtggaatttttacactatttaactccaatagcacaccaaattctacactattaatgatggttgattttgaatctacaacaacttggtgtagaacgtttttttttacattctaacccttaatttaaaaaaaaaaaatcttacattttagttctcaaatgaaaaattatcacaaaagtaataattaatttaaagcactaccatattggaaaatgtaaaataacaataataaaatattaatattaaataaaataaaagcaacataacactaagttataaaactaaaaataataacataaataaaaataaaaattaaataaaataataatttaatagttaaattggttacttgagtacttagctttgaataatatcaaagtaatttaatagtttttttttactgacatagacaaatcaagaatgcagatgttcaatatgtccttcaaaatgtattaattgatcatatattggaacaccacaataatttagaaaattaaattatgtaggtgttactttatttaagttatttttcttaaaaaatgtgcaatgttcagttaatttaataaatattttattt

SEQ ID NO: 186883 - DNA, 3474 bp, Cannabis indica
tttcttctttcccgttcaaagttcaaactgcataattagaggattgacatctgctagttctctcatgccttaactaaaaagaagcatggagataatccggagttcaaagctcatacatcagtatcatggtatatactcaatgatcaacaccacaaaaaatgaatccttcttacctgtacaagagaatcatgcaatttcaactcatccaaaatatcagtccttagttttgaaattacaggctttgcatcatcatcatctgcacactcttctgccaattcataactaagaagaaaaagaagacaaaaaatcttgattctcagtaaaactaagcaacataagacatatgctttcaaatgtatatgataattcataggattgcaacctttattacatcaatatatatatatatatatatatataacatttttgtaatttcattcgttttacacctatccttgtcaatcaacatcatttcttgaagtaacaagagagaaacttagcaaaaagtagcactgaaactaactaaaggcatgccataaaaaaataataactaaagggaacggcagcaggtccatgtaaaatgaaaacaaatgcagaaactcaatttggaaacaataaaaagtaaaattaaaaggatcaaatatacatatccttgctaattttactaagctttcctaacggagctaccaagaaaacaagatcttccaaaacatcattacttataataatatacgtatgcgtagaaagcaaatgtcttaatcaaatcctatgcatataaataaatatataaacattttcttttactttctttcttttaataagaaatgaaaaatctaacttttcttgccaattgtgtcgcgatctacatcaactatctcattttcctagacatcttacacaattttcatagaaaccaaacaaattgcaacagaaagcaagaacctaaatagttgtgaattatgatattttgaattcctagcattttaaaactagcattttcactttgataggacgatcatctatcagctatctaaatatctaattctcctatatatcctccgattcagattctacactaaacaataagacaagaagaaaaaaaaaaagcaaacacatcaaatccaagaaagcattaaagaaacagctacatattccgattcagattctacaatcaaacaatcagataagaagaagaaaaaaagaaaattaaagacttacgcatgagcaaaagccttaagaaaatgagaatcttgggcaacataatgccggaaggtttcaatcttaaggtttccagaggccaaagcgacggcaaagggagtgtacatagcgaaaaccgactctctacggaacttgatccaaaaccggcgagctaagccgacctcgttatctatggcggagatggccgacttcgaaggaggtattgccattgattccggcggcgatctcccagcggagtcgttgcaaagagatcggaaccagttggggcgttgaagttgaaaaaggaaggagttagaggaggagacgagggtggtaagaacagctgtagcagggctcttgattgggtttttgcttaagaaggaacgcatccattaaacatctggagaagaaggagagagaaagtgaggatggtctaagcacgaagttagagagagaaagagagggaagaagaagaagaaggtgggcttagaccagaggaagagagagagagagagagagaaagaggtttgagtagtctgtgtatgagttggcagttcggtgggtgtgtaaaaaggagggaagtaaagtttttttatccaatcttgtggattttcttattttgtttgctacctcttcttttgggcccaggcccaataactccttttcttttcttaattgacaaaattagaaaagaaacaaataaccttttttcatacttatatagggtattctcatatgattttatatctttatgtcggtaaggtgatttatatgaaattattacattatgatcctgactatttttatcatcattttcttatcgtcctatcgtatatactatttttaatttttttttaaattttcataatggatctcataatatttatccgatatatttaaataacaaaattaaaatgcattttttattttgcatgcatttgtttataaaaattttaaattacagaatattaattgaacaattaaattgtattaaataattttaaacatattttcatgtataatctttttaaaagataaactactataaaaaaaaaattatcaatatttatagagagctttaaagaattctaaaaaaaaccatcatacaatttttttatataaaaagaaagcacataaagatatatcttcaaaataactgtcatcactatatctcacttgtagttattattatatgtaaaatagttgatatcatcaccgtatctcacttatagtcattattaattttaatcctattagatttactttgtacatgaaataaatcaaaaaaaataatcgataaatattattttttatatataagtgaatcaatttattataaattaatttagtgaatcattagttatcaaataaagtgtagaataaaaaattaaagaattaatgatatttaattaaataaaatagaatacaaataattaaaaatgagagaatttaaagtagaataaaatatttacgaaaaaaaaagagaatggatatttttttttttaattaattaatgatctctaaagaataaagtagaataagaaaatacattcatagctaccaagtcataaccccatgatagggttttttagtaattggatcaatgctatatatgagtttgttaatgcagatttttgttaactaaaattaataagcctttcaataataaatactttacataaataaaataataaataattaaatttcaataactccagatatttttatgtggttttatagttaaatttgcatactccacgagtctttttttattaatgatttgggtacagaatacaatatcagaatgatagcatttttctctctcatttttcatctctttttctgtggaatctgcccccatttataggagtataggttggcattttttttttttggatcagttcaaatgtaaatgttcatgaaacgtggacaatccccacatttcatttaatcacatgtgggataatatctaataactcgccaactactttttgtttttatcctttagacggttattgccgacttggaagatggtacctagcttgtcatgagttattcttcttgtccatcttagaatggaaaaaatgctaagtgttgacaagtaatttgactcgtcacatctcttcatttgagttaatattgcgaggtgactgtctcgctatatgaaatccgaggttgttgtatgtgcttatatttattttgctcgagtagatgaatatcctcttttggtctatgtatatcaaggtagacgtatgtcttgtcaatatcagttcaata

SEQ ID NO: 186884 - DNA, 2263 bp, Cannabis indica
cagctgatattttcccccattttttgagagttgttgaagtccaaatcgcaacatagcttgttgtacacagatgaaggttgcgcaccaaaggcctgccaagtacaggctggccggcctatgctggccatagggccgaccaacccccttagtgtggctgattagtcatttcgtcatccttcctaagtactcgaacctccagctagttaaagtattgagtagatgatttggccttcttgttgataagttaatactcccacatggcattgatcttggccacgaggacataccacgtcagttgggcaaaattcgggatgacaagagattctactgtagttaagaaaaaaaaatgcatggaagttaaaagtctatttgatgatactgaaataattaaaaaaaaaaattctccttaaagtatggctggagatgctcgaaacaaagaagttgaaaaactgttattattattattactattgttattattatataagtgtcactataaatgtctattacaacctcttagtcaacctccgtgtttgaaaatacatgtcgaaatatattttttaaaaaaaaaaattctttgttatagttacatcattcctgtaaatttttgaaaaatttcgaaaagtaatcattaccaaaaataagatcaaaattttcgaacatgcatagtaaaatagaatattgggaactctattttacatactgtaaataatttaaaaaattttaaaattttcaaaaaaaaaaatattgtaactataataaatattattatgaaaaaaaattaaaaataatatcctagcatataatttcaaacatgaaaggtcaactaaaaggttattattaagtatatttaagaaagcacaatgataaagagattccaaagatgtagattgtgacattgtgtaataacattgattagcacagataataggcatagtgaataggacaatttcttgtaaaggaggacagaagaattcgccctatatctcagtttgctttataaataacagtctcttggtcacttcacacaggtcctagacattaaatagttcacattgatggacgatcacagcatactgaatgggaaattcacacaaaaaccaccaaaaaattaaacaagtaaaagattgatatatgccacctattgaaatctagaagtcagcaaacagcagtagttttaaaaaaatattactactcaaactacaataaactaggagggtggaaacagttacacaatatgaaaggtaccaaatgaaaaccctctgaaaactttaagtcctaagtaataagtctatcacgatgtctcccggtagattacacctgtatgctgctttacaaggtcatgacttttggaggacacatttctcgtacagagcgaggatgtccttcttgttgggattcctcaactggagtagttccgctccaaaattatgtttcgtgagttcctgtttaagtttctggacagtgaattttgtgtagtcttcgggattggtctgctgactgtggctatcatcatctccctggaatatagagccaccatcttctgcttgagtgtgctttagagggcttgtcgtgcttctggatcgcttatttgctcgagttctgtcacttgtgtccatgtcttgaacagattcaaaacccatttcatagtcatctgctcttatacgcttcccatgtgaagcagtcttgagcttactatccagtgctgtttcagttatacgaactgaagtcaattcttgctgtaacttatcaagttttgcttgcgctgcttgcagctgaagtgaaagagcttcagccctgttatttgcatcagcatgtgcggcccgctctgtatccagaagatcttgaagaacttgaactgtactagccctttgctcattatttgattgcaaaagtgattctatttctttctccctttcttcaactcttccctccagcatagcaacttttgaatgagctttcatctctgatcgacgaatgctctctagttcatcggctaagtcacctttctctctatgcaaattctctataagcctttcagccctctcaatctgtgccaatctttccattgccaacctctgcatctcactcttatccttctgagcaatttctgaatgagctcttgctttatcagcaatttctgttgccctggcagcttctctttctgcaattttacatctttcctggacttcctcaaaccttttgctatcagataagtacttctgctccaaatgaatcttctcttgctccagtatcttctttt

SEQ ID NO: 186885 - DNA, 2117 bp, Cannabis indica
agttgcaataagagtttctacgtagaattctataaaaatgcaaaagaaaaaaaactattttgaagtgtaaaaaaaaaaaatgatccttatgcatgattaatatgtatatatataaatgtatctgcccataaatattaattatctaattaattattgtacatttacacatgatgatgagtataaattagtttattattactttcatcaccttattacaaattaaaatctattgatcgatgggtaggaaagacattgagtgatcatgttgaagggattggtggtcgtgatgatgatctgaaacaaacttattattactagtactagtagaataaaccatagaactgatcatctcgtcattccaacccatatccatatcattaataataatgcctccaccagcagcagttttttctttaacactgctacctctactgtcctcctgatcaacatacaagaactccagcccatctggaaccggagcatcttgattagggatattatcataaataccacttattataactgcccgatcctcatcctgaacctgtagctgatcatgttgagagctactactgctttgtcctttctccaacatctgctgtgcgtcaaacccatagccggcatctgtaatattatacgaaagagaaacttggggcggcggcggcggcggcgacagttgaggtgtcggttttgatagtagcggcggagcagaagaaggaagatgaagtaataatgggtgatgatcagtgtgagtagtgttattatagaaatcacgatgatgatctgggaatctcccttcgagattggtgagcaactttcttatagatgatgagtggtcgttgtaattattagagggttgaccagcgccgtttgatgagtaggttgggggagtcagaacaggtagctctggccagtaagttttttggctgctattattaatattattattagtattattattaattatagttgtactataaccagcttctggaacaaccatattattattattattggaataataatggggtatgcctctagtactaataatattactattagaagtagaagtagtccctgatcttttaatattttcgggcttcggctgtttagtactcagagccttattacgaggatggtccttacgttgcttattaccaagaagctttttcttcagccttgtgttccaatagttctttatatcattgtcagttcttcctggtaattgtgcagcgattatagaccacctattgttaattaataataatattaagtaaataataaaaaacaaagcttaataatatttataatcaagcgatgatactatagctaattcatatttatatataatcattttattaaaagggaaattttttatttgagattgttctcaaatgtttatacgtagaagctacctagggtatacgtacctgcttccaatacttatataaaggctgcaaattatgttatcttcttcttctgagaaccctccgtgctttatgtttggccggagatagttcaaccatctaagacgacagctcttcccacacctcttaagacctaattaataatattaatcacatatatatgatcaaacaacttaatcagcaatgaacatgaagagatcaaattcatgaagtgaattaaggattaacttttaaattattatgaatgaaatcattcataccaatcttctgtggcaaagcgatccaattaccgccggtgccatggttttcgatgtaggacttgagcttcgcatcttcttcaaccgaccaaggtcctttcttcacattggctttgtcgcagcaaggagctctgcccatttttttttttttttttttttagtttctagcttgagggggttattttggtttgagcttaataattaattgtggtggttctttgcttctctggccctataagatagaacaagaattgtgacagagagagaaagagagatggagataattattatataataattaggaaaagtgataatgataacatatggttcatgagatagcaataagatttaaagagaaggtgtgaaattgtaagaaagtgactgcgtgctatattttaataataatacaaatatataaattaattaatatttg

SEQ ID NO: 186886 - DNA, 1836 bp, Cannabis indica
cgagctcgacaaggatgtagcccatcgtttttaggggtgaacgttgagaaaattcgttgtgttcctcttctgtgtttgatattcttaaccctaatctctgtaatttattttgtgtatgttcttgtgcattttgtgtgtggaatctctaaccctagcagactgagttttttcaagggtttcttgaaggtgttcgaaccctagaagctgaaaaaagattagtcaatagggtttggttttcaaataagggttattagggcttttctttttgggtcattactgttcattttggactgatggatgttaaaatctttgcaatagtaccaattttcgcaagttaaattagcataataagactattgtataacagactaaaatgccaattattaacataagcgtttacattactaatagttctagataatgatcaaatgttcccaaaggaacaatatccaacagtatcgttcagcagattactatattaccatattaaaacatgaagagttctctctctgtccagagagtgagagagagagagattaaagaaataaaagccatcttaaaaggtatgactttatatatttacataacccatttgctgctgtagcacattaattagcactaaggtaatttaatgatgtacgaactttatgcttgtttcatattcaaagcagttacggtagagaccatagagtccaccccacacacgttgtgacccctgcagattttgtaatatccatcctctccccagttctgtccccatgaattctttatgatccagtatggcttatttttgaacctgatctgagagtaacctgcagccccataacccaccaaaagcaccccatgatccagatgccttccgcagatgtatgggcacgaaactcctcctatgtatgtctgcatgaaaaccgcattgatgccaactgcaaagtaaaattaagaaatcgttattaccaccaccattttatttttctttttaaatttgacaagagccaatcagaaagatatgttagaagtaattacttgaaagggggccattcttcaccaaattggcagcgatttgctcttcatcaagagacacaacgctgaagttagatactgatgcagcaatcttggtcttgtcaaacttgcaggtaccacgatcggacccagtgtagggatagtccacctcacgctgaagtccaccggccttgactgtgtactcataggcatttgtcatcagcccaccatcacagcctgcgtcacaagaaccctgttcttctggatcgcactgcaagaagtacatgtgtgatctaactaattgacatagataataatctctagataacgataactttattcaagtaatttcttcaccgttcccttagcatagaaaaattgtcaaagttgacatcccagctttactagcagtcggagaacccaattctaaatcaaactttggtcaccatatgttatatatatttttggaaaagtctatagtacaaacggctgttccggtaaattcctatttagttcgacattcacgagaagtttttagtataatttttgttttttttatgatagtctacattttaattatttacttttaaattttttaaaaaatttagaaatattttgttgaaagcctgactatgcgtgtaaaccaactttcaaaatattttcattgaaactaatccaaagattattaaagctctctaagtaatcgctaccttcttcaagcatcaccatcgttagtgaaccaaaataatccaaatatgaaacacatgtaaacttttttcaatttcatatttcattttatacacaataaacagatatgtgcagcacacaaaaataaaa

SEQ ID NO: 186887 - DNA, 2400 bp, Cannabis indica
ctcggtgatgacaacgggattcctagagatatgatttccaattctttgtcatttttctatgaaattcttcggttgaaagacttgacagtgtggactttaacaacaaggaatagtggagcatgttgtgtctccgattcaggattgtttgtgggtgtgtggtcgtggagagtttgaatggtacactcagtttctgtgaggttgagagcaacagagagtgaattggttagctcatccattgagtagacagagaaagtgcaataacaagcaaatagcagaaagaaacaaatctgagttttctgtgtaaggagggatcgaatgagggcaggatagcaaaggtgattgattgaggtagtggaggggagatggtttaaggagtagttgaccaaggggttgcacgggtaaataaaagaactggatagaaaaggactgacaagtgtataacacttacacaagacaataccaggacaaactacgactgagaaaatgaaaacaagacaatagcaggacaaatttccaggattaacacaggtaatagaaagaagactaacaagtgtatagaacttacacaagagacgggtattacgggtagggaaaagcacacctagacaaacagaaaaatattggaaattaatatgtaggtgcactaagacagaacacagtgaggacaatcggtagggactccagaaatggaaggttaaaatgaaagaaatgagaactggagagaggtatactcgactgaaaacatacaagtaccaaaagctggagatactctgaataatggggaaggtatttatagctacatcgcacaaagagaagctactcctaaacataactttaaatagataaacactcacagcactgggacaaaacaaagcagtaacagtcacttcaaaagcatttaataaggagaagagatgctgcaaagaggatttgaattttgcaatggacagaacacaattacaggccaacataaatgaggtattcgaactgaaattagcaaaaggaattaaatcctttctgtcgacagaattgagagggttcccattaccccaaatccctttgaaggtacaattttcaggttgaaatttaataggcagaccaaaagtgtatctaaattgttcaataaaaaaccattttctctgaaacgatttgatagtgaatagggaaaattgtaaggggaaatcaatacctgtaagagtctcatttaactcagtacgactcgacggtttggggaggaggccggagtaaatgatgatgcgactggggtggttgggtatctgctgaggaggacggctcgcgtggcttggatgggtcgagctgtgttgtgtctcagtaaataaagagtcggagccaccatgatcgggcgatctggagctgggcatgggtttcaccgtgtggaaacgtgcatagagctggtgtgaacactctggggaggaggaagaacccctgttcatactgtgagattcgagaggaagagtctggaataatgtacactaacccaactgaactaccaacttcaaaatgcaaaaaaattgcttgcatatgtttcaagtttcaaccatttcaggaaaaataatgttgttggtaagaaattataattgtaaattgtattgcaaattataacagtaatatttcattaattcttctttgagaaatgtcactcatggtcctaacatgcttatggggtataatatagttaataatatacctcatagcaataatattttccttttacttctttttttttggtcattgatcatgatatgttataaatccaacttactcactacaataaatttttgggataccggcagaaataatacaggcagaggttttttggcagtattaattggagtattactgacagatgagtaatagttaataattattttaacaaaaaaatattaatacctatagaaaaaaaaaagtaataccaacggaaaatccacctctattaatgaaggcgggagttttaccgtccaaattttaaaaatagcaataccggcagattattagaggcagattatgccggtattattggagaatccacctctattaatgagggcgggagttttaccgtccaaattttaaaaatagcaatgccggcagattattagaggcagattatgccggtattattggagaattctgattgttttattattactggcagaacctcaattaatgttttttatataaacccaccccataactcagaaaacaacttttttggttgtcattttttccgattcgcccatttttcctccacccatttcttttataaaactcacaaaagtactattccaccaccgtgcaccgccatttttcctccatccattacgcgactgttagataatgtttcttttaccatgtttctatcatttgtcattttttgttttt

SEQ ID NO: 186888 - DNA, 5690 bp, Cannabis indica
tgaaggttcagctcaattccatggttgttggctcaagaaataattcattgaattcattcaaatccgtaaccaattaatttttaacatgttgtgcatatgtaatgtacacatattgccaaagcttatgcccccattgtccccaatcacatgcacaggttctctttttatcattttcaaaattataataaagtgggccacttttagtgagacatcaaacacttcatatcatatctatatctatatttattataaaaaatcttgaattacaccatttttgtttaattttgtttttcttaatgcagcaaacttgataaggaatcccagcttcgaaacagggccattcatgttcaatacaaccactggtgtcctagtcccaccaaacatagaagatgaccactccccacttccatactggatggttgagtccctcaaggccgtcaagtacatagactccgaccacttctcagtcccacacggcaagcgagccgtggagctcgtggccgggaaagaaagcgccatcgctcaagttgtgcggacaatccccaaaaaaacttacgtgctgaccttcttagtgggagatgcaaacaacgcttgtgaagggtcaatggtgattgaggcctttgctgggagagacactgtgaaagtgccttatcagtccaaagggaaaggaggttccaagcctggcttgctcaaattcgtggccactcagagtaggactcgaattatgttccttagcacttattactccatgagaactgatgacttttcttcactttgtggccctgttcttgacaatgtcagattggttagcctacgtaaacctacttaaacatgatcatcatcagtgagtttaatggctttggggagttatatataaatttaaatatatcaatatgtatggtgaatcttgattttgggttatgattgagtggatacttttctcttgtgtttcgcaagagaaatctgcagagggaaattagtgtgagttttagcataatctgaaaaaagaaaaataaggggtaatgtgttacgtatttatatatattttgtattgtgcatcatgtatactaaaggcgaaggatatcagaatagtgttatgatagtttcattttgttgagtgttttttatgtaatcctgcaaaatttaagtcataaactcgatatttattaatgatttccttcacaaaaatcagcttcttaaaggccctacttttctttcttttcgatatgtctacagaatatatagcctaagtgaaaaatgaggagttcaatgtattgattttagagaagaaatactattttggccttcaatttttagtttaataccattttgtatgttctgaatgtatgataatgatcctctattttgaaaaaagacggccttttggaccaaaaatatttagttaaaatatcctttaatataaccaaaataataaataactttcttacaaaaaaaaaaaataatataaataactgtttgtaataatactgttaatatttaaattaattataaacataaaaatagtattttttattaaaataaaacaaaattaaatatcacaaaaaaatcttgtataaatttaaaaaataaaaaataaatcatgaaactctccacctctttccatgtcgagctaagttaaacaaatttaaaccgatcaaactcagaaatgaataaacaaattcatcaaacatcatttaccctttcctccacaacaagctcttcccttccatacccggccagttaaccaacaacaaacaacaaatgctaatccatgacttttcactttggaatttcaatctaacaaaacgagttaaaagatcaaactccattggtaaacttccctgttgaagcattaattgactgacaatcacactgctaggatagaacaatcatcggtattaacggaggaggcaacgttcctgagatgttgttagaagcctagtccaacagaggagagaacctgaaatcaaatgcaagcttttccatgagatcacttttgctaataaagatgccatgacacagtcaaaacagctaagtttatctttagaaagcatcgatgcgacatcaatacaggtaagattactcctatcagtttctatatacactatcttttaaaatacaacaaaatatatatatgtatatatatataatttccaccggcggtaagtgtttattttttgtaatcgctcagaccgcaccgttattttgtggtgcggttttgaggtcttgtttggaaatatgctaaattagctaaaaccgcaccaccacctctacccaaaaccttataatcatggagggaaaaaaaatatatgtgaagaagtggaagagtgagataaataagtggggaaaataaggaaaagagaaatgtggagagaaaaaaaaaatgatgaaaacgtgaatatagtaagtactactagtgatccaaatttgaacattatcttgtgaaaccttcttctagcatggtgactacaaaacctgactatataatataacaatcgaacttgcactgaaaaacatgaccataggataccgaactaatattagaatttccaccaataaggggataaggagctttattttagtgtagctcacagtcacacttactgtaaaaagaaaggttttaaatattgttgtataaaagatgtcctatttgtacattttttttaacctttcatttttttttttctttaatgattcaagatttccgtctattttacaagttccacttatcatcaatcattgaatctaggtactcaaaattttaacatttttcctgtttattgcacagctccatctgtatagaattgcacagctaaattttaactttcagcatcgcccacaagaaaagttgaaaaacaagtaaaattttgacaagtaatggttaaaacaaaaacaaatagacacgttggagaatgttccagttcaaatataataacagtttagttaactcataggattttgtacatgtgaaacatgaaagtactagctaaaagagagaaaataatatcacctcaaccttgtacgaaaaacaatataattataaatataaatgaatgtttggtaaacatttaaaatataaacattacatatgcaaaagatacctaattaagaaaatagagctttattaggaaatcaaagttcatgggtagtgtagtcgtcaccaatatacaacggcgagccattggtgcattgtgcatattttgagatgtctagcatgagagttgaaagaataaagggggattttacaagtgtagcacggccatggacttggtcatgcacgatgaagcatcaaattcatgagttacatgatttcttgatatgtgattccactgcatctccttatctgacacatcacatacagtaaaaaaatccaagacttgaccaaatattttgaacatttcaatgccaaatattagatttctatcagccataaaaacagcattccaatccattggagcatcaggatgtactgaaacctccgtccaggtaagatacaagagatccagctcccacagttttctaacagccttgtttctccttcctatttgaccatccccttcgcaccaagaaactgagagcatgaatagccgaccattgctagatacaagttttgggtagtactcgtgaactcgaggtgggaatgttgtttggataccgatccaaaaacccctttctatatcataccctgcaagtttgtcagtctcagagtaaacgtaaaagatccccttgcagacaactccagaacaaacaactccaatatctacaggcaatctttgaatttctgtccatttatttgacattgagtcatatatttctccagaatctaagggttcatcccaagatccatgaccaccaacagcaatgagaacaaaccttttgcaacttctcatccctgtttgatcacttcttggtctggcaaacttgtatgactttctactgggcaatgaagtctcattttcttcaattgaatttctgctatgacgcctcaaagagagcctatgagggtcttcataaacatccgagaccccaccaatccgtgttctgggacgcctatcttgccgacatatatgcatttggccaacagaaaaatctgtactcacctcatgaattcccaaaataggtgaagatcttgcatgcttcataggtgcaactttacgccatgatttagtcaatgggctaaataatattacccctttatgtatcttgaatgaactcctatctaccttgccaaagtttgtcaagctagaacacccgccaacgatataaatatcatcctggaaactggcaacagagaacaggaacctccctttgagaatgttggcatctatcctgtaccactgctcaagggacacatccaatgcgtgaatttccccagagcaataaccatcttttacagcaccaaacataaacaaccatggattttgatgtaaaccttcacgtctcatttgcaaaaatcgacgagtcgtagttaagtgtctccatttcttgcagacaagccgtgcagtcatgagactgaccagtgggagcctcactaaacacatttccagtatgtcatcaggaagaaatatgtgcattctgctgtttcctactgactcttcaagttcaaaatcctttctgttatgtttcttccaaaatctctctttcaccccgtacgagaagcaatcaacaccagtttcctcagcaccgcatatcagtttataccccttaccttcatcactagcacttgacctcctcctgctactcggatctccaaattcatcacttgtgtcagcccctactttgcagccaccacctataccatataaagttaaacatctaatagatattcccttaacagcatcgtcttcctctgatgcacttctatggttcttcttcctcaacttctggctgacacttcttaccagccgtcttgacacactcagtgcttcaaaatcttgactaagtgattgttctccagtcagtctctcagaaaacattctttagaagtgtcctttgcaattatcaacacttaccccatcacagacttcaaagcttctatcttcaccagtgatgacaaaacctggtacatgtaaaaccatacaatagtcatttatcaagattgataactaaaacaatctcacgcaagcttatggctatatgtttagaagttgaattttggtgacgaaagaaaaaggtagggaaaatgtaggacaaaagaaagggaaaaaattatcatatttggtatggaaagaaaaattgtataggaaaacactcaaatcaacaaaattttccatttcaaacttgaaaatttgatttatttttttgttctccaaacttttttttccctacattttttccctacctttttcttttctccgccaaaatccaactttcaaacataacctaaagagaatttacaactatgtaacaaaacaaagagtatcccatcactatttctcagttcctctaataaaacatcagtagagccaacataacaataccaaaacaatagaccaaaaacatgacacaaaatcagaagaatgcaaatctcaaaccaacaaaaaaggggtatccgcaacataatatcaaaagaagcagagtataaacctacaaaactttactgttattggatcccacgcatctgtagctttatcaatatctaataacatatctatagcttgtaccaaagccactgcacccattctaaagta

SEQ ID NO: 186889 - DNA, 5704 bp, Cannabis indica
aaaagcaaacttacagtcctaggaacgacaaatccagagaaaaggttccatattgagtagaaggcagccgaaataatagaagcaacgtgattatttggagtgattcccacagccatcatgccatagaaagtgaagtaaagcatcgaaaagaaggtgaagaagagataccaaaagaactttacagcagtccattcgaaacccatcattgcatatactatcaaacagtaaactacagcttgacagataatatatggaatttcaactaccacctgcaaagatgaacatatataagtatactaaaaatatgtatattatattggtagaacactattttagacccgtgttttacaaaatttaccgatcagttattttgttttattaaaatacaatttggaatcgaggtcgatcttggtctatattttttatcctaaccctgaaacttcctattccctaactctaataattgtgattcaatttctattctaatctattcctaactaaaaaataattggatcaaattgagctcagaataatgataaaatgagacaagttcttgaaagtaaataaaggttattacctgtccaaatgtataaggaaaagctgaaaacattcctgcagccttttctctgtaaaatactgttctttctacgccaactactggttgtacagatgatgaattttggacaccaataaacagaacagcactgtacatggatcccaatgcgttggtgagatcttgtttattggacctgtaatttcatcggatacaattaaaggatgattatttatatataaataactaaaagatccttattgtagcttattaccttttagatcccaagtcccaaaacattgtgccaaagatcaaggctatgaaagtggtaaacatgaatctaacagcagtgtaaagcgggtttcgccagtatgactgtcgttgtttccataagcaagcaatgcattgagtgtacaaagatcgtgagaactgagttgggaaataaagatccttagaatcaggagctggagtgctcaattctttgatcagttctttgtttctcctgaaggaggagaacatgtattaagtcatttttctactagctagccaaacaaacagcatagtaaaatatgttgcaaataggtactgacttgtataggtctgaattcttgtaaatgttggcgaaatcaacacccaaagccatttcttgtgctgagctcgaaacctctaacatccaagttcctggattgtaaccttctttgattttactcacaccttcaatagccttgataggccagatttgcatccatattagcaatatagggaaagagggaaagttaagcattactgtaagaggctcaaagaaaaattatggttaaacaaaacaagtacttagttctacactacctcaaaatagttgattagatggcaagaatggcggcctaatggtcccacgtatatctcttctcctccaatcttcaatagaaataactgcaagtgcaaaacatgttgaaattagtaagttgtgaaaatgataagaaagttaagattaggatttaggagaatccttgatctcttagtcttacctcatcaaaggcttcaaagatgtcaatacttggttgatgaattgtgcacacaacagttctgccagtgtccactgtgttcctaaccgttctcataacaatagcagcagccctggcatctagtcctgaagttggttcatccatgaatattatagaagggtttgccactaactcaactgcaattgtcaacctttttctctgctcagttgagagaccattcaccccaggcaatccaactaatgcttgtctaagtggaacgagttccacaagctccatcacttcctcaatgaacatctgtccaatacataacaacattatatcatcaaaacctactagcttcttttctctttttcatttagcttgctatttaaaaaagaatttacctttctggtatccatatcaacttcagacggcaaacgaagccacgctgagtataggagtgactcataaacagtaacataaggtgagtggatgtcattttgctcgcaatatccagaaattcgtgcaaatgtttcttgcttctttgggtaacccgaaattcgaatatcgccttcaatatatccaccagtttttctaccagcaagcacatccatcaatgtggttttaccagctccactaactcccatcagtgctgttaagacaccaggcctaaagctaccgctaacactcttcagcagaaccaatttatcctcaaccacaccttgacccttcatttcctgcaggttcaagtaaaaaaaaaaaaacaatcaacatgcttaatcatctgtgatcaaactcctaagttgaacttgaattcataattacaatatgccatttagaaagtaataataacttacttgaggcatgtccactgagtaacaaacatcatcaaaacaaatagaatgcggttcaaatggaagaatcattcctttttttttactctgattttcacccatgttttttggtctttgcgtcatttcaatgacttctccttcttcgtcattttggatatcaccactctcagaattttcattcgaaacagcttgtctctgctctagtgctgcacaatatagtctaggaaattatcctcttttttttttttggagattttattaaatataaaattaaacaaacttacgattaaggtaagtgagagccaaagtgtacacaaagttgaaaatgacaacatatgcactcagcgccgcaaacccaagccagtaccaatatgagtcagtaaagaatcctcgtgcttttaaaacttgaaccccaagagtttctgttgagtttggtggaacctaataaaaaacaatgagtccaaccacaaacaaatcaaatgatttttacaaaaagaaatatctaactaaaagaacttccaaaccggtaagtttctcaaaacattttacatgtttccatttgtttccattgaactcgttaactacaactccagtctgaccgtacatcaatggtgatatccagtaaccccaaatccaccaacctttgatgaaatctgtttataatcaaaagaaataagcagtaccatccattaacaaccgaaaaaaaaaccatgttttctttcgagtttagtgcagtaatgtacctctagacaacacaaaaccgcctagtacgaaaagcaatagcaaggcaaatgccccaaatgtgttggctatgatcatgctcctaccaattgacgcaatagctcgaaacagtccagaggccatctgattaataatgacaaagagaacatatagcttaacaaccctgcaaaaaagtgaagataaaataaaaaccaagcgctgaaaaggattatggagcatcatatccaaataaagtcactatatagtttttcttatctaccttccaaaatacggatcaaacccaatgctgtagtatgtaatggtcatccaaactagtacttcaataaaagcaacaggggccttataaatcattgatggaagagcatacgcccaagcagggaagaattgaagatctctttgcttgtaaaacactggaagcttgacaatggtcataggtacctcagacaatccattgaacataatcatcaacgtggagaagaacaaagcaccaaggtagattgaaccatcttgtaaagttttgtgatgcatcttagttctcaggaatattgtggcagaaatcagccccaatataccaagctagaagaagcaaataaacaaagattaataagatattatatatgtacttaatagtatacgaagaaactaaagaaaagaaaacctacttgcacaatcttgaagatgtggacgaaggaatttcttttcatgagtaagaattctcttgacatgcatgctttcaagagctccatcttgttgagaccatagggttttgttgtcaaagcagctgggtggctcttggttttgtcaaatggaattgaaagatgttcaactactttctttccaacgtgaaacgattggaatgcttcaacaaattcattgacagttacaaacttgtaaggttggtcactccttgcccaatattgagcctggtcttttcttgatgttacctatagaaatcataacaaaaatagtattattagttttagttctatatacacaacagacaaaagattaaacaataatgtatatagtatttagaaagatgaatagttgaactgctcacctcttgaagaaaatcagcaatagccttcctttctggacatttaaaaccagttaattcgaagaactcaagcacattttcacgtggaccctgatacacaatctgaccatcagataaaagaatgatgtcatcaaaaagatcataagtctctggtgcaggctgtagtaaagagatgacaatggtttcttcaaagatgtgggcaaattgcttgagtgagttcacaatctgaaatgtagttgaactatctaagccagttgaaatctcatccatgaacaatgcccctgctggcccgacgagcatctcccctgtaatttaaaataaactatcattatattatttttctattaactgtggtgaaacaataattacatatgtaaattgctttcaaaaaaataattacatatgtaaattagtgctaaatctaaaagttttcgttaaataatggggctcaatacaatgatttttttaagggagccaaaaaaaaaatcagtaatatagccaaagagatacagcttaactcaattaagtaataatttcgattagattatagttttattcaatcctgacataagataaacagaataaattaacacttggttaattaataatctcgataaaattaggcaaagagatatataccagttgtgacacgtttcttttgtcctccagagatacccctcaacatttcattccctaccattgtatcagcacatccttccaagccaagaatctgtaattaaggcatccttcagttcagtaactaaattgtacaagaaattaaggcatccttcagtaactatatactggttttcaccttaataatataatctgtgatcacacttgattcttggccttctgctgaagctgcctacaataaagtgttaatctatatattagaataagagtaatactagacccatactcaaattacacactatttacacataacaatgtgtttatatttttagtcatatgcagttttacttgtattatcgagattaattctacatcattctgtgtaaaaaaaaaaatgtatgtaatttgagtatatcacaatcatgactcgttaggataatatcatatagttataaatcttttagtacaataagttctaaatcccaccttcataaatatggctgcacatggaatcaaaaagttatttcttgagatgctatcttatatatactaaaaatttaagatgaaataaaatatttatcaaaagttatttgagacaataatttgtttcttatgtgttgctataaaatctttaaaatttaaactagcgggttagtgagaacttcccaacataagcatttcttcaaaatatttctactaaacatgtatagaacttgcaggttaaattctttctttttgcacaattcaaccccaatactaatttgggtagcatggttgatttactagaggaagaaggagatatatcatatatgtctcaatggaatttgttgaagattgttaaaaggctttgttataattgatt

SEQ ID NO: 186890 - DNA, 3789 bp, Cannabis indica
agaaactcttacgctgttcctcacagcgagttctctgatcaggttctagtctatatgttattttctttatttaatctttaattttgcttctttcagaaatttgtatacattaaaatatgtcatttctatcatttcatgtacgagtacctaaggaggaatttgaaggttttttggattattatgaaggaaagtagaaagtgtttcatatgtatttaattttttcttaatgaagtgaatagaaatgctcagattattcgtgtagcaattcttcttctgaggcgtatcccccctaaatcaaataaagttttggcatttttatctgatgaatagaagaagaggcatatatgttgattaggctctgttgatactgtgctagaagtttctcttgggtcttacttttagaagacgaataattgtttccatagatgtgattacgctctatatatttgtgattcttgtgccagttttgatcattgtgaacatgtagtgaaatcaattatcctttgcatattgtagtgttcctattcttaatgcttcgcggaaatcatgcactgttgaatgtttacttgatattaaagctataagatgaacaacaaaagtaaactcgttcgaaatggttttaacagtttatttttttttgccttgtcttcagtttcgatcacctttttaataactcaagaagtaactaaaattatgttgcacactgcattttgaaatcctctgcatcttttatttacttatgcctttttcttctttaatatggttgcaggtagctttggatattgactaccatcacaatatgttgatatcccaccaaaaggtgaacccgaaagaagttattgttggatggtacgtcttttattgtatatgcttatacacacaatatatattagttatgttttttaagtatttctttagtctaatgattgtattccttctcacatggtataaaaatgttgacaatgtgtaagtgttggtgtttctgatttatttagcgttttaaattttaagcgagaacgcttgtcactggcataagtgttatatttgtcatttgatgatgctctttagatcatcaagagtagtgtctatagtgcctatcttttgaatcacttctgaagatgtaaaatagtttgagtttccttttcttatttttgtacatgaatgtttttgtttcatgattcatttagcgtcctcttctaaaataagaaccattttccgaaatctattatgtttatgcaacatttttttattcttacaatgaaatctcaaaactttcactttgtttacgattttgcatttgttaatatatgcaggtattcaactggattaggggtcactggtggcagtgcattgattcatgagttttattctagagaagtacctaacccagttcatttgactgttgatactgggtttagtaatggagagggtaccataaaagcttatgtttctgctaatctatctcttggagaccgacaactggctgcgcaatttcaagagataccattggatcttcgtatgatcgaagctgagcgagttggatgtatgtatttacttaatattaccactcaatgttttatttagttcttgttatgcttgttttattaagttcttgttatgctcttcatgtgcatttgaagtttgttgtcttggattggtaaagcaactattatgtttgttaaatatgctcattatttttctgtgaataatttatttagattgtctattctactttctgtgtgatcaaatcattttgggaaataagaaaatctagaagaatgcttagtttgttacatttcaaattaaatttctgattaacgttgttgtgatgtgggattgctagcatctgttaatgactatctgattggaagctataattttaaataatgccagatgatattctaaagacgacagcagttgacaaaatcccaactgatctggaaggcatggaggccacaatggagcggcttttagccctcattgatgatgtttacaaatatgttgacaatgttgtggtaaggttttattgatttttttggcctaccacacccctttattgtttctagttaaatgctgtaactattttccattcaggaagggcaaattgcaccagataacaacatagggagatttatctcgagcactctagcatctgttcctaagttacctccagcagctttcgataagcttgtcaatgacagtctgcaggtaaaaacaaatgcgcgaacttttttattatcagtgttgacattaagtacatgggtgcacatgggaattttaaggttgatccaacccaacttctaaaatgatcgtgtccaggacatcagtgttccatgctcttacatgtgtgtcagtgaatgttttatgcttctgaccattgttgcatcgagaagtcagtctattgcgaatttggcagcctcggctatgaatatgttgttatggatgtcctaatatgtcaatctggttatgtgcaggaccatctactgttgctgtatttgtcaagcatcaccaggacacagctcggtttagcggaaaagttgaacactgctgctcaaattctgtaatttttgtccattttcatgtgatccctgtagaagacaagttaaattgacctcccggccaccccaaaaaaaagtgttatggttttctttagatggccaacttcgagaaatgtggctttttgatttgagagaaaggttgtattaatatttttgtttcatttttacctcaacgatgttttgctttaattcttaaatatatgtaggctgtcgttaaaattttataagttctccgatgtttgaattttgtggctatcaagaatccagtctttcttcaattcctagtatattaaaattgcatcctcactagatgcctcaaattaacaaaaatataagaacgataaaatgtatgaatttgtattttgtaagaacgatataattaacaaatgtataaacgataatatgtcgtctaattcatacggattattgtgggttaggacgtgtgaaacgatactttgtttttgtttttttgctaaggaatcagtagaaactttattaaaattcaaaagtgcaaatattgtttttgaaatgatgatcagcttcccaaaaagatataaatccattacaactataggaatgactccattttgctaaggcatcagctggtttgttaaaagctctaggaatccaaattcacaattggacttgtgtaacatattcaagagctggaaaaattcagctgatgccatattatttaggttggcgttaaggttaaattgtataacaaaaaatcgacactaattaatttgcatatatttaatatactattaaaattattgatatatagttaaattattatttgttttcataaaaaattataaatcataaaaaaaaattcttataaaaatataaggtagcttatttacatttgatattaaaattttattcattattttgataatttatgataacttatttaattagtatttacaacattatatatttttagtacattgtttgaatgagtcaaaaaaaaattttataattaaaaatattttataaaattaaataatgtaaaataaatatagtctacacgctaatatcatgaattgagttaggttaagatttctggaaatgaaatacatacagatgtaaaagttgaccaattagacatattaaccagtttaacatgtacacaaaaagcaatactctctcctacctgactctttgttccaatttttttcattttagtggatatgtactcccgtgtaaacaaactcttcattcactc

SEQ ID NO: 186891 - DNA, 3354 bp, Cannabis indica
aaatattcttaaatgtaaataactatgctcattattataataagttatattcctaacactttattaaattaacttcctttcatatctcttaaatctaataaatagaagttatgccatcataaaagagggcattatacattaataaaggtaatttttttttttttttttttgttaaaataatagttttttttttgaaaggtatgtgaaataatagtttacagttacacagcctagaatgcattaaaatactattttttttgagacaaaaatagaataaaaatgtatatttaattatttataaaaattggagaatgaaatatctacagtttatctgctttctgtttcaaagtcaagaaaagttcttcatttttttctgttactcattcattcttaaattacttttttatataaaaaaataaataatttttatattttcattgtctctaattccctcctttctttctgtatcacatttatactcgctttctagatatttgggttttaaatcggccattttctaaacaagactgggtttttaatctaggtcgagatcgagcaccctgtaaggaatgccggtgagattatgatcgatacagctttttggtgagtcagcttttgatgggtttggctcgcttttttgtgttttcgaattatgaacatcaatcgatctctgtagttttggcaaccccagctgttgattcgtgaaaaaggtttgatttttcttattttcgatcgttttctagtattgggtattgttctgtttgaggattttgtctggttttggaggttcttgttgatatttattgaaatgggtttgagaagcttttggctatggtagagaggaagaggattgtattgtagttgcttttttttttttgggtttttggtagaaatgaaaagaccaaaaggtgaacctccggtgtctaggaggttcagattatcacaccttttgttggttatagcagcattatacttggttttcatatcatttaagtttccccagtttttagagagtgcagcagtgttgaatggtgatgatagttatattgaattggatggaacaaagattaggaactctgaagattcagagataaacaaaccttttttcagttctgtttataaggatacatttcaccggaaattagaagataaccaaaaccaagatgccccagtaaggcctagtaaggaaccattggaagaggagagaaatggctctgcacctattagacctcttcaacatcggtatggtcgaataactggtgatatcatgagaaggatgaataggactaacaatttgtcattgcttgagagaatggcagatgaggcttggacattaggtttgaaggcttgggatgagttggataaacttgatgtaaaggagactgctgagacatctatgattgagggaaagccggagtcttgtccttcttggttatcaatgagtggagaagaattggcagtgggagataaagtgatgttccttccttgtgggcttgctgctggttcttctatcacattagtgggaacacctcattatgctcatcaggagtttgtgccccagctcgcgaagttgaggcgtggtgatccactggttatggtttcacagttcatggttgaattgcaaggcttgaaggcagtggatggagaggacccgccgaagattatgcacttgaatcctcgactgaaaggagattggagccacaggccagtcattgagcacaacacttgttacagaatgcaatggggaggagctcaaaggtgtgatggtttaccatccaaaagtgacgaagacatgcttggtatgttatatattgcttactatatatatacttgtctttttattaatgcatagaagaacacattatttaatccatccagttaaggattactgtagatacttttatgtatgaagaaagtatttataagattgggaaaatataaatcatttactactgaagttgttggtcctaaggagcctacccaaaggttcaggccggtttgtaggaagtgggcgatcgatacatttttgtatttcgatgagaagttattgacctctaaaagcttttactaaaaatttaagcttcttattacttaattcttgcttgtattcttaatttatgcttttaccttctttttcaccattcttgcttgtgtcttgtaattgtttttgcaaatatcgtcagttaaacttatgttctcttatctctgcatagtcaggactcaagtcaccctagcattgtatttgttataatgtgtttctaaccgtatgtttggcagttgatggatttcggagatgtgaaaagtggatgaggaatgatattgtagactcaaaggagtccaagacaacctcatggtttaagcgattcataggacgtgagcaaaagccagaagtgacctggccatttccatttgtggagggtagactctttgttttgaccatacgtgccggtgtagaaggatatcatattactgttgggggtaggcatgtgacctcatttccatatcgaacggtaattagttgcatacatcacgagcatgttgttaacttattagagccttttgactttattacagctgtttttcccttctttactttgtttcccaatttattgtatgaaacattaaagttctttcttcgtttgacctttttctctatccatttagggttttacactggaagatgcaacggggttagcagttaaaggagaagtggatattcattcagtgtatgctacgtctcttcctgcttcacatccaagtttctcccctcgaagagtattagaaatgtcggagaagtggaaatcccatcctgtacctaaacaccctgttcaggttttcatcggagttctctcagcaaccaatcactttgcagagcggatggctgtgagaaaaacttggatgcaatcatcagcaatcaaatcttcacgtgtagtagtacgcttctttgttgcactggtaaggatttcgctattatgtttgtcatcaataattagcatattgttttgagcgaaaggttgaatgattgaaatcagaagcaataaagttgtagctagcaaaattaattctgcagaatatattaaaaaatgaaaatcattttgcataatattacttgtctgatacaaatttctgtattggaatcccaagaaaaagaacaaaaaataatcggtattgtcaaaatgagagagatagtgaatgtgtactagatattcggaaaaaaatgaatttcatgttactttgaagcggggaagtggggaactaggttacttttcggtttttagctgagcttgtattttttagctggtggatcttttaaggtatgaaatatttaagttaagactgtagtatagttaattt

SEQ ID NO: 186892 - DNA, 3978 bp, Cannabis indica
attaaaacaaacaaaatatacattatctttatactattataacaattataaactgaccttgagaaaaatcatgcttggaaacacaaaggtaactggaatgagtgctagtgaaccgaatagattcacaaagttgcccatgaaaggcaaggctgttaccacaaatgtgttccctgcgaagaaggcgaatcgaagaaaaattctgcgtttgatgttctctttcgagtgaatgctctcttcgagttggaggaaattggtgtccagtgtctcatgaataggtgtcacatacatctatgaaatacatgatgtgtagtaattaagtttttgttattatatgttaattcccaaaagttgacattactcattatttaacatgcacattgttatgtttgagatgaaaatagattttttttttttaatgtaatttatagagtgagatattctttttttatagtgttttgtagtggatgttgagaattcttagagtgtctagtgggttaggcaaagtaaagtgtatccattaagcaaagaattattattttattattatagaaatgataaaaggtgttagtggtgtcgaacactctcctatgtgttaatatatcattggtctaattaagtatcgagttccatataagcgacatgtttagaggtgttgtgcctaataagctcttattattattattattattattttgacagggtgattttaacttgtgacctactactctgaaaagaattgaaattattaggtaatgtctatttttcaatcacgtttgttatagtttttacgcaacaataattttcataaaaatgtttttttctttatgaaaactgatgtttcttaagatcatgatatatatagccttaaattgatgttgacataaattttgagattagataaaagccttacatgttgggacacaattgtttgaagaaagacagcaagattgataaggactttaatccaatttggacctttaagctctttgggaaggtattcagatacctcagagccataagcccagtatccaacaatgcttacaccatagtagaatacgagtcccaaactatactgtaagccaattgcttttctcatgtttttcacagctggttccctcagagtagactgaaaaatataactattttatttatataactactaattaatgtgaaggcacagaataatatgtataaaaatactaattaatacctgtatctctggtaacacaccagtagtgttacaagcaacaatggctgaaattgcaccaaagccattgaacaccttcccaactttgcttccgggtatctcataactgttttttgccgaatttgttttcccttcaaaaaaatgagaatattgatctatatagtgtgctcttgtatataatttctaaataatgtttaattaccttctttaatcatcaacaccaaaaggatgatagtgtatgagaaggtgataacagtagaggctctaatccaagctctcatggcagacattgttgggataaaaaaggcaaacatgaagaaccccaaaccactgatgattatgaaatactgcagcctaaagggatggtcactgagtattgaattaacttcctatgttttgagaattaacaaagaagaataaataaagcatcaatttctttatatagactctgtttgtgtactaatcatgtcttggaaagagttgggatcgaataccttaagtgcttctccaccaaagagaatgaaacccatgttaccaagagtaagaaccataaattgtaaaacccaagtgatgtaatacattttttcaccataaacgtagcccataagatctctgtatctgatgaatctttggccattgatatagtgaaatgatgctagaagccaattagcataggcagagtaaaatcccacaacaagcaagcatgtgataccccatttccaacccaaaggcactaacattagatttgaaaaactcaaaacgtatccacagtttaagcttgtcaccaacatcaacccaacttgttgccatgaatctgcacattcgagcaatcccagatgatggtcttaataattatcaaatgattaataatgcatatgaagattatcattacataccaaggccgatgatgtgagcagaagcaggaggagcatattccttattgttgttctcatgatcaatattagcctctagttggtgatattcttgttccatgtttacttacctaaaattatttcttaaatgagctaatttcgtctctatatatatatatagatgaattaattactcaataaaggatcttgttaggtatacacaataaatttagtatttttactgtactaataatgcattatatagtgctgacatagttggggacaaaaatgtgtcagtatttatatacatatattaatatatattatctcgttagttaaatttaatatatattttcgaaacccacttgcatttaaaaatgatttcattaacaaaaagacgactttgatttgagttgttggcttctacagttctacttatcatcttattatttggtccattttgtgatattgctcagttggacttgtacagacaacttgttattttttcgctgtagaaaagatttccggtttccaaaggatttggattcattaattagactaaatatagatttgtagatattaatagtcagtgtttttgtaatcaagagaatattattattaatattattagcctacatacaagtataattatacaaataatttactctacgtgcactcaatagacttaatatatattagattaatagaacgcatctaatatattttagattaatagcacgcattacacgcacatcactctcatatatattttagagttttttatataaatatatatatatattacattaaaaaattattgttaattttattggacaaaattattttaaatttattaattaatttcggttatacatattatttatatgttttaattgccttaaattatttgtctatatatatttattagatgagagttatgtggcgagccacgtaaatattaattttatataagttttagtggtttttgtttaagaattcagtaactaagcaacgataacaataatggtagaactttgttgattattctttaattttttagttttttaaattaaaaatatattatcttataatagtaaaactttttttttaacaaaaacagtacattcacaaaaattattacacaaggagagggaaatcctctaacacatcagaggcagtcattaaaaaaatatctccattccaaaaactaaaagttttacaataaaaacatccttagctataaaatgcaccacttcatccgtggaacatggctggaaagacacatcaacaataccaaattccccaatcattcgacgtatatttgaaacaaataaagtccattccccacacaagtcaggtggccttccaacatggcaacacccatattataatcaaaagaaatcttacaacgctccaaagataacaaaccagccaacttattttcatgtttaatagctagcaacccaataaaaataagagagaagggtctattcaagaaaataccttacgctgcaatgatctcccccgaatgatttcaaccactccaccagtactacaacaatcatcaatctgattaaccataacatcaatattaatcgtcacctcgtcaatccctcgagattttcacttacacttcgacttatccacagccaaacaccaccatgatttttattccaaaactcatgtaagtaaccaacaacccaatccagagctcgttccatcaaaggaacaaaagaattatgtaacatataattacgcatatactaagcttgccagaccaatacaacaaagaaatcaaacctgacatttggcaatatccttgcaatatagctgagaaagtcaataggatcttcatctccatacttacaaacaatcttcccaaaactagcaacttttcat

SEQ ID NO: 186893 - DNA, 3220 bp, Cannabis indica
aatacctttacctctatcaattggagacttggatttatcattttgcttgattttttgatctagttcaaaggcacacaaggaccccatcagctattccactttcatcttgctaaaatcatttgcttcttccataaccaacaacttagcatcaaatctgttaggaaggactctaacaatttttcttactatcctcaattcatcatgttgtgctcccaaggtaaacaattctttatcaatatcaaataatctttcataaaattcagataaacattcattatcatacattctaagattatcaaacttggtttgaagcattatgaatttagatcgcctaacataatgttgttttttcaaattgagtttgaggaatttgcgaagcctctttagcagattcataagaagatataagtttaataaaaccttcacatagtctatgaaatatcgcatgtaaagctttattattgtaagtagataacttatcatcttcattagaccatttaagttcaggttttaactttttattacttttagaatctgccacaaatagaggagaccaaccctaaagaattaatctccattctttcacatcatagggcttgacgaatgctctcattctaaccttccaatacgaatagttagaatcaatgagaagtggaggatgaataatagaacttccttttcaaagggaaacatattccaaaaacataagaaaatgttaaaggaccagactaagagtttagagtcttcctttaatacaaattgaaaacccgtattttttcatataccaatttatttatttaataagtgtaataaaatcataactataaatacatgaagaatctctggatttaattgaacaacttcgagaatagtcacaggttcaactccaaatataccaaaaccaaatcgcaagaaacttcttttccaaagtcaaaattagaagatttgaaattcaagacctagttttgagaagggtatttccagcctctcaagagccaggagtgggggtgttaggaccgaatcgggaagctttgtatgaagtttaagataaaataagtgatggaacctatcactttagaaggctagatggaacaaaaattccaagagcatggaacgctgaccacctacgccaatactatcagtagactgggggtggccagcttcctttttactctttttttcgttttatttttatgttcaatttccatgtatgcctcagggtaggaatcatttgaataaagaaggaatttttcatttcatgtttagtttctcaaagttttatcttgtaataagtgatcaaaagtctaaactcttaatcaattgggcagtagcatacattatatcattataatgttatacctcttccataaaatataactaaattaacagcatgtataagagtaggaagtattgcaagatgctggagctctagggaaccgaaagtaagccactacattaatatacttataattaatttagtacactttataattaactaaggttagtttaatatagaagttcaggcttcataattaactcaagttaatttaacttagaagttcaggcttcgtaattaacttaggctaatttagcttagaagttcagctttcatagttaacttaggttaacttagcataaaagtccaggctttgtagttaactcaagttaacttaactaagatgtttatgtttcttaaataaataaattaatttaggttaattaagtatttaagttttaaaaagtcgtagaagtaagtaacattaccaaaaaaaggtttgattatggagtaattaattagcacaagttaatgaaatatttaagtttcaaaatcctaaagtaaaaaatactgacaaaattttttcaaaaaataagttgttaaaatactgaggttcagcccataggaaacatattccaaggaatacaaataacttactgaaaaggaaaaaatcaagtctaagcatttaattgaaagcccaaaggatcaggcctttcgaaccaaaacctcaagaggctggaaataagattaaaacttagcaagcttgatatataaaagcacaaatatctaaagggataagaaagtatgaaaatgtctgaaatatgactacgtacttaaaagccccgcagcaaagccatagaaaattatccttgcatatgcaaaaagggggatccttatcccccaaatgttaagtgttaaaataagtaaaagttggataaacttggtcaaggcatggctgggtccttcgttggcttagcatgaccaggttggacatcaatggagacctctgagattgtagaatcaaccacaaaatgagcatcaatggtcgaaagagctggctcttccaagctctcatcctcctaggggaagttctaggatcgaccacttctgttgcccttactgccttcttggcttcttctacttcatctagttgaagaacctgcgacatcaactgttcttggtcttaatcatgtagaaaatccatcatgtagttgttaagtttccaaatggtgtatagagaatacacaaaagcctgctttgacgcttctaatgtcgtgacctcttggtcctgcttcttctagtccattttctaaatttgaccctccaactctgaagtccttttcttggattcttcacaagcctaagttaggggctttttggtagagctcaattcagctgcggtttcctcagcctttttgatagccttcttcttagcttcctttgcctttggctataagttagaatgaagtttcgtctttatctccaaagtggcttcaacaatcttgtcatccacgatttgactcttcttgtcatattctttagatagaggggtgaactttctttctgactctttaaattccaactcagattgcttcagatttgcctccaagttactgatttgagagagagctttagtatattgctctttgtacctatccccatggtcattcttagccttggtcacctttttctcacgagctaaaaccttgtccaaagaattatttaccctttgtttgatgatggactccatcttggcattggcatttactagagctttggtggcttcttccttcctttgttcggcattagagcgttttgacttcaatagttcaagttcgtaggccagcttgttgaccaaagaacaactcctctctaccataaggctaacctataatgaaaaaggttatggatgaattagaccaatgaaataggcatatcctttgc

SEQ ID NO: 186894 - DNA, 4854 bp, Cannabis indica
agagagagagagagaatctttaagtagagaagcacaatgtatttgtacattctagatatacacaatgagcatctaacccagatggtacattttaatcatgcatctttagttattctcaattttttaagggatttattcaccagtttaaaatgcacaaaaatgaaactagtgcctgaatcaggtaatgcgagactacagaaaaaaattgcaattgagtcaattgtataagaagttcaacactgtctcaagcccaaacctttaacttgtaaaaacatgtggcaatcctttgcttcgtttgttgttgttttagaatccatttctgctcatccaggaatttctttttctgacgatccattatccatttttctgacattgtgtactttggagaaggtggtacatcaggcaccaagctatcttcctgtacttgttctgcagtaatacaagtccagtaagatacactgttatcacccatatcatgactgtagctgaaaacaaaagcagaattagtgatatataaatactcttagaggtatggctttcaccttgtgataattgttttggcgtcatattagcaagatgtactgtgtgatgattattgtcagttccggaaactggtttccagtgatctcttgaggagaaagaagataaattattatcagagtgatgattccctgaaccactaatattgctaagattatgaccctgactttgtacattatctcttctttcaggcaccaactcatgctgaacagcagatgatggaagaactccccttgaaacgtcatcatgattaccagcggtggtccagttaacaatctccgggttaatatgcttattcgcagccattaaggagacagcttggttagcccttccagctagctgatggccattttccactttgtccccaggaacactaaaagctaaaccactccttgtaccagaagaatcatgttgtgatgccattgtcatagaagcctgtgaagctgtaatttcagaagtctgtgtttcaacatctggttttcttgaagtttgaagatattttctttcttctggcaaaaactggtcaaaagccgggccacttttatcctcagctttcatgtttcccgcttctttagacgaggaatcaatgtcttggaatcttccagtagacaaagtgcctggagggattttatcagtttcctttgcattattcattcttccaaatggcatcatatcaggcgcattatttggctcactagatgtcacttttcctctatgatccattaactccttacgaggtccatcagcactaccacctgaattttgaaggcataattaaaatttaaaattttcaataacaaaagcaaaaacaacaaattcatgcaaacattttttacttaccttctttcggaaaaatatttcctagtgcaatatcaagatgcagcttcttgggcattaaaccatttctgcacattaacaaaatagttactgaaagaactccataaaaagagagtttttccatttaaagggttctccaatgaaacatgagatgctaaaccgtgttataactacctgaaagctaaaaagacaaggcattgggctctcagctgtttcaactgttgttccataaaaggcatcccagaattgacaggggacggaagaacaggagactttcctgcatctctaggtcctgcgtttcgaagcatactcatttctgatacactgttctgtctaccagcctacaaaaaagcatcacatagcacaagcagaattatacaaaacagaaaataaaacaatgataccacaagaaaaataaatatagataaaaattagtcaagtgaaaagagaattaagaggaacggttgtgataaaacacaatgttatagctattgtttgtttatttttttaactagcatccctgcctaaccctacaatatttgggactagaaaactatggcacttgctacgtaggtaccaggagtgactcgaacctcagaccattgcatgacaaaactatatttacaattttggatttctattgcagagaaacaaattgtaaatgtagttttgtcatgcaatgaaacatcatgctaagacatgcattttgcatgatttttagtaacttagacaactaggtaattagtaggagaatttaatcaaaccttcaaaaatagctgcacaaagaaaaagaaatgaaatctaaaagaacctctatcctgccaactctcttgtaactagagagatccaacacaaacacaaatgggcaattaagcatcatatccttgttagactacagtgaaaatgacaggaaaatgaaatacctgagcaagtttccctgaatcggctaacttatttgaacttcctccatcatgctccaaaacctttccagtggcaagaactgagccaccaaattgcagtggtggtgtgaacccaggttctgtggttggaaatgaaccagatgccatagtaggccctccatgaacctttccgaaagaacctgaatttccaccaaagccattttcaggatccacaaaataaactttgtgttttaaatttttttcaactatatactattaatggaaactacatcaaaataaatttaacactcaaaaaatgaatatttttgaaacatccattattcaatcaagatatctccagtgaaaaataacaataacaattgtcgtagtacactagtccaaacattaatgccttatgcaccacatcttcatcctcgtttatatctaccatctccaaagtttccttcgaacaaaacaagtacttaaagtaacaacataaaaattaatagctccaacaacaactttctaagcacttacccatcccagcagatgaggcagctgactgcaatggaatttctgcattgccaggaacattagatggaaatcgaggaatctgagatttgtccagctgcaacccagttttgttttgattccatgcacccataatatcatgtgcagcagaaggtacttgctgttgtgacaagggattatgagaagaggagacttctgtttcatcagggtatttcaaattgggagcacgagacattgaattgtttgtgtttgctgaatccaactgtttttccattaaatgttgactctcttgcttggaccttatcactggtctcatgctaccagataatgtagaaaattgttccatttgactgctactttggagaatattaaaattagcatgttcactagctttgattgcaaaaccaggagaagaatccatcttgctcattttccccttccttgtgttaactacagtattacgagagtcaagttgctgaggattgtcattatggggttctgtagataccgatgtatcacccctctttcttttagtagtagtcttcttgccatccttttgattcgcctgcttgtcccaatttgatgaatcacgcctttcttgtgactgagaattggcagacctggagtccatactagatggactttcatgatctaaagattgactatttcgatgacttccaggtccttgaaaatattcatgtcctgcactacttggaccaacaggtggtctacttgaagcaaaggtatctactttcgacacttcattttcaggcaagcccattttagaatcttttgcaattccaacagtttgggaagaccctacataaaaatgttccagcaattaagtatgagatctaaaaggaacaaactgcgattatacgataatcatattcagcagaaacctaggagtaccaacagatgttatgttaagggtattttacctccaaactgagtgattgcagcatcagatggctgagatccaccagctgaagacatgcgtgatgacatcagagcttcaatgtctagaccatgctgatttatgacagtctccatggcccttaaagcaagataatttgaaacaatcagacacacgtgatgtggttggaagattccaaatgacaacttgaccaagtaatatttaagcaagaaagctcataaacaggtacggagccacacacagaaggagatggctcaagcccccctcgatttttttatttatttataaaaaaaaatcacaaaagcacaattacaaaaaagaaaaatcactacagaatttatggagaaaaactaagaactaattcagatcagcacagcgtacatgtgtgtcgaaccacagtcaaatcttaagaagaacatttttccaataccttgatattacttggtatggcatggaatgttccttgccacttgacttcatgtgttgcaatatctgatatatttataaatatatatatatacacacataagttaccaaaataagaagcggccaaaaacaaatgcaggaagagaattaaattgatgatatactacaacactaaccacataaagctttgtagccaatttagcaggctcatctttagaatcttggattagtttgtgcagaaactttgctgcctccatttctacattttggggagacgccatttctacaattcaatcaaaacacggaggaaaaaaaacaagctgtattaactcaagctctgaccttcttagtagaagaacacaaaatttaagcacctttaagacaccgtatcatgcaaaaaaaactagcagacgcaaaatttacaaagtgatcgaattatgttccaattgatcaactgagctaggaaatagctcgatttcagttcattgtaaccaaaacacccaaaacccagataacaaacctaccttagttcgtgctatccatcactttccgtcaaaatcttactagggtttgtttcggttgccctagaatataaatttacagccaaaaaaaaaaggaaacgaaaagactcacttttctgatacaaattacgcgaaaggaggtttaagagaaggcagatagctg

SEQ ID NO: 186895 - DNA, 5644 bp, Cannabis indica
aaatcagagacttttgcatggaaattttcgtccaagagaatgttatgtggttttatatcaagatgtataattttctgtcgacattcttcatgaagataagctagaccttttgctatgtcaagtatgatattctttcttgtttgccaatctagatattgtgactgacttgggttgaaaatccaattgtttagtgacccattactcatatattcatagactagaagtctgcaagatttttctgcacaaaatccaaccaaccttacaagattaaagtggtgaaggtttccaattgtctcaacttcagctaaaaactccctcatcccttgactcattttatctaagcgcttcactgcaatttttgtgccatttgctgctaaaatccctttgaaaacagatccaaagcctccaacaccaagtgttccttaaaattctgttgcattcagtaattcttcgtgtgaaaaccgcaagggcattccaagagcttgttttagattgtcctccccatcatcttccttttggttctttggtaacatcacaataacaacaataactagaagaatggtggcaatacctcctgcagtagatgctgttatgattgtaatcttttttcgatgtcttactatccaagatgatgaaggagcctccggttccccattggtatttagtaccttgacaaatgcaagtacgttgcttttatctgtgctgttgtgttcagtagaatagatctctgatggcatataacaacttccatctgaattatcattgccattcctgaagacaactgcaatgcacgaacaattttgcagacaagctgttttgcaatcgtcgattgttcttgtgggcacaactccaaaatctgcattgcttatgttagtgtaagcaatgtctcttacctctgtaagaaggtagccagccgatgaattctcgcattcttgagtgaccatgtcaacattattcatgctcgaaccctttggattatataaataagtctttaaacgtccaccttgatctagtttcacaaacacaatagagtccagaaaattggatgccttagatgttcccacattcacaacaaactccgtttgtttagttttttgatactgtagtacagagtgatttcttgaattgtcatccagtgccaactgataatacattagagattgaccatcactagtactgaaaaaggcagagaaataagcagctgttgttaatgtggcaaagaaggggctcttactccattcggtcgaaaagaaattcggtgcaagtttttgatccttgttgagtttctgccccatcaacaatgtgtctttggggtgatcaaaagactgccaaagcactgctcctcgattaccaaacagaaccaaattcccagcttcagttaggttcattcccaccacaggcttaccagatgtattagctgaccataccataccaccagctgaatctcttagcactaaaccatcatctcttatcagttgaagtgatgcattttctgtcacaaaagattttctatcggttgaccaaactacagcatgatgtccaactccaacagcaatgactgaaagcaagtagaaatcactagttccatcagagtaaaatccgcagtaaaagccgatactacggctataatcttgtattagaaggataactctcatcttcttccctccatcgatgatcactgagttgttgttgtaccatgttgatggaagtcctgaatcaaaatagtatgtgtagctggttctgggaaatgaagaatttccagtttgtgcaaccgaatacctgacaaagaaaaccacaccaaacagaatccagagattataaaataagcaagacatgattgcttagaaaaattttatgctttcttttcttgagactcctagaggacagtaaaatccttatcacaaaatgattagagattgatagaggatcaggagttgaaactttacgacaaatgatgccctctatgtctatgacagctagcttgttcacattaatggtgcggtaatcacggtctcaatctcaaatcaaacaagatgctgctgatgtaataacattgtacagacaaataaaaaaccagacaattatgtaatggaaaaaaactaggcaactgtgttttgctaagcaattagcattaatccaataaatgaaataaattaatgtagatggtgacggtccaaaaacaaacaatcctaaaccaggaaaaggaaaaagaagatcagaaaaaggtaaaggaaaaaatgaatactgtaaccaaagacttggaattttcaaagtcaacccaatagtttgtccatttctagtaaacccacatcacacgacatatgaagtcaaccagcctttatctctcattttaaatttgtatatatataatcatgtcccatattatattgcttccatatatatatatatatatattgtaatacatagtacgtacttatatatatatacgtacccagttatatgcattgatcattatattatagactatagatatactggtaccgtacgacaggagaggataccaagttgtggtggccacagcttcactaacaggtggatcgcagatcactgatttgttgtcgttcaccttgcgtggttttattgtttcggtagcatttatagcattaatctataaatttatttatacatacaatacaacatttatatatctcactcgatgagtgagatactaaggagcaataaagctttttaaaattattttctcacctttataagtcatttattggtgtcattggcttaaaaagagtaaagtgtaacgttgacgttgtatgttcaagaaaagtttcctcaaagcaattcttaatagaattttaaaaaatatatactagaaattggtaaacgaattaactggaacaaaaacagatggtcaagcaggcaaccaactatagctaatcaaaagaaaacgacacactaaaaactactgccaaaactttagtccaggttggggggatcataggaacaattttacagataaatttggtgattttagtacatgtttaagtaaaagactcttacaacaaatcaattcatttcacaaagattggtgtgagacattcatttataggaaaaaataagctaagaacctcaaaatcttggttattagcttacagtcctttgctgaagaactcttttctgcaaaatggattgactaacaccaaccttcttccttattctaaaaaacagaacagttccctcttcattcaagaatgagtgatctcaagtttctctttagctacagataaattagttcccttttcaatcaagaatgagtgatctcagagtacagaaactgaaaaaaaatttcaatatgataatcatattgatttttttttaaaaaaactcccattgactgtagtctgcaagaatgtggcaaatctctcttcaccagtaatctccacaagaacaactcccttttttgaagtgatgaaatctactagtgtcacgtacaataatttctctgttttttatctgagatatgtacttaatggctacatgacaatcttcacatacacgcaaattcttcatcacccttattggtgtaccttcaatagtattcattaaggcaaaaacaatcgccaatttctcactgtgatgtgccaagttgttctctttctcctcaatatccatgtcatgcaaaacagatccagtatcaggtgtgtaaccacgcaacttcatctcagcagttagttcattcagatacaagtcaatttccattgactttggatgagatctatcacccatacagaactgatgaacttgattcttaatctccagccagcttatacctggttccttcttaatgttattatccttcatggtcttcctcacctcagtaacatccttccaccttttcgcagaagcatggatgttagagagtatcacataagaagctgaatcatgagggtcaaccttgagaacttctccagcaacccgaatcgccatgtctgcattcttgtgtatcttacacgctgatagcaaagttttccatatgatagcatctgctttaacaggcattgaccttatcacagcctctgcttcctctaaacagccgagcgtccaagaagatcaactatacaagtatagtgctcaagtctaggcttcaatccatacttttttaccatcatgtcaaagagctccatcccttttttcttcattccacaatgactacaagcataaagcaagcttaagaaagcaacatcattcaactcaactccttcatcctccatcttttcaaaaactttgattgcttcttcacctcgaccatgaaacccataagcagcaatcatagagctccacaacacagaatccacatctttgctttccgcaaaagctttcacagagtcttccagacatccacatctcgagtacatgctaactaatgtgctaataacagcaactaccgaacataccccagctttgattgcctcagcatgaatctgctgaccttgtcctagtgttgccaattctgagcatgaactgattgcactaacaaaagtgattttgtctggcctaaaccctgcgagtttcatgatattatagttatccaacacgtcctcgggatacccattttgcgcttttcctgctataagtgtattccaggcaaccacatttcgagctggcatagagtcaatcactttctctccttccttcaagctaccggactttatatacatgtgagccaaagagctcccaacaaccaaatcaaactcaaatccacatttcaatatgtaagcgtgaacctgcctccctccatataaagatcccaaaccagcacatcccctaagaatgctaccaagagtgaactcatcaggtgaaaatccaagctcatgcatttctgaaaaaaggcaaagaccctcttcattaaattcagattggatcaaaccagccaccatggcattccatgtcgcgacgtttctatctggcatttcgtcaaatactttgcgggcactgtcaaaatcaccactttgaacgtacctattgatcactatattacaggacatcttatttctcctactcatattatcaaacagcgtcacaacactttttaagtcattaaatttggagtacatgtttaggaggtgattagaaacaaacgtgttcgaacacccacatgtgattatcaaagaatggacctgtttccccatgaaaagtgattttcttagtacggaagcttggaggaagttggagaaaacagatgggtccgaccatatttgagacttgagtattccaaaggcttctttgatatgccctcttgaacagagagtgatgatctcttctctagaatggaaagcagtagtggagacaaaacggcttatttggaggtgcttggatttcaccaaacagaagctaagagggcttagacaagacctgcccatgcatatggttggccttggtgaactctttaaagctaagttcaataagttaccaataagaggcacttaaagaaactcggagttctcagctttcagaatgtttttatacattagtgaaatgaaagcagtgttgtttagttggctaaactaacatgtttggttggttggacataatcaaactttagataaaatgatcattcctttgtaaatttacatcatatatagtcttgtcttttctttccaacaggtat

SEQ ID NO: 186896 - DNA, 1869 bp, Cannabis indica
ataaataaaaaataaaaaaaaatagaactactgtttcgatcaacaaaaaacaaaaatacaactcaataaatccacatataaaatgaaacaaacaaatatactaaccttcattttcttaggcaacacaatagggcttcatcacactccgaatcgaaatcatcttcatctcctacaacactcttcatcttcttagagcaccgatcatcagaagaaggctctgacactcgactcctcttcgaaatgcaagcattcttactgttcttctccttatcaatatcgaaatccttcaaagaagacccatcaatttttttttttgaattactcttctctgttttttcctttttttttttcatcaaaccagaagcctacggtgacgacgacatcgatctctttgtaagcaccatctccttcgaagaacaatccacacacaatgtaaaccctagcaaagaaaatgaagccctaacaatgctaataaaagagaaaaaaaaagagagaatgaaataaactgagaacaaagagaatatgaatcaaaaatgaaaaaagtcgaaaatgatatgttgaaataaaagagaggaataaattttgtataacacgccaaatacaccccacgtatacacgtgtccaaaataattgaaaagtacctctacttttcattaataaaagtattaacagtaatcatggaattaaaatttaaaaatggtcttatgcctaaaaatctcttttataaacttctatggactttagaaatagtccaatacgttatcagataatgaactttattaagcttatcattaagttaaagatagcagtagtagtggcgtatatttagtagagtatgtttcggcacttaacttaataaggtaatttgtaagattcatcaaattatgagtggaagtagtagtggggtcgtacagtagcattagcatgggattggctaagtttaaaaaattgaactgatacattatatgtggcatgaagaacaaatttagacaaatagaattagttcaagaggtaagatatatgtgttcatgagaaccattaagcttataagtggagcaagattccctcacatatattatggagttaattcaaattcaaaacttaagctaactagtctacacgtggaagccaaggagaatggagtggaggaggttgataacttgaatgaattcaaatttgaaattaaagcattttatacacgactagtatgggattgattcacttgaccaagtatgaaggaagctttaaggaggttattactttgaaatgacttttagctcattattcaattgattttataattttaaccatggttaataaaggtaactaagagacataagtgtagttagctaaacacttataataccactcgactcaactcaaaatgcatcactcacataagctctctctctcctcttcactcactcaaagaagacaagtctctcaattcattttcattatctctcggcacaaagtaacaatctccattatcctcttgaatcttcccttgtcttgatgttatcatcaccatgaaccaccattatcatatctaaattattttattcaccctattatcaaaattaccataactactttctgttcttcattcatgtcaaggctacaacactcaggctctatcatcatttttgtcaacttcatttcaagttccacagtctatattaatgactataaggtttattttggaagattaaggtgtgatattttaagtctacacataagatagaattgggtctagattacttatcacttaagtgtttttttaacgttagtatttggaaactaggatttatgtgatacaagggcttggttatcaaggatcattctcacaattcaagttttttttttttt

SEQ ID NO: 186897 - DNA, 2558 bp, Cannabis indica
aaaaaagaaagaaagaaagataccccaaatttcataaccaaactgctcaatactagatttaaaaagctaagattttgacatgattactctcctctctcactctgcctctaaattatcattccttttaagccttcttctcaatcagatcctcaataagatctgcagcctcttgaacggtagtgatgctctgagcactatcctcttcaacactaatgtcaaaagcttcctcaagtcccataacgatctcaacctaaaaccaggaatcataatggtttataataacttaaagaaagctactgactagaaaactacaagaataaatttgtcctttccattaagcgcattgaatagtcatcttaggcaatagaataagcactaaacggttttcctttaaattttctatgaaataattattgtatttaccgtatcaagagaatcagctccaaggtctgaaaattttgactcggcagaaagctcctggtcatctcccagtgccaattgtttcttcacaataccacacaccttctccactgtttctttcttggcctgcagaaggatgccatacataattagctccaaaataaaagtaaaaaaacaaatcattacctttacacaagggttgatagcagaaacatcaatgatgctgtgtcataagggctaaacacaaagtaacggatgtcaatggaacaactacaagctacaaagacctgaagcaacgtatagtaaattttgtcccactgatgttgacataaacaatcagaaacaacagaattacattcaaagtattaatgcgcttatgtaaacatttctagttcagattgaaagcgttcacagctccacaaaactaattataagaacaggaagaagataaacaagaaaaaaaacactaatatttggttccttcaaagtccatcacaaactctttaaccataaataaaggctaaaatgagttgaactcaacaccacaagagtttgtggacacactacatcaaatgggccacaacatcttttacattaggaaaatttacagttgatttatgatgttctttgacattctataaagataaatctatttgtgctcatatctatcaaatatcttccaccttaccggagatattaatatgtgagtatgctcaaataatatgaccagaaaatataacaaaatcaatattcatcgactacatacagcgcatgaaacttgaaggcgaactgattgtggtgttgatctgaatgagagggagcttcgtccggaagcattaagagaaaccaatctcgagccgtaaatactggatgttgcctgttgaacaattaggatagagaaaaatgagtcagccctcttctacagaagaattactcaatttattgctaaacatttgcatagctcagttcgcagcaaaagcagaaatgcattacagaattgtaaggaaaaaaacagctatgtgataacttctttaacggaaaatatcttaaccaaaagttacaaattcagaggcaagggcagctgggttacaatcaagttcaagccctaagagcttatgaatactaaataagctcccatgggttcgcatgtaagagaaaactcaaacttgagacttcgatagtcaagcttaattaatattacatatttcttgcctgctcacaatattgaaagccgaaatccaaaaactcatttttcttcaaattgctttcaagtttcaagcacaacatttcactaaatgtaaatcaattattcccttactagtagatatttaaattgtacacacgatttgaatcatgcatgcacagcttaaaaaaaaatcatttcaatcaagaactcctaaatcagatcttatgatcttcgattcgcattacaagctaaaattataaaaatcgaagcaatatagcacagatcaaacatgtaataccaagatatatgactattaattcaaagcaaactcttcttatctaaacttgcttgaaaataaaaaatgaacgcaaaaaaagacaagaaattcatcgattgagaacaaaatcagattcaaataaagaaaaagagatgaaccaagttctggtgcaactgtggaggaccagatctaagggagattgaagctcctgtagcagcagccattgcaagattctctagagaaaataagaatgaaagttaagcaggtagagacggagagcacgaggaggcatagcgaaatgggtttaaggggctatttatagctgtgaaaacaaacaggtgtgggatattgacaaggcacatttctctcttggagatatcgcacgtccacgtggtccaatagactaagaccatgagaatcagtactccactccgtggccaggcttgagagagagtatagctactgaggtaatgggcccaatggattgggcctccaaattgttggcttttattggacggagcaagaggttttcttcttattttgttttatgaccaatgttcaatgtgaatccgcagtaataaacaccgacaccgtcgtaattataaaaattaaaattatattgaaaaataagtatttcttaaaaaaaaatgacgtgactttaaattttttattttt

SEQ ID NO: 186898 - DNA, 600 bp, Cannabis indica
atttttagtgtaaaaatttctagaaaatactagtaaatattgattataaattataaatatatgcgatttccaaaatttaaacccacaagaacaaggaatgattgatggaatccattgttatctcagtgtacattggaatgtcttttaggaagagaggagatccttggctttattctttgatcatctaccttagatatgcttctttcagacatacagattccagaagcaaccaacatttcagcattaaaatctggattaattgatagtacaacaattttctctaataggcaaaatggtcaacataaaaacctataacttgttagccaaaaatgcacaattccataagaaaatcccgaccaaaagaaaaaacccccaaaaaaaggtgttttgactcaaaacttagttgctcaggtatacatattagaacgaaaataatgatctctattctggctggaccataaacattcctccagtccacgtgaaagcttgagggttgggggaatctcagtttaatcatcttccatatcttcttattttcacaaacaatattagatgaagtaattccatcaaaaatattaaatgtggctgctgggattcgag

SEQ ID NO: 186899 - DNA, 942 bp, Cannabis indica
gtgagaatgaaaatttatcactgcctagctactatacctagctatagctctagcacaataattaatttgttacttagataaatgactaaattaattaagagcaaatgatcactcatttctttgaaggcatatattgatctactaattataagatttttattaatttttattattatagcataattaatggatatattaattaacataagaaaaatgctttaaaaattgaacatttgtgttgttaatccaaactaattaatttttaaacttctgtttacttcttttttaatcattaatttatagatatgatcacaaatggaatttttcatcatgagagatcagcagatgtaagcatataaatttctgttaagataaaaatttaatttttaagtatgttttatattattaatatataacatacttgacatgctaataaatccaaataattaaatatatatatatataaatatttgacaagctaataatccaaatccaattgatattatataataaagaaataattaaatcccaaaggtggggctgtgtatatagtggtgtgttgtatatctatgccgggtgttagaccaacaaaggttaaacattcacaatatagttgtcaattcacatgcaatcttccctcttatgtttattgaaaaaaatttctccaaattttttactttaatgtaaattagtctataatttcgaaaaaatagcaataataatctttaagattatattttttttaagtccattaacctaaatataactgattcgtttacttatttaagtgtcgaagcattatttatgaagactgaagttagagactgtacgtgaaagaactagatcaaaatcagtgtttatattagttttatcacgaagttgacacacagaacgagtgttagaaggtagcccgtggactattacggcaaaagtctccaaaaa

SEQ ID NO: 186900 - DNA, 2010 bp, Cannabis indica
gatgacaaatcacctgatcttctcctaagcatctgtctcatcccatcggccactcgaacggcggggtttgatttgaacttacgacaaaaaagcatgtgagctttcacagcttcttccataccaaagaaagactactttttcctctgctaacctcatctcgaacagcttctgagcataacccacatagccattttccatcgaatttagacttcacatctgtgatatagtcttgggtacaatcttctttcaatccacagcactcacacttagccaactcaatatccattttgctcttcccttttgtaatttgatctctactagtctctgttttttttattctgatataataaaagattcgatgatgtgaaagaaacaaacactgctcaacttaccaagtagtagtataagtagtagtactaatatattggatatattatatggctactttttcctagttgaatttgattgcaatgatggttatgcaaagtgggttttcttttgtactactactactcatctcatcttttcttttttttcttttcttttgtttcaacttcttgttatggttttcttttctcacttggtgtatggttttgatggctaatttatgttgcttcaagaactaggaagtgcttagtgttgtcatgaaagagagagagagagagggagattagaagagagaaagagagatcttttataaggttatgagaacagggaaaactgccataatttcctccatgttctaagggacatggggcagtgggaaatgagacaagggtggtcaggttgaggggtccacaaagctggccctttaatgcactttgcacttattgcaaaactcaattaacaacaagtgatgctatagaagagaacttgtaaattgctaataatactcttttattttacggtgagctagaccaaacatattgttttctatttttctttctttcaaacaagtgttttaataataaatagattttgaagttttcaaaacacttcctcgacccagactgagacacagaccctggccctagacttggacccgccccaaatgacggacccgaactcaaaccaaaacatatcccaaattcagactcagatctagacctaaaccccggtgccaacccataccccaaactttgtccccgaccccagacatgaacctgtcccagacctagaccccagacccaaacccgttccaagacccagaattggcctcgacccccagccctggacccacaccccgacgcaagccccgatgcaagccccgaaccccgaaccctatccttggcctaagcccttgacccggacccgtacctgtcccgaaccccaaaccttatccttggccccgaccctggatcaagacctgaatctagaccctagtcctggaccctcaccttggactcgacctcggccacagtccgaacccgaattgaaaaatgaggagagcgaaagtgatgagagagaagataatgagagagaaaataatgatagagaaagtaatgagagaaaaatgatgagagacaaaataatgtgtaaaaataatgtgagaaaatgaagagagaaaataacatgagaaaataattagagagaaagcgaagggagagaaaataataagagagaaaatgataagaaagaagaaggagaaaaaaaataatatgacagaatattgagtataatgatgtaagataaatttgagaaaaaatattgactaaaaagtaaattattttttaaaagagaaaataaatattgttttgaaaatttttgtatttttgtattttaatttttaataactattttaaaaaattaaagccaaacacgtttaattattttcgaaaaataacttttaattttcaaaaacaaaaaataatttttttaggtacgactgcaaatatacacatattttttttttattttgttttgttacatcataaggtagttttctataaaatatatttttcttagttttttgtagtaaaacttttccaattgtcgtttcacttgtattta

SEQ ID NO: 186901 - DNA, 2295 bp, Cannabis indica
aaaaaaaaaaaaaccaaaaaatacaagaacaaaataagccttaaataattatttttataaatacgaaaaaaagaaatgaaaatggctattaccatggttttgaaggactgcatgaactgtatagcccctttgaataaggcccacgacgaggcccaagcccaattcacctgaagcgtccattacacagactgtggcttgtgccatttttagagaacagagagaacagaagagagtagaggtgttttggtttttggttatgatatgaataaaattaaagaagatgtatatatataaatgagtttgttaaaaggggttttttctttttctttctttataatgatttttgtaataaagagagagaagaaaagtgagtaagaaagtttggaagaagtagtggtgtatatatatagaaaagaatggttgatatatagatagcattgaaagagcgtgggaagtagatggttgggaggtagttgttgtttggggatggaaatcaaacttagaattatatataattatataataaaataaaaataaagaatatattaaattattattacgagtgatactgtctacttcctattataatttcttaatcgatatacatgcttaaaatacatattagaataatttatttttataagagtgttcgttatttataacatcatccatgtagtttagtattaaaaaataaatttaaagttttttgaacatgcattaaattggaatatttttttgatatgataaactagttggaatttttaaaaaatttacagagataatattacaactataacaaatgctgttataaaaataaaaatattctgatatttgattttgaaccatgtgttttgcaaaagttattaattagatttttggttttgttaaatgataaaatgggtccgatatttttcaaaatagtaaaaataagactctgaatttaattttcaatttttttttaatataactaactttaagacaatttttaacacgaacaattacattaaatgtaactacttttgtcatatctctatatcaaattattattaaatttcattttgataaaagattatttcagagtcctatttatacaattttaaaaaatataaggtctcttttatcacttaacaaaataaaaaattcaattaataattttttacaaaatataagatctaaaatagtatttaacctttttattatttaggattctttatattattaatgaatattagagagagaaagagaagggtttggtaggaaagtgtgtgggtgtatttgttgtgtagttgccacacgttcgtttagtaccacacattgatcaacaacaacatgactatataatatacgtacgttagcctactttttttttttgaaaggatttgcctactttctctaaacatattatttctaccttactttaatttatagtgaaaatttctcaatttttttttacaaaatagaaaaacaaatataaaatgtaatattaacgacacaactatttaaattttatatattttaacaattaattatataaattaatttttcaatagtaaaactactcacacttcacttttattatattatttatcactctgttcaaaatctcagttaagtatcttgatagacggacataaatgtatactaacatacagttatggaacttaaatagttcacataatattaattatgtaaatattataatttttaattattttttatattttaaaattatattgactactaaaaacatactatgtatacacttgtatacatgtaaataatttatcgtagcacttaattgaaatttttagactgaagcataaagagtaaaataaaatatgagtttagtagatattgtcataaaaaaatcaacttgtgtagttaattgttaaaaatataaaatttaagtgattttattgccaatatctactttaaaaatatatatatatatatataaatataggaaaaagtcttttattttggttccacaggaaaatttgataaatcatgcttaaatattgtccacaatcttttagtattccacattaaaatacacaggaatttaatactctaaaattaattaaataccaaagtaccatcctcatatcttctctctttctcttagccctctctccctcactctctaactctcaccaaacccaaccgacacccacgaccacagaatcagaccgaatcagacctagaccaaacctacgaccaccgcactactcccggcgaaacacactctgaagacgaaacgtatgaaaaaattagagggggaattcggcgaaagta

SEQ ID NO: 186902 - DNA, 2171 bp, Cannabis indica
tttttaaattttttaattacaaatatgaaagtaataaacaaaaatatgttctgtaaccatctttgtttttcaattttaaaaacaaaaaattaaagtgtttctataattttatttgaatcgggttcgggtctgagtttggggtcgggtctgtgtctggggtcgggttcgagtctagggtcgagtttgggtctagggtcgggtccgaggctggggttctaggtcagggtttaggttctggggctgagattcgagtttgggtccgagttcggggactggagtctaggtctaggatgagattcgagtccaagtccggatctaggtctaaggtccgagtttatgtcccgcaatccaggttggggtcggaattcaaataattgattaagaaaaaaaactgtttagaaattttttgaagtgattttttttttgtttttaaaatttcttaattaaaaattaaaaagtgaaaataattttataaaatatatttttgaaaaatatttttattttttatttaaaaaacaaaaaaattaaaaatattaccaaacacaccctcaaattaaccaaattaacaaatcattggaaaagagtaagatgttagctaagtggactaaattttttctatttataaggtatacaatatacattgatcaaatatggttagagcaagctaaccaaggccgattctgaaatttagtaagttaaattgtagtatttttcaaaatagtaaaaaaaaattatgtacttttaaaagaaatttttttcggcctttagactaggtgggtcctaagcataacccgcatatgcccaaggttgcgttagaggctaactatacttgtggattaggctaaacattgatcaggttggggtcacagtccactcatgcatcttcaaatgggaccgacgttgcgaaaaggcaacatgtggattaggcctagagtaggctaccgtggagtgggcgctgtgaacgtccactccaaataaaggtgtattgttaggatcccacattgactaagtatgatctcggttagtatataactatttgggagtgagttctacccaaatgattgtaacaatatacatatggtgaaaaagaaaacatattagtaagcatgtaatactcaaatcaaatcagaacaagtatttgtgtgtattgaaatttgtggtaatttaggatgattttacttcctcattaataagttcaaactcaagattgtcttactaaatacttgtctcctcttattctatttctctgtctttgtgatggtgctttgagtttggctattgctattttgtttgggtttagagatatcctcctgcaaagaaggaattttaactagaaccactttgccaaccagttatttgataactataaattcatatgattgaagagcactttcttgttggctttgagttttgagtgagtgatatacttactactttacaatctacaaaatagaaaaactcactatattccaaaggcatatagatacatcttatattctattcaaattttagtcctaacaattacatgccaaatcaaccattatcatataaacttcatcctccatcaatgcttcaataaatttcctgcagcaaatcagctctaatcagggacggacctacataaaggtaagaggtaaaaaaaatcgagaaaatatatgtaaatttttagttagttacagtatatatttataattaaacatgctatttgtgagcatagtgctaattttgatataatgattaagttaaattacacataatataatagatgtcaaaaggttcaaatcttaacaacaacaagattccatagctagctataagcatcaaccttatattcttcttctttagtaataagcatgaaatactaaatactcaaatcaaaacacacacatatatattatgtatatagataaattgacagttatttagcatagaattattaaagtacaaaataatattatacacacatgcataagaagatgtaactatagtgaactgatgatagaatttaggagtgggggagctgaaacattttcacttccttcaagcataagcataactttcttcatagttggtctcagtgaagggtcctcttgaatgcaccataaagcaaccatcacatacttctcaaccattttcatctccatcttggcttcatcatcattctcaacaag

SEQ ID NO: 186903 - DNA, 4715 bp, Cannabis indica
caattaacgacaaagaagagcatcaaagtagaaagctactagcctttatcattcctgctgcaaaaacagccacatctctatcactagctgcattaactatgcatgttgacccctgtttcatttactaaattgaatcagagagagaaaaacatagctaaaatacacattcccatttgagtattactagcacatattttaaacaattaagcacaatactataagtagcatcaatgatcaatcaaatctcaattacacagggaatactgaaaagtgaagcgtaatatcaaaatataatatattatgttaaacaaataagccatgctctttagtaggtaagcccaagttcaaaagtccaaatttgtatgtcatttattttttcactgcttttttaacacgtacaaacaccatattgactttggaacaagaaatgtaagtgttcgacttgtatgtattgtggcaagttcatgtttgccgcaacaaatgtataccttctccaaactacatagacgctcacaaacagcctctggcccaccttttctcagaagctgaatagaaatagaagcaacactactggctggaacgcgaccacctgttttctcttctacccactaaatttttcataaaggtatcaattacagtacacaatctttaaagtatagtatattctgcataaaaagaaaactgattccaagtagactatgaatttagacctcgcggagattagaagatttgtagccaaaagaagcatcttttgcaaactctgtgtctccagcaggaacaagcctgcatatgtcattatccatcaaggccttacactggtagatgtcagagatggactattatccaaaaaaaaaagagagcagagtattacttatcagaatcagctacatagtgaatatctccaatagtgtaacggcctccttgaaggaaaaaggggcaaatgatccatgcatccatctcacctagtaccgaactagcagcatcagcttcctaaaagagagcaaggaaaattcacttgatgttatgaatttgaagtatacatcttaagagttaaagcagtgataaaaaccatataaaagttacttgcctctggaaaatgacctcgtaaggttgaatcacctcgcaaaactacagtataatcagcattttttactgagtcagctgcagcttgcaagttctggcatatatctttaatcaattcagtggcctgtagatcatttctatacttgtcagtgtcactttaaaacaattagaaattaaattacagttatgtttggttagactgtcttttttctctgctacatatgcttagaaattgaataacaacacttactttttcagggctcaatgccctggaattggttaaaatgaaaaagcatttaggagcttttttgaattgctcagtaagtgagttaacagtcctgcaaaaataaattaaaattttacattgagctgagaaataactttaatcaaggttctctttcctttgtacaatgaatttcacagaggcttcacttatatcaaagaactgaaactcggaaaattagataataattagaacaacttattacaggagacctgcagcaacacctaagaataacatatattagtcacttattatgtttaaatattgaactgaacacgtataaaaagggacaggaaaggccagataccattcagttaagacctcaatgtcatgaacagtttgggttcctgttggatcatcatcaagaacgaccaaagtttttgaagaattctgattaagtgtttgtatgtcattaatgggatcaactggccactcagatggaagggaagcaaggacggtttctttcttaagtaacggaagtttcccctcaaccttaacaccagttattgtctcatagacctgaaaaatatgaaaaatttagtaaaccattttttctgagtccaatccagctgatgcaggtagttcaaataacaaaaaaaaatctaatagcttattctagaatttgaaattttttgaaacggtgatagggatcagtagctcttaaataaatcaaatttgacgcttctctaattaaagtagaattcatacagttaaatatgaatattctagagaatagtaataaaaataacacaagatctaacagtcagcaaaataactatttctgccacacaatcactttactttttttattctttgggggagggtgttccaaatttcgaacaggataacttaatgttttatttaccacagaaggcatcatcaatttgacaaacaaggttcaccaactcaatttttaaaacagagaaagatcttacacaatgcatgcatgaccttccttactaaatttaaatatatcttaagagggaagtctgcccattaaaagaaaagcaagacacacttaaagtcatgacaccttatgattaagaaatattcttttcaccaaaaatgcatgtgtgactttgatgaaccaagttgaatagaatgccagaacttaagcagctaaagttagtcacagacataatttataaattataataattaatcgaagatggaagaaggctgaaggtatactctgcaccagctcaaatcttatttgacaaaagctagcataaaaacaaacattaccgtaactaatcatacattttatcaatctttccctatatgtttaattttctatctccatcgtcaaagtaaaaagtagatgtgccataccttaactacaccagcatcatcctgtcgaccccagcctcctgcagaacctgctagattgttgcatcaaatgtaagtattataggtatttgataaatcaatatgcatgcaatggacaacattgaacacataacaaggacagagaacgttctttcccgatgccttatttgaccaaaagctaaattgagaaacaacaagggcaaccacattaatggctaaatttttaatggctttttattcttgtaaagttttgcacatgatgatttattattatataaatttgagagtactcgtgaaaaatgccacacaagttgatgcaatgagaaatgacaactatatgaattctaaatgaaaagattacacagcacctaaaaggaacagttggtgtgcaaccgttgaaatatgcagcggtactcttcgggatgaacactcgcgagaaacaatgccctttaaataataataacaggattagatcagtctgctaatcgcttatcacatgaatcaattctagcaatttattgtggggactataaattttaccagatccttaacaaagatgtcaagcgcagaataaggtgtataatcattgtccagcatgtgtggaacacgattctcaaacatcctgcaacatgcatactaaataaattaatctaaccttagtagcacacttacttgaagactaaatcaaacaagtctacataattaagcttcacttcttaagacaaacaaaataaccaaacatctatttttttaacaagagctccaccatagatgcaacttaacattcagtcataaaggctaatgagaaaacattttgcaatgcaaagtctaacggaatttccctactgaacagttgcttggatactaagtcagcaaagagccaaacactcaatgcacgtaccaggatgttccccttctatttgtgatgacatcaaacaatatccttgtattgagacctaatcgagctccaaatgccatagcctctgctgcagaagctatatgaacaccagcaagcaactggttgaccatctttacgacgctagagaagagaaaatggacaaaataagtatttttttatagaacagacaaaataagtaatgaaagttaaaggcttatgtaatcaaaaaattaaaaaccaaaatatggtatgaatacaactaaataatttttggacaaatgatcttgcaggatgtcaaatagcttattacatgacaaacaaacatgaatgagaagtaccttccagcaccacaacctcctttaatgacataaagcttctcacttaaggctgaccagtactcttaagagcttcatctgcaccagatgcaattatctgaaagaagtatacaagttcaccaaaacagagtaaacaaaaaaattaagctttgtttgggtctcgaaaattttgtttttcctcaccgtcaaagttcccaatgaggccttcttaacaccaccagaaacaggtgcatcaaccaatttcaaatccttgccttcatctgtattgaagattaaatattatcatgttatcacaaagtaagcacaagtatgacagataaaagtagatatgagcacaaaaattcttagagataaaccattcaaaaagacaggctatgatattatagccataactatttcagtctttcaattctatttccacttctgaattggggttcttggatgacgcatagtagcatattggtatatatcaatttcatatcctaagaatgccatatttgaaataaaatctcctctgttcttccaaaatataatatatatatatatatatatataaatactatatctatagaactgccccagcctttcaattctatttccactgtgaattggggtacttggatgacacatagtagcatattggtatatattatttcgtatcctaagaatgtcatatttgaataaaaatctcctctgttctaccaaaatactaatatatatataaagatatacatttaatgaaactgccccaatgctttcccttaagaaaagcacagatggtatatcg

SEQ ID NO: 186904 - DNA, 4794 bp, Cannabis indica
accaaaaaaaaaaaaaaacacagtacaaattttacttttcttagaagcaaaataacatttctaaattaataaaaacattttccccttttcttttctttttaaaaataaaaaaaaacccttttccttaattattttttatttaaagaataaaaattaaaaaaaaaccaaaattagaataaagttgtaatagcccaagaatggattttttctctctttggactcaactttgacttgttcttcttcagctcactttggtctgagtctgaagcttaaagcttaaagctttgagctttgagcttagtcctttctttcactttcatacaattttcttttggggtcaaaatttatataataattttttttgcttcaatatggagtttagttagatctaccaaatatcccactaaatggcttgtttttttttcttcaacggaggagtttattagtatttactttgccataaaagccttagcttttataaaaatcaaagcttgataacaacaaagaaaaataaccccattgtcattttccaagaaacaaaccctagatctgcaatgttgcacctccgccctcgccgggattccacttcagccaccaataaatggcagaacaaggtaatgcattgccttgtgctcccaaaaggggttttcttttggattttgtttatttgggttttggggttcttgattgtttatgaagaaatgtatttggttattgagcttaaattttgattttttttttggatagtctgaggagaatttggagcagtggccgcatatgaaggagttggttcagtgttatactgctgatttggttaaggatgagaataagtatggtcattatgagagtgttgctcctgtgtcctttcagaaccagatttacgaaggccctgatactgatattgagacaggtaaatgagtgcacttagcttgttgttgaagtgggaatttagtaaacttagttaacattcaagcttttgatgaagctcattcttctattgagaccacaccataatctgtgatgaattgtaagaatcctaattattactagtacactcaataagctgttaggtagagtggatagtttctgttccatgaatttatacagttgatggctttattctagagttctattaaattagtactgatgattgtaaatagaaacaaactatatagacaactgttttgtctgtggtactaggatttgtttgatttattttcttgtgccttagaagtgttatttttgcaatgtaaattaaaagaatgatggtgtgtgtgtatagtgctcctgctgcacaacttatggaacatcataattataatatttcctctgccggattagtcttacaaactacacaatgtaaagaaaagggaagcattgagtgctaacatggaatcagttttctaacttcttattccttttacaaatttcttcaacccctttacagaaatgcgtcttgctaatgcaagacgaactaagactgaagacaccactgatgatgacgtgccaagtacctctggacggcagtttactgaagctactgcttctgactcgtcactatcaaatactttaaaggttttgctagttcagatcttctatctattggatcattgtagcaattattatgcattgatgagttgttaaacaaaaatatatttgcagcattttggtcaatccccactaccagcttacgaaccggcttttgactgggaaaatgaaagatcactcatatttggtcaaaggattccagaaactcctatatcacagtatggaattaaaaaaatgttgttgcttagtaaaaatttcggtgatcttataatttttaccacactgatctgttttatcacttttcccacttttttcgatgtttcagtggattgaagatctctgtgaaagttctatccttatcattccaagctggactagttggtaagcagtttatttatgtattcacggtttcatgtcattatttgcaagttttttaagttgcatgtggtaaattctgatctctgtttctctctttctctatacgtatgtgtatatattttatagagccgttttccggtacaatttgcttatacaatagggatagaagagaaaagttgtctgaagatttccattttcgtgtgctacccagtgaaatgcaagatgtaagttgtaaaaagctttcattcttattccccctcctcatccaccctctatttcttttttgtctttcctgcaacatctgaatattcaagatgtggtattttccaggcaaatgtttcatcggagtctcgtggaatctttcatttagacgctccatcagcatcagtttgtctgttaattcagttagagaggcatgcttctgaagatggtggggttacgccttcagtctattctcgcaaagagccagtatgtgaatgtctatgtactcctacttttagtttcttaataatgcacctgtgcctaacaacaataactctcataaaacttctctaattagatgaaggaagaaagaactttattattcatttgtcttacaattgtcgttaggatatttgttacaaaaaaatttaccgatcagaatttatagtaaagtgtggagagtggagataatgcatggcacaagcaaaacttactgtgtttcagttttcggttgaagaaaacaaacatgttatattttatttgggtggaattggcttgtatatctgctcgtggttgcatgtgtgtataattgtatgaatatccatgttctaatttggtcaaaatctcatttatataactaacaacttaactccacctaaacaggttcacttgactgagagagagaagcaaaaattgcaggtgtggtcccaaataatgccttacaaagagtccttcgcctgggctattgtttcattatttgataacagcattactgcagcttctggtgggtctgcctctccaagcagcccacttgctcctagtgtgtctggatcaagttctcatgagggtgtttttgagcctagtgcaaaggtcacactcgacgggaagctgggttactcaactggaagctctgttatagtggagatatcaaacttaaataaagttaaagagagctacaccgaggactcactccaggtacagccgcatcaactcatgtaatcctggttcttattattgtatagtgttcattattttttatggttttttcctttaatgtgtaggatcctaaacgcaaaatacacaaacctgtaaaaggtgttttgagactggagatcgagaagcaccaaattgatcatgctgacttagaaaatatatcagaaagtggtagtctgaccacagatgatcctgctgatcgcaatgctgattctgcatatggaaagcataccagtaatggttcagatgggcttcacggtagcaactctaagtggaattctttggaagccaaagaaatctctagaaatggatcaaacgctcaaagaaatcaggaatttggtgctgatgatgtaagtatgaagctgttgttctgcctatctatttggtttctttttttttttcgtaattcttattcttataattgttattattattacagttccaagcctttgacttccgtactacaacaagaaacgagccttttttgcagctttttcattttctctatgtatatccgttgactgttagtttaagtcggaagaggaatttgtttgtgcgggttgaacttagagaggatgacactgatattcgtagacaaccattagaggtaaatataatgaattgtatttacaaaaatcagttttcttttcaaacaatctttaacttagttttgcgatcacatgtgagtaggcgatgtatccaaaggagcacggggcaacaacacttcagaggtttgctcatactcaagttgctgttagtgctagggtggctaattaccatgatgagattaaactgtccctccctgctacctggacaccaactcatcatcttttgttcacttttttccatgttgatcttcaaaccaagttggaagctccaaagcctgtaagattcaacttctataggatacataatttttcgtatttatgtgttgtttcgtcttcctcttatacagttagctttatttcggtctcatttaaatggttaaatttcccatgcattttccaggtagtaattggatatgcagcgctgccattatccacacatgctcagtatgtctttgcctcgttgatttattcttttattctgaacactcgaacatgaaaagaaacttatgtttacgatgcacttcttcctgcctcttctatcattaagagttaacgatagttatcaccgttaagagttaacctagatcattagggatagtgagtgttataaatgtggtggctatagctggaaactcacatgggcatgatcttagctgttgaattctgcatgggaaccaatcaattatgtgttatttcatcttccttcttctctcatctattgtaaaatcatataatcggtgtgtttgatttctctctctttctttattttatgatttctcaaactattatggttatggttttgctcaggttgcgatctgagatttctttgccaattatgaaagagttggttccacattatctccaggatactggcagggtatgcttgagatactgtttgagcttccgatgtgttgcacttattatgttttcagttaatgagtctctggaatggcttatttattactcgttttccccattgtaggagagtacttgattatttggtagggatggaaaagaaagtgtctttagggtgtcggttaagactttgttcatcatgtatcccatc

SEQ ID NO: 186905 - DNA, 2618 bp, Cannabis indica
aacttaattacaatagcaaacagaaaagtgttaactttttttgtttttgtttcttttttttttttttttgtaaaaaaaggtgttggggtatgatatgattattaagaaatgaaatgaaatccccacaattcttcttaattgcataaagttgagatataagtgaggacacagctccgtaaattaaggtgatcaaaatgtcaaaataatgttagacttaggtatataatatatatttagtactagctagccataaatatatagccattaatatcttagaaaaaaaagattggggaaagggaaatcttaaacagtactactactctactaatgctgcaaattaactaaactattaattcatacaccccaaacatattaaatttatttatttatgcatatgtgatcgatcaagcctacaaatctcttgtttcgtttatatatatgtcgtaattaatgtatgtttgttataacacacagtgaattaattagtaaatgaaaatgtatatatatatatatatctacttatatgtattagaaaaaaatgtatgtctacataaatatatatagattaattacaatatgatcatgaaattaaattattgtatccatgttcgatcagttagcaggatacagagattttctaggaatcattatataagaaaactgaaactcagaaagatagagagatgagtacacttacgagcgatctgctgatcagagtgactgttgatctaattagtttgcagttgtagacatgttgaaacgaataattaatccttgatgaaccagcaagacagccacatatattcagaaacatatcttaattaatgatacagtacttgacatgaacacaataaaagaagggttaaatatatatatatatatatatatatattaccatgcaaatatttagcatataatgagtacggagcatattacatgtactatttatatatatatatacatatagggagagagattaatggaatagatatcagaagatcattaaattaaatcaagtcaaagtgaaagtacatatgcggtgtgcaattagtttaaaggggaagcattaatatatttatatatatatatatgtatgataatacatgagaaatgaaaactcatgatcattaataataataatgaaaactacgaaagtgatattggcgcggctcaatctgagatcgtattttacgagattattattaggactatgcgttgtaaatccgtcttcggattgaacctcaccaacatcgctttctttatatttgcttccccttaattaattccccaaacacacacatatatttgtactactacatataaagaaagcaaatatatatataaaagaggtagagatagatggtcatgaagatgatgagatggatcaaatgcaaatggtggttgttttaaagggaggtgaggatgggcatggtgatgatgataggggttttaaagagaagattttgggttttgatgagctataatacaggtagctataggttggtgccacttacctaacaaaaaaggaaaaagaaactacttgaataattaaagaagggagcaaatatggacccaaacatggaccaaaagagaataatcagttagattttttaggcaattcaatttcaatgtaggaaaaaggtgtgtctagcttggtgggagtaggagtagagaaggtgaatatcaaaagcctgtgtcctctcttctgctgctgtgtggtggctttttattaatttcccttctttatttggtggttggaatcgctagctaatatataatggtgggtcaaattatcttagctaatcaaatcatatcattctctccattttatatattatctttttaccaaaataaaaattacaataataatcattcatatttataatatatacgtacaaataaaaaaaaatatagtagctagcaagctcattgaagaggatcataaatttgttatatgtatagatatttataaagataacaaaaaaccaaaaatacttaaacctaactatatatataatcataatatatgtaagatatatatatatatatatatataaataacgaaaaaccaaaaatccaaaacctaataacttgataaatttaagcatatgccccctcagcaatttgttccattgactggcggaggggtccatatatataatgagtgaattagctatatagctaactatatataaaagtatatcaaacagtggtaattataagtggacaacaattactgttactgtttgcaatggttatgcatgtaattaagcactcagatatgatcaatcaaatcacaagggacctactaattaacacgcacacacacatatatatataataaacagaaaaagaaattaataaagtacatgagagaatagagattgagaaagatgaaggtgtgaaaaaaaaagatataagagagaaaggtagtaaaaagtggcagatatatatgtatatatgcaaaccgtttaagagtcattgtcttacaaaagatgaactatatattaactagacacaaacatgggatcaacaaaaacaatagtgacaaatatatatatatctttgtgatgatcatgaagaataatatgcgaaactatatagctatatatatatat

SEQ ID NO: 186906 - DNA, 1641 bp, Cannabis indica
aaaaagatatattaaagaagaagctaatagaacttctgcaaaaggtaaagatggagataaattaggttataagtattaagtagatatttcagctaaagaattaaaacccatataccaattgaatttgaaatttgaaagagtaaagctaacataatccacaggaaacagttgttaccttccatagaccagcttcaaggcccaactttttagtaatttcctcagcagaaacttctttgtctgttttctgcttgagagctctaatttgaaaagaagaagaaaggggtttagaaatgggtgaagaagaagaagaaaaagaagagtggcgattgaggtggaggtgtctcaggctcagctgatgacccttatccaataaacatgaagatgaagctgaggaaatgggagaagggactagtagtagtattgctgccatttttggccgtacacaacactagatttcctctctatctactcaaaacattaaaacaagaaacaacatgactttattttctatgttaaaattttaaacatttgttagttttccattgctttgcttgggtatcacttgtggacataataaagacgaagagaacagaaagatgaggtaatataatacgccacatatgtcttcaatttgataacgtatgccttttctttttccttcttttttgatcgataacatatgattagtttcattaaaattatgagtggtaatatttgtaccacttcaatctaaattttggtgacaaaaatactcactattactgttttggtgcgctattagttctttattacacactaggagagagatttgaaattgcaatctttatctttgtgagagaatgtgtaattcgactaactaataaattatatggttgcttttgataatatttttgttttgtttttttttaattttttaattgtaaaaatagtaaaatttttatttttgaaaaataaaaatgtgttttagaactacatttgtttttcaattttaaaaataaaaaacaaaaatatattctgtaaattttatttttattttttatttttgattttatttaattcgagtctggggttggccggggtccgggtttgagtccttgtttggggtttgggtacgggccgagtcatggtctggggtttgggtatgggtccaggttcggtaccgaggctggggtccaagtctggggttcggggtccgagtgtgggctgggttccaagtctggggttcgggtcttgggttgggtctgagtgggggtcagggtctgggtccagatctggagtcggggtctaggtccaggtccgaggttggggtccgtgtccgtgtctaaaggtcggggtccagagctggggtccgtgtttgtgttcgggggtggggtccgaatttagggttagggtccagttcagggtccggggcttggttgggatttgggtccgggtctaggtcgtaggccaatgttcgagttcgggtccgaggtctgagtcgtggtctgggtctggggttcgggtcaaggtatacgtcctagatcgacattcaagttcgagtctgaggtttgggtcataatctgggtttggggttcgggtcctaggtctgggtccaagtctgagttccaaggtctaaattaaggtcggtgtccaaaatattga

SEQ ID NO: 186907 - DNA, 9397 bp, Cannabis indica
taggaagagtgccaagctaaggtctgcccaagtggcagaacttacgtcataatttgttgcagtgggggcctgcgttcgcgcggcccctatccaattaatttctaagtttatatatcacactaatttctaaatctaaaaactttttgtgtattattgatgtaaaataaaaataattacactcaaaaacaatctaatatattaatattaaaaggaaaatgagattagtttgttcatggcggattttgagtattaatttttatttttctttaaacgtctcattatccaacctgactcgaacaaatctagtattggatcatccttgttatgcctttcatctgttgctttcttccttcccattttagtagctttaatttccttctttccatttccatgttctttgtcatctgtggtattcttctctaaaacttctttgtaagtactcaaatttaacattgggtcatccttgctatgactttcatcttttttatcaactttttcatcagcctttgctttcttccttctctcctttgtaaaactaatttccttctttccatgttcattctcatttgtggtattcttctctaaaacttctttgtaagtactcttcaagccatcatcgtcaactttcacagaagccatctcagtttcaggtagaggatgacgaaactcaccgttgatggtatcattctcactatcaacatggacatgtgatcttgttgtgtgttcataaacattcatggataaaaattggttagtatcacggttttcgcagtttatatcgaccataatctccttctcccttgtaccttgagaaccccagtaagtcaatgtagttatcagaagtttcagtaaagagataacatgtaccaataaccaatctagaaatgggacttggtggataatggtagagaatgtagtcaccacattatcatatttcatagggaaagtttctatgacttgaacaatatcatcaatcttattgaaaacatgttttgatggagggaaaattctctctaccatgttctcagctgctaggataaaatcgtcaataaatgagagaaatacaagccattgatattgcaaggtgtagagatatgggattgcaactgatgatattttgaggacccttttggttattgagcctaatggttcatctgcatcttgggcaacctcaatggttctatgagctactgttaaaattgaaacaccacaggtatgtaatggaggccttctgcaactcattctgacaatgctgttgaatcctgaaaaggttgatacaaaacaatcttccaagttaataaatttaattagattctagatctaatacaaaagataaaataaataatatgttaatttcattaatcttaagcaaaaagaagaaaaaagagttgcaaagtagagtactctttgatttattaccaaagcaaaaactgatatatctgcaaagaaaaaagagagaaaacaaagaaagaaaaggtacaatttttagattctatagaaagttaaaattacatcaaccttagattccaataccactaatctaccataaattaattagaaccgcacaactttcaataataatttttcttttgaaaataaatgggaattattttaagaacatctaaatgtagaaaatcaaatatagttagagttttatgaaaaatggccggtcattactgttgtcaatttttatggacactaagttagattttgtatagattctatatatactaactttcgtttaaggctcataatgaggtttggattagatgtatgttgcattccaaatagtgatagttgtaagatcttgacacgtgtacgttgaaaaagtgtgtcagaaagagtattctctcaagttctactcttggcctctcagagtggagaaaagaaaaagatcatggaattagattctttggtcttgtcacaccatagatgaagcaaaagcttttctgggcatttgaggtcttcattctcaaagtcctagtctttcaaggtaatctttttcaaccccggtttcaaaatcaaatgatgatgttcagtaaatttttatttgtattattcagcaactttgattaagatcatatacatggttgtgttctgtgtttcattattctaacaatgccaaaaccagaaactctactcggtaacgactccgcccgattaccaccaatctttagtatgtctggtttgctcccctagaattctcaagttgatcatcaagaatgttagataatactattgagtacatcaattgttatgcttttcttttccttgagaaattgaatgattggttatgctttaatgctattcttcatctttgtaagtttggtgttttgttgattcttacctttcaagtaaagctttgcaccttttagctcatcaacgccttggtatgatttaactatatctatatttgagttttgtggaacttaattccttccattaaagaaagttttggtcatcagtatggattatggcttaggttcgtttgctccctttcatcattttcattgttaaaaacaacaagttgaagagtcaattatatattttatgctgtgtactttcatttttccctattctataaattgtcaacttttgatagtgataagacattggtgaattaatctatgtattgttgaaacaggaatacctggtgatggaagatgtttgtttcggtctgtggttcacggtgctagcataagaacaggaaagccatctcccagtgaaagccttcaaagagaacttgcagacgagcttagagctaaagtatgaaaaacaagtcaaattttagctaggactttgtttgagtttaccaatttcttatggtattatgttataaatcctttaaaagaacttgtgcatcgttgggatttggacaggttgcagacgaatttgttaagaggagagcagacactgaatggtcagtttgttctctttggtttctaaaattaacttgtataattttctatcctaagtttacgaattattttctacacattggcaggtttcttgaagatgattttgagacctatgttggacagatgagacaacctcatagctggggaggcgagcccgaattactcatggcttcacatgttctacagtagggcttctctcttaacattgcagctatctgtataagtttcatcatgtgattgtagtttaatggagatcattgatttccattgcctttcattcatactaagtttcatactcttatccaggatgcctatcacagtgtatatgcgagacaagaatgacaagagttctagtggcctcaggatcatagctgaatatggtcaagaatatggtaaagataatcctatacgcgtactttataatggttgtggacactacgatgctttacgaagccctactcgcggtgcacaattcaagctgtaagctcttgtaaattttatatagcacacaagttaggaactttttgctcccttggttagactttgaaatttcacccttatttgtcaaatgtgggcattgacaggttcaagcaaaggtgaagggatagttaatacaggacttggtcatattcaagttattggaatgttcatattgtacctttcaaaatggtacaactgacaaaattaataaatgatcttgattatgaatctctcaacttattcttcaagcatcattcgtaactaactgcaatttgttataccaataattaggccctttaataacaagaagtaaatctagacaataatgcttcacatcaagttacttcatgtatgctacaaataaatatatcaacatttataaacaagtttgtaggactcgaagatttcgatgagtctaccaatagataacccagttttgaaccagcttacaatagctaaaaaaattgtataagatgcagcagaacagattaactgacctcccacagttgcgtgaaatacagaaatgatctctacgagaaatggcttattatcattctgtgtctttccatacttctcggagtaattgatatctgactacttgtacatcaccctttcttttatcttggaaattatctttcattatagaagtaataggtgaatccaactcgtcgagctcatcatcactagtgtatgattttctaagcactgatgatccactcctcagtagagtctgatttcctatctctcctatgatgcctgtttgtgaagcagctgaaggtggagaatagaacgtaggatttgcagtgaatgggaaactaacagattcttcctcattctcggaattatcctaaatacaagagcacaaatagattagtgaaaatgcatatgaagctttattacaaggtagcttgttgaataatgcaagatagtaaacaagataataatttgcaaagctcttctgttcttggaggacttacctctgaatccagagcctcaaacactgcttcaggaatggggttcggacagaactcatctggaacaaaattgtagaggaccatcttgatcaatggtgcactaagtgtagggcatacctttaaaaattaattgaacagtgttaaattaaaaggaaatgattagataactcactaaattaactgtgaaattaatatacagcacaaatttgcaactatacctcttttctaattgacttatctgctagcatttcaaatggaatcatcatgaggtcgctcagagaatttagaagacggaatgccttgaaggatgtttgaaactccggtctttcttcatcatcgtgcacctccttatcgtctaaagcatcatcaatgtcaaatatatcagtgaggcacctggaccaacttccgatctggggataaaaatataagaaatcagtgctgccaatgataataaagcaatcagaataatgctgtcaaatttttctttctttattagattataataagggggaagaattagatgttgaacattgtgaaatgaaaaagaagacaaagagacatattatattttaaaagacaatcctggaatcaaacatataaatccacaaaacaaggcacttatactcactgcatttttaagctgtgccccagccccaaagcttgaccttccagctggaatgggaagaaccttggaatcacttattgggtcagatacaggatccgttggcatctcttcagcattttcacgaagaatcgcattgaacattgccacatctagtctatcaaccaactgctccataacctgaaaggtaggtaaaaaaaatgtctttcatatgtgcagaatgaaaacctgaagcaaatatctagattttggtacattatgaagctaaggaattgagctgtttagtgcgtgtttttctcagagatgtcagaaaattataattcaatatacacaccaagcgaggaagtatgggcaagcagccacattcatgtccaccagctcgagcaggacaaagcctttggcaagcatctttgaaagccttcttccagagatctatagagaaattaccctgctcgtgatcactagaaccatactttcttccagaaactttctttgagctggaacccttagtagctgctggctgcatatgtggagtcaaagtctgaagaaaaaacacaagatatggtatcaaccttgatgggaacaattaaatttgggctaaatcatcctaccaataactaatacatatatcaattaattttaagaaagaaagggcttgacctgccaccacacagactctacgattcgggagaagatccatgattcaaacttttccaaggcaatcacaaatgtctgtgggtcatcccaattatcaaaactttctttgttgtcgctttgtttcaatgtagatcccttcactgagctctttccaccaccattactactaatgcaaggtccaccagaatgctgtacttttactacaatctggctgataatagctcttaaaacgattgaatttgataaccaaaaagtcagcctgtttatgaacattcaacaaaatgtcaaacaatatggtgcttttagcaagctattgattttgataaccaaagattcaacatgtttatgaacatttaacaaaatgtgaacaatatcattttcttcagacacttttcttttttcaaatcccagtccacagattcatatgctaagtagaataaataataacaataaaaagttaatggctcaaagcccatgtatgacatatcctaatctgtaaacaagtgatttgtaattcaattgagtcagtgttcttaaaggactgaattacaggccttctggttgacgaatatgataagaaagttgagtggatttttaacttcctatacgtgtcatgtacaaatcttggcataccttggaacatcatttccacatgctttagaaaccaaaataaatccagaaatagcagctctagctgcatttgccttcctagcctgtaaaccttccttgcaagcatgaagatagaatctagaaagtcgtcgagcaggtgcatgtattttacttgtggagcttccatgctcagcagcaactgaataaagaccaacctcaactgctgcagcttcccttaactcttccttgagcatattaatttgggagtctagtccagctttgttatcagacaggccttttgaagcttctttttctacacctgtagcattagtcatcctaccagcttgagcacctttgattattttggctttgtttgccttttcaataaaatctgtattctctaacgatctattgttgttatctgtgtcaaaaggtaactgtacagaattaacatgcttcacttgattatttttaacagtactatgagagattccaatatctctactgctgcttgtagaagaatcacttgtactaacatcctctgagaacctagaaatttgttttacatcaaaagaatgttctttcaccttaaagacataatctttccgtccatgttcttctctgtgttctttgttcccattattccctgaataaccagaatctgcaggtgtagtctcttcttggccatttttcgtatgtctccaaacttttctgtcaccctcctgagtggtttgagaatcaatatagtttcctttcactgattccttaacatacatacttgatgagccaactttatttttaagagcactagcaacgatgacattgtctcttgtagcctcttgagaatattctggcatctggactctgctgtcaacagcccttctactatcagactttacggaagaagaagaagaaggctgcacaccatgagttacagattttttcagaactggcatggaggatctatcttgtggaatattgggaaaggcgtcatcgtttatagaatcaacattggaggagtagcctattgaagacaaagcagatgaagtttcttttggttggttgaagtttgtagctagatcacttgacactatgtttgcagactcagctcttgaagccccctcaccaacattcctttcaacattattccttgacatttctggttgaatctgcaattaaatggcagatagcttttaaacaagtattcaactgaattgttccaaataatacaccaattagagtggacatacttcagctttaccattcttcctacatgataactgtgaagcatttcattggtgcaaaagttacctataaatagtaagtcctaaaagaaatggctagactattgccgctgcattatatggttcaaccaaaatatacgcatcctagtaatgaaatggtggattgtactcaaggaaggagaagactaaaaatagatttcttggacaacttttaagtgcattgtcttgaactaagatcagaacaaacatatagtgttaaaacgagggaatgtctcataatagatttgacaccatacctttccactatatggtgctgaactgactgttctctcaacactagaagagtttaaagtgtgagatgagtgtgaagaagcaccatcatcgtcgtcgtcgtcagtaaaagaggcaatctcagcttcttcatcattctcctcaaccactgattcagtttcagcaatttctgtagaagcttgttttgacaagctgctttttggtgaagggctggagctattatcaccaaatggttgaatattaacataaagaagtggttgacccgaatttttaaaactcttcttacagtttactggagtgcttaaaattgttgtttccctgattactccacaatctgcaagattaattaaagccgatcccaagagttgacccttcattgccttgtctttccgggattcaaacaagtaaaattctaagttattcttctggtaactatcacaggcctggcctttctttgatgcttccttgcataacaagactggaagcctgaaagactcattgaactcaatctttccatctccaacaccacaagagaaggacccagaagcttgatcaccattttcccaatgaagcaacacggattgaaccgatttaggagactgagacaagggccatggcttaatctcctggacatggatgatataatcaacttggacttgaacacttttccggttctttgatcttaagccaagaaccatggtttgacgacccttttgggaaaaacacttggtattgctcttaatgggtacgatcaattacagtgcctctatccatgaatctaaatactcaagaaaaaaactaaatcagcaaatcagatgacaaaatcttttgaatgcatgatggtatacagaattaaaaaaaaatactttttttctaatgcaatccattgagttgagtagaacgtgagggtggtattatgcacatccaaatttataataattgaattctttttagctttgtgtgtgacccacttcacgccacccactgattccgctcattttgtctccacaaaattcaaaccaattacacactagaagtcaccataagcgacaagctaattaaaaattaaataaattgattaattaattagttatagaaaagaatcacctcctaactcattattataatctaaatgagagagagatagtcaatcaaacttactagacattaaaaagctgagatttagatctctcacagagttcaaccataaatcagaacacaaatacaaaaagcaaaacaagctagaagaaacggaaaacgacaataaggatttgcattatccagaagtcaatccaaaacaaaaaaaaaaaatgaaagaggtatatagctttaagatccgaatcagagcaataaaattcaactgaaacagtgaacttagcaattattatccaaaaagcgaaatgatcagagctccaccgataaatgtacctgcctgtactgagaaagaagtaatcgcttccgtgagagataattctgtgcatgtacgtatctgtatgtgtgcgtatacaaatatatgtatatatatacagaaaaatagctaggaataaaggatttgcagctgtgtgtgtatgtatgcagttgtgtctttcagggtgtttcttc

SEQ ID NO: 186908 - DNA, 5901 bp, Cannabis indica
gaaacaaaaccaaaccacaaaaataaacccaaaaaagaatttaaaattccatttttgtgattatgaatgatgaataattctctaacacaaaaacaacacaaacatccaaaaaaaaaaacaaccacccaaaaaatcagcaggaggtgaagccaaaagtacctaaaattaaattaaattaatctcactttcattaattaataatcaatcccctctttttatgtttcttctttttcttaaagcattaaataaataaataaataataataataattacttagccgattatttcaaatcttcacattcacagtttttcagtttagtgagagaaacaactagagagagaaacacacagagagagagaagctacaatggcggtctcagtccccatcttggccatagtcgtctcacttcacctcatagcttttgttttcgctgttggagcagaacgacgccgtagcacggtaagtatttttgagctgaatctctttatactgtgttttttagctcaaaacaaactcactttttttgttttttttaggctaaggtggtgcctgatcagtacgatgagtacacattctgccgttatgattcggatgcttcgacggtgtacggattatcggcgtttggtttgcttctcttgagccaaacggtacttaacggtgttactcggtgtctttgttttggaagaggcttagttactggtagaaccactacttgtacagtcttcttcttcatcgtttcttggtaattttcattgattcacttctttcttttgattttgatataatttgtttagtttaaatttgatgatctgaactgataattaattaattacttgttttgttattctatttctgctaagtttgaataatggttatttgaattttaaacctaattgatttcactttgggaattttacgatatggttaaaaatgtttacaagttaaaaagcaaaaatagaaagaataaagtagcattgttgatgatgattagataatttaataatttaacttatttgggattactctggaatctgagaaagaaaagtgggtcagtcatgatttaattttaaatgtattatgaacactagtagtgttatgctagctttactttactttaactttttatctgtattttaatttggtaaaccaggtggaggggtatagggttgatccaatctatactttgaacaagctgttcttatgttatttgtgcactttagtcaaacttatcatgacttttgtttgcattattttttgtctttttacacaatactgaaatagacccttcattctgtttttcaaatgaatagtttcactttcacatttgtgtctttttctttagtattagtaaaagaccaccccttttttcaattaacagatagtatttgtttgattaactctggttgattattaccaaagggctgtttttcctatgaatgagatgtagaatatccttaataaaatatataatatttcattacacatctaaattcgaaaaatacatgaaaattcaaaaattcctcgacaaaagtcaggaatagaaaataaaattaggtgatagaacaagagaaatatatctaaggatctatcggtagcgaagaagggaatcacacttcttttttgaacagttctttcaaaaaactctaattatactttatgaaggtgggagaaaagagaaaattgattaaattattgactaaattagtaggcaaaattcaagtttgatactctcataatctctttcttttggttaactctagaaaaaaaaaatgccttggtatcatgttcatacggtcgtattaaatgaacctcgctgttttattttctgttcatataatgcatacaactttggttgctggttgggccggtttggtggctcgtttaaattttccaatatgttaggatgagcaaacatttgaacctcttatgtatgtaggacaagctttttaggggcagaggcgtgcttattggcaggttcggcgaaaaatgcataccataccaagtacagaggagtttttagagtcgatcatgtatcgtgtgcaaccttaagaaagggtgtttttgctgctggagctgctcttacattgttgtcacttctggggtctgttttttactactgggcacactctaaagctgatactggtggatggcaaaagcatcaaaacgaaggcgttggaatgaccaattctgactacggacaacatcagcagcacccgcacccacagcagcagcagcacgccaatgaattccagaaagtgtaataatttgttatgatctgatgtttagtaggttagtttttcaattttacagttttggagatatctaattaactaaaaatcacatagatgatatatcaaaatgttactttatgggctatagatggtgaaaaagaaatgttctgttctagcatttcatattgtggatgttggaaattatatataatatagttgtgctatgttgcttttgtctatttctatttactatttgctgtgttcttttgtaagattactttctgatcatccttgtttgttgttgtagttacttttcaattggaagttaaattttaaaaatgaatggtatatataatgattgtaatatttgtttaattagctggaattagactctaaacaaataaattaggcttaatttccattgcattaaaacattattatttgtcaacacttattttcgggaaatatatctgggtatgtatggggaggaaaaaaaatctaatatgtacaatttaaccaatgcctatctatttgttttattttattttgacaaggatcacttcattaaaaataattaaaattaagtacatatataactaattcatgactcatgagctaatacctaatcctactctaaggtggtactagcctataagagtgactagcattttttttataggttggatattaaattacactaataataatctaatatgatttgaggattaaatttaactgttagtaatagaagtgaaaatatttgccatttcaagcttggagcaccaaatcatcatttagttcggccaatttgtaaaccctaggtcaaattgctcaagaaccgatgatgtatcttttttgatttgttgttgagttagtgatattttataaaagttattatattaaattatataaaatccgatacttaattgaattaataataatatgacacattggaaagtgctaaacactactagtgccttttagcatttctttattttttattgacttcataatgaaaaatggtaccacaaataattttgtataagaacttaataccatttatacattttaccatatattttagtagtccatctaatttttattttctcatctatcactatctattcaccactctcaatttagcaccaaaaaaaattgttcaaagtcttattatggaccatttatgtcgttttctaagaccaactaagtattttcattatttcctttcacactgttagcctatactctgttttaacattcaattgttaattttatgtgccactcattaattttagtaatatttacatcaaaagtaattaacactcaagtatcaaaattaaattatattttttagcgatgaaagtatctgaactaaattatttttgtagcataaattattcttctaaatgcgaagatagttaaattattaatgacgtgttcagtaatatttttttgtttttctttaatcaacttaacacaaatttataatatttttagtttctaattaattaaacagaaaaccaaacattactaaagtttgtagcactcaaattattattttcttgcaacgaaaatatcttagttataagaaaatatagtatcatgtaatcaaacttaaacactgaatggaagcctcggtaaacgcctacagtaactctaactgtcctaagataagaaactgagcctattttatgcacttctacactaaacaggcaaggccaacggggtttgtaacacgacccaagtataaacaagcacgaaaaatggtcaaacgcgattgctagcatcaaagggtcaaacgggcagaaaagaatatccgttttgccttattgtgaggggttgaaatgaacatttttgtaggactttgaaaagccaactagtgaagtagtctttagcttcttcttacttactattctctcatattatatagataattcaaagtcaacaattaagtcaagcacaccaacaacctctccttcactaatttaaagttatatgcacaagagtattttctttcttgggatattttgaagaatatggctcctattcctattcctattcctctctttgttttcttcatcatcatcactactcattctctcctttcaatctcagctcatgataaatgtccaccattcttttgtgggaaacttggctcaattagctttccttacaacaataaaaccaatcctgaatgtggagtattcactgttgattgttcagaagaaaacaaaccaaagattcaactaaaagaaggaggacattggtatgccattaagaacatctctcaagcaaattcgattctaattgaggagacaacatcattgccttattcgaatttcgccaatgattgtgaaactatcaatagtttcgctcttccccgacgcaattcatcgctattcagttacaacttaacagctgagaattcactaacgttttacaattgcagccatagtgttggattggaagattttggtcaaattaagtgcagaggcagagacaaagactatgatttcttcttgtacaaaaacataagttctccaatggaacaacaatgtccaatgattgagcttccacttccaacatcaagacatcatgcacatgatccattttcgattctttttacgtttcaagctcaaataagttttgattgtgcaagttgtcacttcttacaaggagggaaatgctacaacaatgagcaaaatcagttagtgtgtttaactgatgaaggtaattaattaaataagtttttagataaggattttacatcatgatgagttatgagatttttaatgatgttaattcagttgatttgtttctgtaactgacatattatacattcttgatgagttttgtttcaggagatgagaagaaaaagccaaagttagcactaagactgggacttggattaggtaagaattatcttccatttaatatctgattcttgtacaaagctttggaaattaattaattcatgtccctgaattaatcttatggtgattttagtaattaatttctttaatattgttggtgtggtcacagtgtccaagaacaccattttgagctagaaccaatcaaagaattaaaaactcaacttaattgaaagcaatggaaagaataaacttagttcgagaatgaatcaaattgaatatttattaataagaatagtcaacagtacacatttgaatatctccaagaattacaactcaaaaacagtaaggaattaagtgacttggcaggaattgagttaaattccagcatttggagtatcaatctaagtctaacatcagaagaataatcaacaattgtctcgaatataagtgtttcgcctgctccattttattagtatgaggttattgtgtaattacatagtttgttgagtcaattccaaattgctatttatactcattagtgcattttggagatttatcctatctcgatgatccgttatcttaattgaactaaagttttattttctcattttcattgataaccctttcatgtaacatattcttattttctttgtaaattccattaattatttctctattacctcattgcattttgttccattgcattaacaatgaagactttgatttttcagggttaggttgtggaattgttttgaccataattgggttgggaatcattatgtggcgcaggaaaca

SEQ ID NO: 186909 - DNA, 2133 bp, Cannabis indica
aaaaaattaataatataatttatttctaaagagtatgtttgtgtgatatatattcctttgtgtatttatatatgtgtttttatgatgtccaataccatattgatatgatgtcttacaagtggttagtagttccatatattatttattaaattaaaatatttgggattgaatattattttacaccaatagtacttggcactgtaaggtgctccttagcatttttcattatctaatacacattgtataaatctaattatctttttattttaatttataaaatactaccttctaaaaaaaaaaaataagtgaaaatatattttatttggcctctccttgtgttccgccactatttagcacatattaaatgttggttcaaatttgacacaagattaaatttagcctacaataaatgttactctttttatttactataataacactaattattatcattcaatggacttttactttttcttattttatatcttatgtattgtgctcaaattttagaacctccatggtcttacagtccaaaacaagggtgttacttcattacttgttagtgagaacacgtgtctaattccaatccacgtagaatggtaacgacgggatacagtttttgacagatgatgaagatcccatcccgtatgcccgttcggttcaacatatgatcgtttgcactgaaacccgctgctttagcacacgtgcgctaccgtgctgggaaaagacaaataatcatgagattttattaagtgaatcaacaacacgtgtgaaacaaaacaggcttagtgtccacgtgtcagacaagttacaagatgctcacgtgagacagaaactgaagaagatgctcaactggttttatttgtatcatcatcatcatcatcctcttcgttatttgtaaattaatatacaaatataaaataaaacaaatccagaagagttttatagaaatttcacaaagcatgcactggcacatagtacataatacaccatcacaatactttcactagctagtagctatcgatgatgggactagagatggtgactaacttttccaatgaccatgcccaagtgatgcccatctcattgttcgttgcggtactatgcctttgcctcattattggtcacttgcttgaagagagtcgttgggttaatgaatccatcaccgccattttcttagtaagtttcaaacaggactaccacacaactttcctctgttttaatctgactttgtattaaccattgcaaaaatactatatgaacgaaaaatgacagcggctattaattatatgtatagttagtatagttacgacagtattcttaccgtgattgtaatttgagtagctgttgatatgtgacgtaaaagatcaccgtgatctaaattttgtttatggtaaacaggggatcatagcagggactgtcatattggttatgagcaagggcaagagttctcatatccttacttttgatgaagaattgttcttcatttaccttcttccgcctataatttttaatgcagggtaagatcttcatcatcatactgcgttttataactgtgtacttccgttgctcatgatcatggatgtatatatgtgttaggttccaagtgaagaaaaaacaattcttccacaacttcttaaccatcatgctatttggtgtgattggtgttttcatttccacttcgatcataacgtgcggtaattatttcaatcacttattattattactattattaattcactgcatatatattatatagagtggggctattctaaaggtctttccacttacttttgacctaggcagctggtggttattctctaagttgggtttcaatggtctgaatgtgcgggactttcttggttagatacttatttattatgaagataattatatatgtattgtatatatgacaattctcttgccgtttgtcataaagttcatgtacaatattgggatgtaactgtatttgcaaacgaacttgtgtgctttgcttcagctataggaacaatattctcgtcaactgatacagtgtgcaccctgcaggttagtcagcacttgaacttgaggtttggttctattccattccatcctgatctttcatttagtttttttttattattatttatataa

SEQ ID NO: 186910 - DNA, 2576 bp, Cannabis indica
taaaatgtaggttgctgacctaacttgtgttacttttatttttgcttttacattttaggttgcaatagatacggccacacctcttgacgatgctggccctagtggaaattacatgatgaacagtgcagaaacctttgggggatatcccggtccaatgcgtggcggctacggcaggatgtatggaagtctagactttgatgacgtgagtgttatactattatggctgagcttgagaattagttttcattgtgttctgtttgttacttttgaaatgaactagtattgattttcaaggacatgactagtccatcttatttattaaacggtgtgttgttgttttgcagtggggtggttacggaatggggagcgggagaccgtccagagcagattggaggtacaggccatactaaaggattgttggggatttttcttcaggctatataataaagtaatgtcatagtcaatttgtttatttcctaaatcggtatactgctattagttccatggagattttagttggggttgaatgttgatcgacttgtgtaaaagtgctttgaaagctctatttgtggtcgtggataagatattttagcatgaaagaaatttagtttttattccaaagctttacaaatcaatcgcttgtatgattcatcatttagatgtttacttatgtatttaactgttgtctattcaatccgaccagctctttcgcaatgtataaaaagcaatgtcgtggtctttataaattgcaaaacaaaaggcttatttttgtttcaatacaaccatttgaactttgaggagctccctaaatcttaacaaacccactattctatttcacctgttgcatcaaatcaaatcacattcaacaagaagaataaaaataagctagttcaatcaaacaataattcagcttcaaccttcaagggggaaaaacaaaagtggagctaggaagcacggcagctaaagaagcgacctagtgatcccaccctcatctgttttcgtaagcagaagaacttgcgtggagtcttcagaacctcgtggctatggctatggctacggctgtggctttcgtcggcagacaagttggttctcatttggtgtgctctatactgtgctgttctcagcttgtctatgatcttatccattgtagctgacctcttcttttctagtttcacctgaaaatgaagtgaatgtgataaggctatagacgagtacttgagtagaaaataataaaaatatgatttttaagctcgacctcaagttttctaatttcagcttctgcttttgccttctgtaaattctcccacgcaatgattttggcttcctctctttgccatctgcatatccccacacaccacatttatgatgaactctttttgtatgttccaaaagtgaaagtacataaatgaaaatgaagaattgaaaagagagaagaataatgtactttgagttgtccatggcagactctgaaacatcaaaagaagaagccgaaactggcaaagcattttcagtgaggtcattattactattattattaacaccaagcttgtctttcttactgattcttattccacgtttctttgaccaccgaatcatggtggctcgtttgtcaacctcaacatctttgacttctaatttaccagaatgagaacgagaacgagagtgagagtgatcctcactttgttgctccattatagaaagtagagctggtggagaggaactaagcgacaacctcccaacctccatagatgaacgaccactctccttattaggaggaggaggaggactcatttggttcgccatttctcgtttcgaaacgtccctagaaaccaacgcttcctccccatctttctatcaaaaaaggaaaaaaaaatcagatcaaaatcaaattttgccgagacccttttgagccaatatgaaaaacaagacaaagattgtacctttggagatgggtttgaattagaattattagtactgttctctcctaattctggccaaaggggaacactttccaatctagagacctgtccctgtccctgtcctaatcctacaccaacaccaccactgaacacactttctgctcccaaaacaccagtagaaaaaggcgaactacccgccgccgcggccgcagtcgcaaagctcctcaagctgcctccaccgcggccttccaacactgcagctggagaatggtttgagtagtatgaagttgcagggtgaacaattgggccacttttagactttggcctcttctgataataataattgttattattattattactattatgattcaagcaattgtgactactgctactactagtcacccccccttgtccaaaaacagggctacaaatccacctctctgcatcttcccattttagagggaagtgttcttccactgttgaaactcattaaagcagcagttgatgacgatgaaccaatctgcaaaccacctccgattggaggtaatctctctgaggcccaaccctttttgacaatttcctgtatttccacggtattgtggagctcctgggcttggatatgtacctgatcatgggaaacagagtcgttttttc

SEQ ID NO: 186911 - DNA, 1354 bp, Cannabis indica
ataataataagaataatagtaatgaggtattactactgaggagctcaaccaccaccgattcaggtagcagtactactacaggcagtgatttaagccatgaaaatggtttagagatcaaaactactattactactaattgttataatcaggagcccaccttgagtttaggttttgaaaccaaagataataatccaccaccaccaccagtatcagtagtaccagctgtactgcttcatcatctacctagatcaagctttaacaatactagtactaataataatattagcattgatcatcataagtaccatttccatggtcaccaagctcagatatatgggcgtagtggtgagttaatgaagagaaatcccagatcgattggtggagtaatgaagagaagtgttagagctcctagaatgagatggaccacaacccttcatgctcattttgttcacgccgttcagcttcttggtggccatgaaagtacgtataatataatcattaattaattattatgttttcttcattaattaattaaactgttttcttatacaggagcaacaccgaaatctgtattagagttgatgaatgttaaggatctaaccctagctcacgtcaagagtcatttacaggtgggcttaattaatcttattgataattattcttttcattgtcattttaattttatttggaggaaagtcgtacatatatatatagagccttatttgtatttttcttatcattatcttattcttattctttaataattatcttattctttaattttgatggtggtcgagaacaagaagtaacgacaaaatggcatctaggctagtgtaatctttacaatgcggacctttttgtttatgtattttattttaaaaaagtttttaataagaaaaaaattaatttgtaccgtttcttcttctttggtatttatacagatgtatagaacagtgaagagtactgacaaagcagcaggtgtaattggattttccttttcctccttttatttcatatcaagtatatatttatataataaagcaagtaattagtgtggaaaatatataattaactctataatatatatatgtgtccttattaattgcagggcaaggacaagggcagacagatttgggtttaaaccaaattaggagagtagtagggattaataataacaataataagaacattgttaatgatgagcatgagcatgtagatggatcagatggagtattatcttccgagatattagctcaaccccacttaggactaccaactaattcccattcccatgtgtaagtgcttttattgatctcaacctcaaatcttataaatatatttattatatatatat

SEQ ID NO: 186912 - DNA, 3921 bp, Cannabis indica
catctcgtactgcattgatctccacgttactgtaaggagcgtctgagttaaactgtaaaacaaaagattaaaaaattaatcattacattaaaagtataattaaaataaacctaattatagaagagttatatattcgtatttgatttttcaagaaacttgtaagattaacaaccgtcatatgaacaatcttcagaacataataactacattgtactccatccgactgttgttgacacatgtactggttgatttttaatcttgtttcatatatttttcgggtcatgtacatgtccacaaaactataaaccaaaaagaagttaattagtgaactaatttttaatgtaacataatctaaatttaaaaaaattataacacttactttttgatacaattcataatatcattcgggataaagtcattcatcgagttgagatatgcaacactttgagtactggcatggatcataattgtctattggatggtcactacacataataaaacatgttaatttattcaactcactaatcgatctattattttgttacatttattaatataaaaacctacttactcggaattccacgaatatatcaaccattgtccaggttgcatacccaccagtcgctaacatagattctctgaacgttgttcgagtatatcggctagagttgatactgaagctagcatgattattaaatgtgtagtattcctcaacccacaaagattaagtgtgtgttctaacaaataactaaatcaaaacagattattaataaacagttgtacatataatttttagcttagatatatatcaactaattattatttattatacctacaccaaagaaatattacagtatcttcttctattgcatacatcttccaccttgtctatgctgatccaatactcttagccttcttctccgaacactttcgatttaatataatatctctttcacacaaatatgattatgcataacactatagttatgtcgttaaagtcttttaagaacatttttcataacgttgttgaataggggtgccatagaaagtggaacacttttaacaacatttataagtacgtaagtgtcatgcattttgttataatagaacaatttccaacactttgtataacaacatattttattttttacataacattaataaactatcatgtaaataagtttgcacaacaaaatataaagtgtaattatttatatatgtactaaaaacactaaaataatgtcatttcaagtattaaatcagggacggacccactttgattgacgtggggctatagctccactaacaaaaatactgccttttaaaaaattaaatgtaattttttaaatttcataattatagattaaaatagtagaaaaagtctccacaaagttaaataaatctagtaagagtaattataatataagtataagtattttataatgataaataagcccccacaaagtaaaaattcttgatctgtcactgtattaaactatattattaaacaattaaaatttattttatttttcaaaattaatactagtatttgctttattttattctctgtataaaattctgagtgtggtattggtactgttgtagagcataaacaaaataaattaataccccagaacttgataaattaattaaatatatatacaaatgtacattatcaatcaatttattaaaattgcaatgaattacttatacaaaaccaatttataactaatacacttagtctcttaaaaaattaactaatacactttgatacaattaaatagatcttagggaataagtaaacactttcttaagttatatacacactactacaaattcggactttagaggcagtcttcaaggcctttcagtattgattttagcaaaatttactatcaacgctgatctacaacactataggatcaaacataaccgacgccacagtgtacactataacatcgattatttaataataaccgacaccatatgtacactatggcatcaattattagtatataaccgacgacgaaggcttaaaaaccaatgccataatagtaacaattaatttattttttcagtttaaaacctattataaatttagaaatttaatttatttagattttatatttattaatttaaaataaatattatttaaattaaattaaatatttattttttaaaagttaaattaaatattatttaaattaatttcatgattagccaatattcttaaattaatttcatggaagcaattaaaaaattacaattatattacactaatattttaaaattagtcaaagtgttaacaagttaataagtctaattataagttaacctaaaaaaataagctaggaaagaaaaattcttataaatttcagcattaatcgtccaagccttcgtgaatcagcgccaacaatcgttttatccacggtcgctgtaacggtaacaattcaatttttagatcgtatgtcttcttttccccaaactgtaaaaagaagtagatatttatattagtatatatatatatatatatattattgtttgttaatataagaaatacaagaattaataattaacacttacaactttttgattgtttatataacagttatgacttgcgcgtatgatgatgtcagtcatgtatttcaaaatataaaaactacattcttagtttttaggttgtcttggacaattttctagtgaaattcctggccacattccaagaaacgcattatttgatacccctataatctcgtatgctctgttttaaaaattatattaacatttcaattcattaacatatatatatatatatatgtataacttagttaattaaaatatttgttacacaaagagtaattaaattattaccttttcaacattgtattaatttgtgggagaactttgtgactacgtatatggtctaaatgaataattttccttagtgtagcgacctctaggattcagtgggcactaaaaaatatattgggatgtatataagatagtgtaaaaataatttcaagttataatatagaaaataattttaaattatctcttaaatagtatttacccgatattttaggcaatgaagaacatttgggattggctactcatcgatgaaaaccaatgagctaatcaatctgctgcaatcttaaaagacttcgccttctataaattgtccttaccgtttactgtgagaagctctgggttgtaaaactaaaaacttcatctcaaatcattaatccctcccagatgtatttgcattaaatttttaaatattaatgttttattataatttcagtataatttgatatataattaattaagttaaagaagagtatctatcattccaaaaagtattccctcaatgccgatgaagtcacacaatgccacctgctgtaaatcttctccagatatcgtgatctgggtatagtagacactatgaattaatccacgtggtacccgaattgggattatcgcattttttcctcaatttttaaaaattcttcaaccatttatctgattgacctctggattagtgtcatgcatttctagtgtgaataatagatctgcttgatcaccaacgcctttttcgagaagacatgtgaattttttccttcgacacaccagagccattaaggaggtgcataaaaaaaaaaagaaaaaaaaatactatttcatatgattattttgtgttcctttaagaacatgaagatgacattagaatgataggagatggtccaatcaagtttcatgaggccacaaaaaaacttaattagaattttgtaccattataagaaaatagctcacattatctagcaactccttaataaatagtcattgtagaatagcattatgattataagttttagtatactttattttattaagtatataaaaaacaatatagttacacattac

SEQ ID NO: 186913 - DNA, 2994 bp, Cannabis indica
aatcgaagaatacatgctgaaaaatgaagcaatatgcagacagtcttgctccaactggccaacctctgtccaatgatgatcttgtgttatacattcttgaaggattaggatcagaatatgaagcaattgtggtgaatctcacgtccagatctgaacctttaaaccttcaagaagtttaattcatgttacaaagtcaagaaataagaattcaacaacttttatctgataccttgaccaacattcaagcaaatcttgcctatacaagcatcaacaatggaggtcgaggaacttcttataatcgtggtaatcgtggatcaactagaggtggtagaggctcttatagaggtggaagaagaggaggatataagcttgtttgtcaattgtgtggcaggacaggacacactgtggtgaagtgctttcttcgatttgacataaacttcactggccctcaatccaactccccacccacccagaacagtgatgattccccacaaaccctactcatgactgaaaccaacaacactacagatcactctcatgcctggtatttggacagtggagccacttaccacatgactaatgattcaaaatctcaccactattgcagactacaaaggcaaggataaggttgttataggtaatggatcctctctccttatcttgcatgcaagttctagttcaattcatgctaattcaccaacacactctttagtattacaagatattcttcatgtgccaagtgttaccaaaaatttacttagcatttctcaattcataaaagataaccaagtcattcttgaatttgatgatatttgttgtcttataaaggacaagaaaaccaagcaagtacttcttcggggaaacatgtgtgaaggactctacaagctacatgtcccctcatccatatccaaggatctctccaccaaatctgctgattcaaccactcctcaaacctttaagttcactacaaccctgtgcatgacagtcaacatcttgctactgattgacatcataagttgggtcatccctccaaacctatcctaaataaagtgttgtctactgttgtacctaatcataaatgtactcagcttgatttttgtaatgcttaccaaatcggcaaactctatcatttcagcttcaaaactactagtaataaaatcaccatgccatttgaattaattttgcctgatgtgtggggcccttccttttacacattcaatgatgaatacttaacaagttattgtgtattcttgtctacagatggactatcagagtagttatagttcttaactgtttttatgtttgtttggacaagttggttagttcggtttgatctttcattttctattagcttatttagtgaagttggttagtcacttaagtgactctactatactatatagagatgtattagttctcgctgtacagttcagattgttatcaaataatattcgtttactggttttaattcaattccacaatatggtatcaaagcgggaaagagaagttttccctcgatcttgattttgaccgacgtgtcttcttcttccatggcgtgcctgttcccagagctggtttcttcgactactctgtgtttctcttcctctttttttctcagatcaaactctttgtttgatcttctttccactcaaaaatgtcgaacaatgatcagacaaatcctgttgcaattggagacaactcgaaccatactgtaatcatggaagccatcaatcttacgattcagcaaaggaatccactggaagatccttttaatccttactatctccatcatgttgataatccaggaaatgtcttggtctctcaattaccgaacaagacaattatatgtcctggagtagggcaatgcagttggccatttttgtgaagaacaaactcaggttcttggatggttcgatttctaaaccctctcttaatgaacctgctttgtataatgataagattagaaataacaatattgtcaatctatatatgcatttacctcctagacttaccccacctagttctttgtctgcagaaactaatctcgtctgcaaacttcacaagtcaatatatggattaaagcaatcgtccaggtagtggcacaagaagctattcgatgcatttatccaagaatcattcaagtaagctcaagcaaactataccctattcactcgaggaaatgaggttgatttcatagccttacttgtctacggggatgatatcatcatcactagacccaacttagctatcctacgtcagcttcaacaatctctacactcacggttcaaactcaaggcccttggatcgctacgttacttccttggctttgagattgccaaaagcaaagatgacctatttttatctcaacgcaaatatgccattgagcttcttgaagagacacgatatgtaggtagcaaacctgcaaaagctctcatggatccaagaacgaagttagatgatcaacaaggggaagcactaacaaatcccttttcctatagacaaattgttggaaaattgctctacctcattctgtccagacttgacatcacctacgctgtcaactgtcttagccagttcatgagcaacccccgcaacacacgtttgcaagctcttcaccacctgcttaggtacatcaaaggccaccctggacaaggcctattgtactctccaaatttttctctcctgtggtttttctgacttttattgggcttcctgccccattactagatgctcaactacaggattctgtatcttcattagagactgcttagtttcttacaaaactaagaaacaacctactgtctcccgtagttcagtagaagcagaatatagagcgcttactgcaactaccagtgagataacttggcttcaatacctactcactgaccttagaatccctcaaacaaaacaagcttttatatactgtgataaccaatcagctattcatatcgccaacaatctaacctttcatgaaagaaccaaacatatcgaatt

SEQ ID NO: 186914 - DNA, 1394 bp, Cannabis indica
aggatgggtgaccttctgagaagacttcctaagacaaagcacgctagaaatacttgtgttggtttgtagggtcattcatcattccatgaagcagtcagagtgacgtactcgtgtataagagtcattcattttgtgggtgtagagacttgaagcaagaacgttacacttattttattttatactcgtgcaattaaattgagctaaattattctaaatttatcgaaataaacatatacttattaataagaatttgacaataattttgcacatcattatctccatgacactttctctttggaatttcctcaatcttagcatagaaagtggtatattatatatattgctttgttgtaacaacactgactccataagagtctaatcatcataaaaacatcacaacacatccaaggaaacttttctccatacaatatacatatacatacatatatatatatatatattataaaagtttgattagaaaggaggtggggtttccttgtatccaattttcaaatctggtgtgacttaatactaacattgttgtgtttgtgttacatctatatttacatcaaagtatacatatataatatatattaataataaataagtctactcttttaaagaaccttttgttgagattgaatcttggggagaaattgagaaagaagtgtcactttcatattcaagatcttcaaaaccccagaactcatcttgttcttcttcttcttcctctggcattttccaaatttcatagtctgtttcctcatcttccataacctccaaaacctgtaattcaaacccaaaaaaaaaacaacaacaactaataagttactgtggtgtggtagatacttttactaaagtaaaaaaagtaaagtacttttgactatggttagttaaaaagttcttgaccaaatttagtatagtgaaaaatccaaactttcatgagatttttaaccagtgaaattggcccacaagtttagtaattattgggttgaaaaaaaaaaacttgaaattggggacaagagaaggaccccactttcacaatcattgtagtgatcatataacttaatcttataagtacatgaaaggcagggccatatacatatataaattagagtagtttgttatataaatacataaagtttgtttttcagttgcagataaatatttaagtttaatttttttacagtataataatacctaaattatatttttagaacttccgtaagtacccaactattaagtgttaagtcattattcacgtgttattttcttactcgtatatttaaattaatttttaaataaaaaaattaataacatagacgaagtaaaaattattatgtggctattgacttgacacttaatggctaagtacctacaaaaattctaaaaat

SEQ ID NO: 186915 - DNA, 2884 bp, Cannabis indica
atataagttttctaatagaaccttaaatctataattttattcataactacagcttcagtaatagcaaaacgagttaaagtgcgttaacacgaaaacgacatgattttgttaaccttcaaaattactaagtgtaaattttaggatcactagattaatcagaggaaaaatctcaagatacacttgaaaagtgcaaagaagacaagaaaagaggtccatccagcatgatgaaaccccatgcgagaagtcaccccagcaaagggagagaacctgacacgagggggcaagcgtgagttgagccccccgcgtgagaagctccccatgcccaactccccacaaccagccacccgcgcgtgggtgtcctcctcgttccctctctccctcactctccccgcccctctctccctcactctccccgctctcaccctcctctttcatttctcatcttatctttccacacatcactctctcatgcccataacctatcacttgatccacacttagaagaaaattatacttagccaaatttgtaagtgttgctccctcattataagtataggctatgatggaaaagacaccaaagggatgtatgaccaaagacgagtctcttgaagccagcacgcctttgataaggcctaaaaagaggaggggttgtacaacagttacgacaagtacaagtagtgcagaaaccatttgtctcactctaaaaataagctgacatccgcttagcactcctccactacccctttgacacactgaccctcatggtacaattagaactttgtcccttacttttaggatcacttgtatttcatagccattagagctcaagtgtaaaagcctcatttggatacttgtaaaatggctagataataaccatttgtaagagagctctaatattcaatacaatagtatcttactccattgatgattgagctttcttaattttttgtaagtttttcatcatcgactctttgcatttgactttttaactaaagtttagttcatgagttctcaccgtcaacaggttggcaccgtccgtgggaaataaaaatccataattacatctttccctgagtattaaccaatcaccatgcgtagacatttgcaacaccaccaagccaatgctcaaaaagagtccccagcatatcatgacttgataacaactaccgagaaggccatctccagtgcggcaccctccaccatctgtgccacaagattttgatagttcaagacatggacctagaaaggagaagcaagtgtactcgaagagctcgagctcttgaactcgctactatgcggaggagataaacaacctctgctggaaaaactaaaagctagaaactatggtggctaggatgtaaaaagtgttgagtgacatactcaaagaaaaaacccaagcatcacacttttgttacaaaagccactgataagagaacagagtctcaaccacatatgtcggtggaagggtttccatgtcattcactaatagcacccctaataggtcaacgtggaagaggttcgacgcaagataagaaccctatgggtcagttgagacaactcaagcttacctaccatgagacggtcgaattgagggaaacaccccataaccttagggatagattttgcctaaaagatctcatgctagggggcatctcgcctatggcttttcctaagagaaaggcaaacaaaaggcattatcctttagctttagtgagaagtcacacactgatgggacaagttcttctcacagaccctatgcaaaccacaaagaggacccaagttccgttcgctaacccttgagagaggatgaacaaaagaataaagaagccgaaagtggagatgcaagacctacgttaaaagatagctaccgtctcaaagggaaacataaatgatgataaagagtttgatgaagaatcccctttctcaagggagattcaaattgaaccatttccactgagcttcgaggagctgcagatgacactatatgatggtacaagtcatctatagtaccacctcggtgcttttaatgagttaataaagatgaaaaaagtgacatataaggaaaagggtcaatacttcatggtcacactaaaatgagttgcatataagttgttgaaaaggatacaaccggggataatcacatcctggaatcaactttcagaagagttcctctaaaaacataatgttgcatgtgattacattatgcttgtcacaagtatcacaattgtaaagtaagaaaaagaagagagttaccaaggtgggaaaagtttccaaagatgaactcaaaatcgctgtagctgtaggagtacgccctggaagtggactatgggagaccatgcaaaaaagagagttgcatggcttagatgacttctatgaaaggatagagatatatatctgtgtgggggagggtaatggagtctcaaaaatagatacaagtgagtgctcattaggaagctcgtcaacccttacagggtcttctagacgtagcacttatgagttaatgtattcaagaagtcttcatccctcaactcgtaagcattaaacatcaagagattattcaaagtgaagttctcttatgtcttacgaccaatcaaagaagacactcttggaaatagcaggcttgtcattcttcctttgatatattatactaaaataaaaaaggaacgtaagttgacctccaaaattagcaaatgtactcaggttcttatgcatttgtcttatgaactatcaaatttttatcttaaatgtgaccttcctcactctccatgtgcccattcaacttgtttactacacttttcagttgaaatggccaaaatgaatagggggtcacgatagctaaaagtgcctagcaatgctaaacaatcatgagagagagagagagaga

SEQ ID NO: 186916 - DNA, 2921 bp, Cannabis indica
ggtttgtgtatatatatatatagtgtatatatatatatataaatttatcaaaacaaatgaataaattggttgcgaaattgattatttgttaactattgtcaattctgataaatgatggatattttattaaaggatttagtctaggtaataataacctggaggggttgttgagcggatagctctggaaagcttgctattgtgtaagctttggtgtttatcaatgagaaagctcaagagaatttcagttgttgtttgtgttctaagataaggaagattcaactaaaagcttatcatgtttgtaattttagtaatgagtagtggataagctgttttagagatggatacatagttgatgagaatattaaaggcagcatgctgattgtgtttttgtttgagctgtgcttaggaactaaggagagttgaggtctctcgaataccttggttaaacaacaattatctgttttcctatttaatatttcattattcccgcaatttctctccgttttcccttattgttttggatattgaattgacgatagcagtggggtctgtcagtttcattagtcttgggtcaatttttgaagtttagagtagttggttggtttgggggtttagatattgaaattgaaaaaaaaaaaaatacaatgatgaagtaaagcatatttttctgtttgtttgttttgtttcatccctaacttcagattcccatgagaatatcataatattttcagatacactgcatctgttgtggtactattaaaaaggatttctttacttagtatgctgcttatccttaatatgtatttcctactttgcgtttcagacattcatcttctgggcggttggttgtttttcttaatttttgatcattttttaattatttcatggaaattacacaaggaccctgtggaattaattgtagtctgatttataatatatgtcattgtgtatgtgctgaaggtactgccctcaatgtaaagagagacgacaggcaagcaaaaaacttgatctatggagacttcctgaagtgttagtcatccatttgaaaagattctcatacagcaggtcgatgaagcataaactcgaaacttttgtgaacttccccattcatgactttgatctaacaaattacgtagctaataaaaacaactctcgtcgtcaactctatgaactgtatgcgttgaccaatcattatggtgggatgggcagtggtcattacactgcacacattaaggtgagtggagagttcatgttgttcctttagtttgttgtgtattagcaaatgtgatataaataccaaaatcgatcaattaatgtatattaaatttgaggtcaaaacagaaaaggatcacgtggcacatttaagcaaaaagttaaaggaataatcatactcttaaggatcctaatatattgcattatatcgtttattacatttacagatattgggtgcttcgttgctcatactaactacgttacaatttgcagcttctagatgaaaataggtggtacaactttgatgacagtcatatatcaccaatcaatgaagaagaagtgaagtcgggtgctgcatatgtactcttctatcggcgggtgagatctgaagatgcttctactaacaatggagctccaccaagtgcagatgccattgccaaccatattcattcccacaagtagattccaaggaattattcctttcagaaaggggcagcaatacccaacatattttatttctatgttagttgaatttggtgtattgaatccttccaaacttgggctgaagtttaggcttctgggactaataaagttatatattaaacaacaatacactattgatctaatccaatacttgaaaaaatttattagaattagtagataattagttaagtttgttattggtaagttgagtggttagtttgttaatttagttagttaagttctcttactaacttaagcttctatgactgtctgttgcctatataaagccatgtacgcggattacttcatttttagcttattacataaataaaagcaaaacaactcttttgctctattattgattttctcatatggtataagaaaccttgcccaccataacttccatggtgagaccttctacatgtttaacttccatggtgacaccttctacttgttttcaagataagagcctactcctaatgctccttttgctctgttaattcctcccccttctttggtggctccacgatgaacttagaattctagatcacctactcaatctcaaattggatttgattcctcaaatccaattcattctcttggcgatcttctccctagtggcgttaatccccaccagcttcttcttgacgctctcaacctcatcttgattgacccacacttgaagattcatctagtcccttcttcctcagcactagagatcgccctaggttgattctcgtctcttctgttctaaattatgctaattaccaatcttggaagcgtgtaataacaatggcccaagctacaaagaacaaaactggtttcatcgatgaatccatccctcgtccagctactggtaatcctcttttcaattctgggatttgatgtaacaatattgtcatgtctttgactttacatcttatatcccatgagatctcccaaagcatcatatattttttattttgcctctaatatgtggcagaattttgctaaaagattcaatgagggtatggtccttgcatctttcaattacaaacacaactcactcatctgcaacaaggtgatcaatctgtcacctcttatttcaccggacttaactaaaagagtttcaacccaataccatttacacttgtggtgcaataaaaaaacttcttgaccactataatcagaatctagtgctttatttcatttctagctcaaaactccaccaaaccttccagagtacc

SEQ ID NO: 186917 - DNA, 3559 bp, Cannabis indica
aaagaaattttaattattatttaccaataaataatcaaattttaactcataattataaacctaaattaatatgcagtttcatagttttacagctttttaacgtgctgtattttcagactagttgattcatgcttatgtgttgtgtgttcaaacacatcatgtcggtgtgtgcttaagcctatatgccaatttacagcatagtgtcttgttatgtacaagctctattttttcgtgtccagatatgtttgcctcttaggctcataacaatttcgtgtaaaaaaactcagtccatggaagtagtgggaagatatccgacacctcttttggtatctccaagggaatgcaggaccaatttttgccttgaagaaagtgagacatgatagtgattggcccataacattacccgacctacatgtttctaggcaaatatacatgtgttcactcactgactgcatggccactaacatttaagatttgagatagtaaaacttcaaaggctaaaagcatgttcacttctgggtgaagttaaagaaaagaaaacataaaagaagacgacttcaattacgaaacatgaatcttaagttaattttttcaccttgaaaaatttaagaagcccaaatctcagtagctatttaaacaaacgggacaagtgaaaatgaacacaaaactagagccatgccgcatggcttcacgtgaaattaaaactcaactcgagaatcagtgaaccacatcactagccattccaattctcattcctgtaaagattttagtataatttgtttccagttgaactctatgccgcaaccctctgtgcacatctcaccttgtatacaacgacaaaaagattgacaacctatttacagagtttcttgttcatatacaaatgagattcaagatatataaactagaagcaaaatccaaccagagcaattacatggaaaagaaaaaaagaatgagggaaaaaaaaaaaccacccatccagaaagcctcaaacttcaaatgtgcctgggaaatagaagaatatcacgcatttaacgctaccatattaagaaaaagagcacttcatagaataattttaactgccctgctcttaccatatatttctaaattgaacttagttctgacaagaatgaaaactcaccctatatctcccaacttttggagcagtggagagcatatagaagggcgcctgaatctgtgaccaaaaaagaataagaagaagacactcatcacccagctatggcatcttcaatgcctgctttaattgtgcaagtgccgcagggtgcatgctactaatggctgaattgaaagattctccatattgggctgcacaggtttgaagattctctctcaccgacgcctcaagcgacaactgataaataggatctgaattttttatctgaaacacggtacgacaagtttattaaattatattcaccagaaacagattttccaataaaaaaaaacagcattgccaggtaaactacctgtcttctccggaattccttatttggaatggtgccttcaccatgaggcctgctggagcccatattatcaccactgccactgaatgaaaaagaagaagttcaataactttacaaacaattcaaaagcatacatgccaaaggtagtagtaaaggaagtaataacctggattcctcttcagtcgtatcttcattgcaacccaggattacacttgtacacacactacacataatacacacataagcatcatcacagaacagatttataacttacatgaacaggcttttactgtcaaactcatacctcaagattagatcaagtttctctaaaattttaggtaatccaagtttcagaaatgttgacagggctaggccatatgtctttcgctgaatggcagatacattatcgacctatgaaccaaacagaaatttgcgcgatgaagaaaaagaaactagagcaatgagtccataaataaaacgcaatcgtcataatacaatgaaggcacctaaagagaccaaatctacacaaagattactttaattttgctcttcaactgaaacaagagcatctctaaataacaaaagtaagttcaactcccaaattaataaccatctttacagctaaatctaggcatattagtttctgaaagaaaaaaaaaagtaaagaaattccaacaacacacacaatcagcatcaatataaagaagaatgtgttgctaaccttatcaagccatatgtcaaccaggccaaaaagaacattttcttcggttgagacacctgaattgtgaagaagcaaggaaagtgatggttctgcagtcaactgacctagataattggtatttgtaaccaatattcttgccaagatggcagcagaagatgctttaacggctgtcttggatggatcatattcatctcctccactcagacatatgacgattaatttctagaaacataaaaaagtccatattgatagaaggccttaaagagtgaaacatattaaaaaaatacttaaaactagtagtacgatagacaatatactatatcggggggaggtcggtctaagactagcaacctctttctcttctcaaaaaatgtagtacgatagacaaaaaaaaacttacttgcaaagtgctgctgatcaagggaggaacttccattgggaagcactgcacatagcaacataagtaacaaagttaacctaaagtaaattgttgcaaatactttaactgagtcttgtcaaccaaataataatttttgtatagtactgtatatatgatatttgtttcaaatacatatacgaaggggggacaatggcaagggatgatcaaaatatataaatatagaaaaagccaccaatcttcagagattccttttttctcctctcaaaatttaaaaatcaaaattcttttctacttattttgatttagaataaagttctttctttaaatacatttacgacgatgagatgctcctattacactcataatctctgaaggatgacaaccaactatgtagcatctaaatgcatctaaatgagaattcttttactgaaattctcttttcttgttttattaataaaaaaagttataacaaaaaacaacgagaagaaacaaagtcatctcaaggcatcccacttgtaatatccattttttttaagggtaattttgtaattttgtaattttcttgaactttagtttttctatttgccattgaggataattagtcatttccgatatttatgagtttagtagagtatgagattatttttagtgacaataaaattacttttatttatttatttatattattgacatgtgtataatgcctagtatattaaataattgtgccattttatttaatattagtaaatattgttattattaatgtgttaatttcataatataatatgctataataatattggtgattattattatgcttgaatatattttaagtgttattgtgttattgagtgtttaggatcttatctcaacaaagaaactctacaagagattcgagggagagaaaaatgatatacttagcaattgagattaaaaaaaaaaaagtaaacgtct

SEQ ID NO: 186918 - DNA, 707 bp, Cannabis indica
ttttttttttttggttctttaatgtattcttcttcttcttcggagagtaatctctctctggttttgagtttctctcactgtaacactaacagtagtaatggtggaactactaatttttcatcttcttgacattgttgctgtaaaaataaaaaacctaatttagaaatatagagagtaaagatcggatttttatttttggaaaatgtcgcattctggcaagtctaattgttccgagttagggcttattgactcactgaacgaacgatttgctgactcttcactcagttgcgaagctaataacaagcctgatttcagagaactcgatctaggttcacctgtttcgccattgaggactcgagttagggtttctagttctactactactaatactactgcgactactactagtagtagttcgagttcatctggatcggtttctggaagaaatggtagtcagaataataataataataataatcaagttggtgggagaagatccgattccggtgagctttctggatcgagcgagagtagtccaactgctgttgaaagtcttcgatctggaaagaatttcaagacgacgagatctgattcgggaagtagtacacctccgttgatttactcaggtagtagttatggtggtgggtcgtcggtgaactctcctcctccgtctttgaatgttcttccaactgggaatatatgtcctt

SEQ ID NO: 186919 - DNA, 4712 bp, Cannabis indica
ttttttatctcactttggtagtgtattcttgtatttatactaataattagaaaaagaaaaaaattattttcctatttcacgttggtttagtagtgtgttgttgtattgatataataataacttttttttttaaaaaaaaagataatacaattacgagtctaaattaaagatgaatgaaataaaataagatatttaatcttaactttcgttaaattactcattttgccctcatttttaattaaattaaattaactagtcataaacataaacctcaaaaagttaaaccctggtggcgacgattctcccgagttcaacgcaactctgtccaaatctgttagggctcgctaatccttagttaccgtcttgatcatggcctcttctgatgcttctgatgctctcgcaggttaccaatctttctctcctacccttctctgaaagtcggttgcttattttctagatattttgtatttacatcgatgtgtatatataattatcaaaatgcagagaggaaaaaagttgaactgttctttaatgccgcttgctcagggaaccttgatttcttgaagagtatgttattgctcctccctttctctctccatttctttttttgtgtttaaatttatttaaaaattgcggttgaatttatatggatttttctgttatgagtagaggtggcggagaagcttgatgatgggaaaggactggcgaaaacgatagctgatattaaggatgccaacaagcgaggtgcacttcactttgcggccagagagggcaagactgaggtctgcaagtacttgttggaggaactcaaactcgatgttgatactagagacgaagatggtattactttttttcatacccaatttgagattttctcattggatgctaatgctattctttgagctaagtatggtcagtatttgggtgacgtttttcaactggtagagatttggatttggtgacaatgttattttgagcaagtctcacatttattttgtttagattgataggcatgctttaatttaagctagtttaggcaatgtaaatatttgaattggcggtttgccctctgtcattgttgggtggttttctgtttctagttatatattgtatctttatattgttttgcacttaacatgagctgactgcggactggcattgatctcttgctgaaatcattgcaattgcaatggttggtactacatgtgcggttattacaagaaactcattgttcaaatttacaggggagactcctcttattcatgctgctaggcaagggcacactgatacagctaaattccttcttgaacatggtgctgatccttctatagccagtaatttaggggctacagctctccatcattctgcaggcataggtgagcctttcttttcttagtttgtactttttattggttagcttatgtctatgaatttatgggtgagaaagctgtcaattaccttccaatgtagtaactagagcaagtctctatctcttctgtaaagctttgtaaagctgaagacattatatcttacgctgctcttagttgtaggtaaaaacctttccgtagttgtaagtattaatattggattttaaaccaaagaaaaccattgctagtgttgaaaaacattaataaatcgactgattgaatcccaaagtttaattttgaatcttttggttatgaagttggtgatcataatagctgttatcataatttgtgaggtattcctggggcagagaagtaaaaattggcaacaatagtagaacatccaacaaattctgatttctatttttcttgtttgcaggagatattgagttgatgaggcatatactttctaaaggtgtggatgtcaattcacaaagtgatgctggcactcctttaatttgggctgctggtcatgctcaacccgaagctgttaaaattttgctagaacacaatgctaatgtaagattttagctttgtaattttgcaatgtaggtttttgtgacagccgtactctgttttgctgtgttttgtcttcatcctcttgttattctctgcagccgaatgctgaaactgatgatgacattactccattattgtcatctgtagcagctggctcacttccatgcctggagttactaattcaggttgttttttttttctttcaatatcttcttataactttcaagtagcatagtgaattaaagtttgtcttttgtcatgcaaatcgttatatttatgccatgattataagtagaaataagatcttagccttttaactttctatgttatatatagtggggttggggggatttttttcacatatataaacttattgcttgggactctttatatgatctcttaattttgccgataaagacccttccctattattgtgtttcctcatcatgcccgggttaacagggaaagcgaatttttgtgccgttaaagtgttgattagttcatatggtttaatatctataagaacacctcttatgtcagcaatttcgttggtgggaactgtttgaacattgaaatgattacatctctttgtgacactcccttttgcattatctattgtccaggcaggtgctaaagtgaatattagtgctggtggagcaactcctttgctgattgctgctgatcatgggaacctagaaatcattaactgtttgataaaagctggagcagatcccaatgtgactgatgaggtagtcaaagcactattactagtaaaatattcaaattctttaattttttttattatttattaaatgttttggatgatttacatatcaattatttgcatcgcatcacaggatggcaccaagccaatactggttgcagcttcaaggagcaaccgggaagctgttgagatattgtttcccttgacatcaaagattgactgtatcccaaaatggacaatagacggcatactggagtacatgcattctgaaactagcagacaggaggtactaagatcttaaatacttgtattgatttatatattttgacataattcatcttggagcagttatactgtcttgtctatatggtatttgtttcaagttttttgactgaactctgatatgagttggaatatatgattttattatttagtataaaggtatactcaccaatctttgttgctaagatcttaaatacttgtatggatttatatattttgacattattcatcttggagcagttatattgtcttgtctatatggtatttgttttaagtttttactaaactctgatatgattggaatatataagtttaatatttagtataaaggtatactcaccaatctttgtcgctgactgtttggatttgctctctctctttgcaggaagaatcaagaagtttgaaggaagctaatatttcgaaggacttaccgaagcaagatcttcctgaggtgcctttttttactcaataattcaatttctggatatttcctttgtgttttttaatgtgtatatgtaatgagatactagatgggtttagtttgctattgctgttggctgaatatgaagtaacttgttcaggtgacacctgaagcaaagaagaaagccgcagaagcgaaatcaagaggagaggaggcttttaaaaggaaggaatttgatactgccgtagatgcttatacccaggtacatgctattttttgctaaattatttcccttgttctatatttttctttcagatgaaggttcatttgtttgatcatacatttacaggcaattgatctagactctactgatggaactttgttctctaaccgaagcctttgctggcttcgtcttggtcaagctgagcaagccttagcagatgcaaagacatgtagagcattaagaccagattggccaaaagcttgctatcgtgaaggcgcagcgttacgcttaatgcaggcatgcttagtatttttagaaagtcaaacatctgagggaaaaaaaaattgcacgatttttttatcgtttctcttactctgctttcattatgtcagaaatttgatgaagcagccaatgccttctacgagggcgtgcagcttaatcctgaaagtcgagagcttgtagacgctttcaggttaacatcttcatgctcttactctatttcttattcttggtatttttggctggtttagtttcaagttaaaatatatgtatatatataattatgttatatgcttggcatgttgttcttgcttcaaaaacttgtttgaaagtattctaacgaattttttctcactgtcatctaaacagggaggccattgaagctgggaggaaattccatggcactgacaagaaaaagccatagtgactcttttaggcattggagtccttgatcctgattttcctgttatgcttttagatgagtgtaaaatgaaaatgttgtttgtaagaaacagttttgggagtaagatgttgtgtgattcttttattattagtaatgcaattgtttggtttagttgtcctaacattcttagcctaattataacacaactatttatctattaaacaaaatttcagctaagtctaaaattggtgttattgtttagatacaacttcacagaaaccatctataataatgtgccctgtggttctaattattgcaatactattaaataaaaggaaaaagaatagttgattgattaattttattttaacccaattctgctgcaaaagaataaaataaaacaaaatcccaattcacttcatgaaatcctattcttt

SEQ ID NO: 186920 - DNA, 4716 bp, Cannabis indica
aaacattaatgagtcatgttatcatcttatatttctcttacatatagatttatatagagttggataaatagggaaaatagagaccgtaatttcgcaagtagcataaatcaacagtctcagtgcttccacgtaagaaacctaaagtgatgagcaatcccaaccataataaaagacatgatttgacacgtgtaatcatcaaaaggaggttgcacacaacacaccataccccaataggtgaaccacttgattagtctctccaaaaaccaaaaactatgcggcagaatgagaagtggatagaatagaaccccatatgtgaggccctgttttcacttcctaaaagataacacttcacactctaaactcatttcactccaatccatatccctatctccttctccttcctcccccaaaatcccaccattgctcaatctctctctcccttgagctaacaagaggaagaagaagaaaaccttgggttagctcaacgttactacaatggcgatttcttcagctgcagcctcagcttccactaagctcatttacccatatgcatcttcatcttcccttcttcttcttcatcttcctcttcttatccttcaagcactgccattttagcctctagacccacatcgaaactgacccatctctcttcttcgttcataaacccatccaccattctccacctcacaccagttacctcaactgccccctctcgccaatcccggtcattcacaatccgagctgctcgtgggaaattcgagaggaagaaaccccatgtcaatatcggcacaataggccacgtcgaccacggcaagaccactctcactgctgctctgactatggctttggcttccaccggaggaggcgccccaaagaagtacgacgaaattgacgcagccccagaggagcgtgctcgtggtatcaccatcaataccgccaccgtcgagtacgagaccgaaaacaggcattacgcccatgttgactgccctggtcacgctgactatgtgaagaacatgattactggtgctgcccagatggacggagctatcctcgtcgtttcaggtgccgatggtccaatgcctcagaccaaggagcacattttgttggctaagcaagtgggtgtgcctaacatggtggttttcttgaataaacaggaccaagttgatgatgaggagcttttgcagcttgtggaattagaggttcgtgagttactttcttcgtatgagtttcctggtgatgatgtgcctattatttctggttctgctttattagctttagaggctttaatggctaatcctagcattaaacgaggagagaaccaatgggttgataaaatttatgagcttatggactctgttgatgattacattccaatcccacaacgccaaactgatctcccatttttacttgccatagaagatgtgttttcaattacaggtcgtggtactgtggccactggccgtattgaaaggggtaccattaaggttaccgatacagtcgaaattgttggtctaagggacaccagaaccactacagttactggggttgaaatgtttcagaaaatccttgatgatgctatggctggtgataatgtgggattgttgcttagaggtattcagaaggctgatatacagagagggatggttttgtctaagcctggtaccattaccccacataccaagtttgaggcaattgtgtatgtgttgaagaaggaagagggtggccggcattcgccctttttcgcaggttacaggcctcagttttacatgaggactactgatgtcactggtaaagtgctcaccattatgaatgataaggatgaagagtctaagatggttatgcccggcgaccgtgtcaagatggttgtcgaactcattgttccagtggcttgtgagcagggaatgaggtttgccattagagaaggagggaaaacagtcggagctggtgttattcaatccataattgagtaaaaaagaggaactttacttttggagcctgttagcaaactttgtcattctcaccattttgagtggtgtcaaaaacttttatgttatcagcttaattcttgtttagttttgggacttaactcaatatcctttccttttattcaatgtcatatattttgtaggcttgtttcccttttctcccttttattgttgtttagtctagctggatgatgtctttggtgataattgatataattcaacaaaagtttggctttaatatcttctttcacctaggctgccaaagccgaatctgttcaactttttaattgtgaaaaagaaattgagatggttttttgaactataactgcaatagatttctcctgttcatgtcataatggctgttatattttgtggaagcagtgtttgcatctggtgatttaccaaagctgtgtttaataacatgataatattaagcttttttaatattatatgttttttaatattatatgtcttaaggtaactgcaacatttcaaaagcactattttcttggaacttggttagagaagtattaaattgaggttttcattacattggacatttcaaaatcttgatcaattgatcatttactaccatgaactttacactttacagtcttttagatcaaccaaagaggtcgttatttaaaattagcacttttgtagtagtgacttgtgaacttggcaaacgttaaaaatggggaagaggtctcatatgcagttcaccacaatttaatagaccaaagcaacaacccatcaaacaagaagaaacacaaagaaaaattatgtctaagatttaagaaagattcacagctaaccttaaaataggtgattttttcattctggtgattataataagtaggccttgatacaggctactgaattgttgtagatatacatacatacaatatttatatggggcaaatacaaattaccccttactacaagtcatattattcgccattcagagattaactcttctaaagtacctagtgtggaatctattggtgactcttctctaaatccctgcaaatccatcattgatactaatctgcggctgatgagtgaagcaaccttctgcactgtgaaatttactgatccaagaagatggttgatgctatcaactgttgcacaaatgctgctcttttcctcttttcttcattatctttttcgcaaaatgatgcctcggtgcttcacaaacaaacagaatcgatcataatttgtaataaagaacacaaacagaatcaatcttcaaagaataagccaatcttatcattactgtggaattttaaaccatattttcacagatgagaaatggaattctatatgtgtgagtgtcaagtactacaagaaaaactaatgagagattcagagctgtaatggagcggtttactaacttggttacaaagtgggaagaaataccatattttcattttaaaacaagatctttcttttcagcctttaacaatggtttccttacacagaacagagattctacattacaaaattttacaatcacattcgcatctaccgacatttccaattaagaggaatcatttcagtccccagaaccctgtgccttgttaaatgtcaaccaaaaagaaattaacaagatgcactttgcatttaagagagagtatataccttttgtcgtcggtaagcacaggtgcatcagagcttaaacattcatcttggtggacaagtttaggctctggaaatgataggctgcaaataaacggtgaaagcaatggatcaggagcagattcatacaagtcttcctttccccgtttacgcagctcctttccaagcattgctgcactaccagtccaaaagccagatttatgaggttttcttctatgctgcagagtggaaatgttttgcccattttagtatacattgactccatcaaatgaaaccaaaatcagcaccagtagaaatagcattagcagtagtctattaccttcaaggagctggcatgttgcaccataaaatgtccagttacatctttcccaagattagctgcacatagaggacaaacctgaaatagcaatattaaatctctcatcaggtccaaaatctggccagagcatgtaaattgattgcaagaaaagccaaatacatctcactcttatgatgtttcacaagacttttacatttagcataaatgacacttatcaatggtgtgaaagtcagaaacttctcaatatatggttcattgaaaaacccagttctctgtttattatgtatttgaactatagaaaaaatgggaggagtaattataggtcaggaatttcactcactgcatttttcaagtcaaagcaatgttcttcctgcaagtggatgcagagtgaagtaacttcaatatccacataacagaaagggcatgggaaacaaggctttacatcttcatcttcatcagtagcatccaaggcaaagctccgatctgttacatatatttcaaaagaacaagtgtttaacatatgattccaacattcaatgacaaaacacaaatgaaaattagtgaccatattactggcttggtctcaaacatgaatgaattattaccaataacccatctaggaaatacagataaaaaagaaattgaattaccctaagggaaagaattaaaaaacataaacctatgagtgagttatgaaacatctcagaaaaatttgcagctttgaagaagcaataacaaacaaaccagaaagggaaaaaaattaaaaaattaaaa

SEQ ID NO: 186921 - DNA, 1613 bp, Cannabis indica
ggaggccttgtttgaggcctagctgacaatcggtggctttcatggggtcttgccagcgatacggactgtgtctctaggctggccaacctatgcctggaattagggttcttggctagccactaacttggtggggtctggctggccactaggaattcaaaccctagcgtcccaaggccaaggctccaagtgggcagaaagtttttcaccctcttctgacctcgattactgtctcgtgtctggaggcatatacaattgtggccttatgcgttgtttctcttggaaactctatataaggctatatagtgagtccattatagtcaattatacaacataagacttagtatatgtcttcgtaaatgtacttaagatggcacatagtcgttgatcaatcttgtacactttattttacctggaaggtacccttgagtatcgttgactttaatatgtctgtagctttgttagattgctcacctccccttagttcttccatccaggaaatgttgggtgtttaataagggaggtgacaactgtataggtctcttgtttaccttctacttatggctagagcgaaatagactctgtgtagggcgcctccgtatgatcccaatgtggccaagatatccacaaggggtcgagttataacggaggaggagaccgctcagccccctattgatccttagctagagatggctcaggagctgagagttatgatgcaaaatctgagttggaggatgttgctcccgtgaggaggaggaggtataggacttgctctgtcctctctgactgtggcttgggccattatgacgctcaacgtaatccactgaataggctcggtgagcattcagaggtaggactaaaccatttcctagagaaatctcctaagctataaatccttgatgtgacaccacctagagtgaattgggtgtcgcctacttcttctctgcccgatgaagcctttagtaagatccttgctagtggcttaataggagatgtccattacgagattcctcgtagaaactattaggcagacaattcccctctgggctggttggtgtggtctgagctccacattaaacatggggcggtgctgcttcatcagtattttttggacattgtgtcctgttttagaatgtgcccaacacagctcatgccgaagagctcaagtaaatctcagcgcctacaccttacgagattgataactactttgatttgaagtccgcgatgaagcagggcaaaactggatatttttattttaactagattggtcactaatggctaggtgacactaactgtacaaccatgttgaaggtttgcaggtacaccaaaaagtactttattgcacatggtcttcgtaggatcaagcaccacgaatttcagtatgtgtcactctttagtcgttccatccctactttgcaaataagggccagggcgaatcacatcctgtctttatcggttgagcagagaaatattatctgtgtggacaatttatagaagtatggcttgtatcctcctgttcctagagctacaagagtgccaactatatatgggacctaccatgtagatgggctagctctgggcttggatgatgatgaagtatctgttgggttttatgc

SEQ ID NO: 186922 - DNA, 3346 bp, Cannabis indica
ttttttaaaaagggatatttattctctaaaaggaatcttttgccatactataaatagcaaccaaaaaggaatcttttgccacactaaaaataataaaaaggtatgtgaaggagttaatatcaccaaacacctcatcacgagctcgagtatcagcaactggctgaggagagtgagatttgtttttgttcctgtgatgccaactagatggagatgtagaaattccatcttttgattttaaagacttgtgatcattaccatctctcctagatcttctctctgttctcatgctctcaatatctatatcttgtcgtctttcccctgtagctctattacttcctctaccatttttcctctcttggcttccctcatttactttctccctttcatgatttttgttttcgccagatggttgaggtgagtaagatctatgtctactcctttggttatgtttcaaaggagaagtagcattaccatgccttgatcttaaaggattactatcgaggtcatctctttctgaccatctctccttcctctctctcccagtttctttttcttgacccctgtccttatgtgcacccctttcacttcctctagcatgatttatttcatgtcctctctcatcacttccagcttgtgctctcctcaaccttttcgttcgtggagaaggggaccgtgatcgagaacgaggaaaaggtgatattgatcttccatgcttaggagacttaacatcacgtcgaggtttctctttaattggagagccacccttatgggagctcctatgccgtgtcggtgatctctccctccgtgatggactcctcctacgaggaggacttctacccctaataggagattcggaatggcgtatattacgtcccataagtaatgaaccttgttgcctgaaaactttaaatgaattgtaaaagtcaatatcaaaatacctttgtttctaaaaaaataattacaactttaagaacattaaaggataaagatgaattagaaagtatttagttcaaaagcttcatataagaatcccaattgagtgttcaaatatgtaccaacatccaagttgaaatcaaatagcaatttaaatacacaaacttacacaaggatacataggtataatgctagaccatttcaacaaacataataggtgcaagaaagtaattatatgattagctcgtaattagaaaactgtattttaataaagtgtgattctgagacctttgggaaaaggtcacaacacaagaatgatgtaggagacctttggaagaaggttatattatgggtagcaacttgggtttacaagacaaggcttttgagggctttacttttcaagatcttcttagagaatggagacttatttttcactaatttatctaacctttaggttgcatttggttggaggtaatgaaatggaaaggaatcaattttcagaattagacttttctaagctctaacatatagttttatattcacgaactgatcaaacccttaaggcctcactcgtattagaatttgaattcaactttatggtttggaaactaaatctgtcgggccatctaaaatctaaacagctaattggttaataatttttaaaatttattttcaaatatcaaatttaaggcaaaccttgaaaacataaattgattgttctctcaaaatccaactcctaaatccaaaaatctattcacattatcttttgtactttattattctctctttagcagcctacaacagaatctatgacctccagttccagtccaccattgtagtccagaccacgttgacactgtagcttatctcttttgttgatctcatctgatcatcattctcatgtacactgtagtccctccatcctcattcagccctttccctgtaaaaaatttggtaatagatctagatatagcctttccatggaggtctatcaatattcaatgttctcttgctttttcacttctcttttaacgtttcagaaagatgtaagtgttcatgtatcatcgttagatgtttataaaacaattgattgtgaaatgcgaatgttatttttctggggtttaactttacatgatatatcatttgctgtaaactttgggctttgaatgtgtttaacctaaattttcaagttgtttagttttaatttttaaacgttttatatatcttggatcatgtgaagtggacctgcatttgtgttattgtgatttagtatttatcaagttctaatatatacagataaatgttatggctagtatatttactctaatttttgtgtacattatttgctcacaattatggaactaattcacatatatattgaatatgtagttcatccacttgctttagggaatagtgggtcgagaaggcacttgttgatctccggtagatatctcattttttctaaatatcttgcttctaattatacgataaaacccatattcaatatggtatatggttcagaatatgttatttattgttctattgcaatgatgcttatggtagagggctaatataaattaatagttttgagtataaaaccatctttgtggtaattgaagttaagcttacatggattggtagctaggcatgtctttgaaaagaggaacaaaataataagaaaagtcaatgtgagataattcttctaatataggttcacttgtatatagaaggaacctctaattagctggtcaattatagcactttttagttttctttttcttttttcatttcttacatgtacttaatattgttacaataagaaagattggtaatagaagccgaaattaggagtgaggtgagaactgctgcaacaagccaaacagaacaatcttgcacgattagcattgccaaagacttttccttttaaacttcttattgtttcagtttttattttttatgaattttattgtcaagtgttgataggctcatgcaacataatgactgctgtaagttcttgagtacggttgtgaaagatacattatggcgttcttcttttatataaatgcatcattggtgagatgtttagttaactttgttttttgttttaagttttaactaaatttatatttatagcctataggtaagttaaattaataaattttatcaaataagtactactcagattcaactctaccaataacatattctatatctgttatatttctagattttataccaatcacatattcatgtgtttaacactcaacaatagtttacgaaccaatcacatattcttaaacatgtttcagatattaaatttaggggcgattatattggcaccccattcattaaaatgtattaaacaaatttatttatcaaaagtagtttacgacaatgtttaaaaaaacgcaaa

SEQ ID NO: 186923 - DNA, 2513 bp, Cannabis indica
aaaaaaaaaccagaaaactgatcatcaaaaacaacctaaaccttatcttattcattccaattacatcttcatttttttcaaagctaccaaaggtttgtgtatatataatatatattgtatatattgattttttctattttgatcgataccctcttcttacccttaggccaaatagattattttttactatatatggagcaagttataaattcagtgttgtagctagctctcacttaggttttcattaaattactctcttaggcctaaactccttgtttccttcaatatacatataaattatttatttcacaaaaataaagattattattgagaaattatatctataaagatgatgtcatatgggatgaaagaagatcatgaagctgagtgttcacaaacaattcaaaacaatatacagggatttcatattcaagaccagtttcttcttcatcaacaccaacagatcatgcatcatcatcatcaaccagatcatccaattaccagtgatcatcatcttcatcataatcatcacatctataataatggaggtggaaggtcagccatgctttttccagaagtctcaccaatgctacagcccacaacctggtcacttcccccggttcacgctttcaacccggctcactttggctcaaacccagtccgggaccacgacccgtttctcgccccgactcaaccgtcatcgtcctacgctagtttcatgaacagaagagccggcggtggtggggctccttctctacagtttacatacgacggtggttctcatcatcatccctcttctgatcaccacctacgaatcttgtctgatacaatcgggtcaggtgttcaacccggttccggtccgtttgggattcaggcagagttgggtaagatgacagcacaagaaatcatggatgctaaggctcttgctgcttcgaagagtcatagcgaggctgagaggagaagaagagagagaatcaataaccatcttgccaagttgcgtagcctcttgcccagcaccaccaaagtaagtttattcacacaacaaacacataaaaatccaatctttaataataaaaaaatctaatcatgtgaattggaaaataatcatatcaaattccaaaaggaaaaaactttacttatatacatattatcacgcgtacaacatggtgtatttatatacacttctcatcttttctttaattatgtaccctttttgttttgttttgttttatagtgaacttttatttttctaatccgagatctttgtggatctttctaagattctattttgttaggatggtctcatcatcatcatcatatatactcttttatttcaaaaacataccattagaaaggaaaggaagagttgcaaatattcttttttcttttcttaaacttgttacataatgtagaaagctttttcatcttttttatttagttttattttttcccttgtttgttttcttctgcgtttattctcttttctgatcagtcgtttggtagttccgaggtggaaaaagagtgaagaaaaaaaaaggggagaataaggaaggcgctaatgtcgctcggctgatatgataaagagaaaccaataagcagttgaaaagcttctcgtggaaatttcttgccggatatttacgacataaaaaaaattctttctcttttaaatataattacttaaaaaataataaatcattagacaaactagcatgattgtcagtcagtagtcattttaatttttaaatagttttacctttttcttaataaataaaaagacaacaaaaactcacaatcaatcaaaactgctcaaagtaccataacggaattcaaactgaaccgtaaaatactgtttcatttttttcattgtcacattttattaatgtaatgttaatatattaataactttagctcatttttgtttattttttcatttagacggacaaagcttcgctgctagcagaagtgatccaacacgttaaggagcttaaacgacagacatctctaatagcagaaacgagtccagtcccaaccgaaactgatgaactaactgtagacgacgcgtcgtctgatgaagatgggcgcttcattatcaaagcatcactttgctgtgaggacaggtcggacctcttaccggatcttatcaagactttgaaagcattgcgtttgagaactctaaaagccgagataactacattaggtggtcgagtaaagaacgtcttgttcattactggcgatgaacattctggtggtgctgaccacgaagatgacgaaaatgataataataataatgatgatgatgataatgatgatgatcaaacaacaactcatcagtactgcattagttcaattcaggaggctcttaaggctgtgattgagaagaaagctactgaagattcttcttctgggagtgttaagaggcaaaggaccactaataatatcaatatatatccttgaaaaaaaagtataaaaaaaaaacaactattacattatatatatatatatatataacaggt

SEQ ID NO: 186924 - DNA, 1958 bp, Cannabis indica
taaaaggtatcattattgcattatctatgatgtttgggctaaatacagtgttgttatactatggtataaaaaaataacctcaggagccgtactcttctggattgaagctatgctatttccaactagtgaacctgagctccgctctactttttccaatgctactactaaaactattacgttgagaaaaaacaaaggtcatattggaaatgggacggagaaagcaacatattaagaaataaagaaaagaaaatctaataactaacttggcaagtccactaatgatggaaatagaggaagaaatgacccaggagatatcaacccaggaaaaactctcataaatgacttctctaaactgcacaatgaaaattataaatgaattttagtgattctagtagattatattttgctgaaataatcgtaaaatcaagtcatctatatcatacatcattgcctgaaagaaattagtctcaaaatgcgtactaaagtagaaattgggtaatgtgcactaaagaacttacttttctccattccaagcaatcagttttagcaataacggaaagaactgcatgaaatattatcatcagaacaaaataagtgaaagtgtggatacctaatagaaatgatctgtcaagaatactgatacatgaaaatgtaataaattgacataatcaccacagaataggcatatcattcatatcatcaggcctaaaagctctctaaagcgacacaagaagcaatataaagaaaactaatcctatcttttttacaatctacaatatcaaagaataacatgttacaagtcactgagacaggagttgaaatttacgagcatataatatctaatatagatgttatatatcagaaggtgtctacctatacacagaaattggttaagaaagaaaataatgtgttcaaataaacaaaaaatgcttttgtggtatatcaggatgcatacctgaggtagtaaggtaggaaaagtactaagaagctttctcttgttcgtattcaaaaagtcaagggctgcttctgcaacaacaggatctgcaaactcactgtaataaaacaattcaaaagaaaccgatgtgtgatgatcatcatatcaaaattttcaaaatgcaattcagatgaaaaagtcccctcaagaaagaaaagtagaggaactttataacggaaaaattcccattccagagacatagtaagaatcacaagtaaagtttcaatatttgtctcaaacagacaacctgtcaaagaaagtaacagaactgaaacacaaaatagacccggtactccaaagaaaaaaccgttttatagaaacgggaaataccattacggcataaccgagttatttatcaatctaacaactttatgaatgtattacaagggtataaagctaaaaagtaccggctcaagcatgttcgcaagaatgtccttaaactgggatcagcatcatgtagaaccacatccccaaaatcaaggtaaaattgaaggatcgccttcaagtcgagagtcaaaaacatataagccttgagaaaaatatagaaggcactcaacgaataacattttgtaagaattctattaattgaccgataattatgttcctttcagcaattagaaaaagaaagaaaaaaatctatattactttgcaaagccattcaaaattgaaaatgaaataagatgccaaatttagctaacacatgtttagactaaacgcttccttaaaattgttagcaaatagcttaattcaaaactctacacataaatatataaaggaagtatctcttcagaacttgaagtgagctattgtaagaccaaatcaaatctcagtgcagctaataaattggtgaaaatttaatccgaaccagtaagagaaggccattggatgttcgagactgtgacagtgaagcaactgagcgttgaaaaagcttgttaatatgaggataaactcttacaacaagatc

SEQ ID NO: 186925 - DNA, 3689 bp, Cannabis indica
ctttccatttctgctatcactttttcactgccgtttgagtttttatggatttgtttatggtgtttgtttacggattttggtattttctatacttaattccgtgacaaaaaaaaatggatggagaagagtgttgaacaggatcacggtgcttcgattacttgctatatgtactgaaaaatttgtgaatagctcagttatatttgtactaagttttgttattggtatcgtttaattttttgctctctaaatctctatgtatcaatttacttaatatattctgaattatccgagaacgcagattgaaatattatggattaacatttttttcttcttcattactatgtttgaactgggattagcaatgctgcttttgggatttctgatttattttcactatggtaactgaagtgttttctggatcgtgcaataggtaacattccggcagctacagcagaagatgtggagcttgctgtcgctgctgcccgaaaagccctttctagaaacaagggcgcagaatggtctaaagcacctggggctgttcgtgccaagtacctacgcgctattgctgccaaggtatttgctatgtgatcttgttgattgcaataaccaataggactgaaattgattatactaaacagcatatgttattctgctaagtgtttggaacattcaaagctgtccaaaattttggatcatgcctataacaattatgaaattgagcactgaaaccaattagttagaagatcagtttgtagactagttttcttaaaagaataagattggcttataaaagaggaatttaaacgcgtattaatgtgttatcaaatgtttccattcctcctacacggattctgatcttttctaagttgcacgtgtaatgtattctttaaacattttcatttaattgcacaccctcctccaatataagaattgattgagatcaggagttttacctggtctagcctacagatcatcacatctttactagaaatgcctagatcaattatataataaaccaaaaatatcttatgtgccttatgctgtgccaagttttttccatgttgaaagatcactatggatgtcctagttttctatagtaattttgtctgaatgcagatcatagagagaaaagaagttctagcaaaatatgaagcacttgattgtggaaagccattggatgaatcagcatgggacatggtactgtggagcttcttaaaacatttattattattagttcttctatactttttttttcctggattcttttatgtctacatatggaataagtaaccttcataagctaaaattgacttttaaggagattaaacacctgaatgttgggagattatgcagaagattatattcacttgtcatgttcttacattgctatttcatgttatccaggatgatgttgcagggtgttttgagtattatgctgaccttgccgaaggtttggatgcaaagcaaaaggcaccactttctattccgatggacacattcaaaagccatgttcttaaggaacctattggagttgttgggttaatcacaccatggtattgctgcttctaggctttatttataaagtgatggttctagaagttggataattttgggatcatcagatttaattagatgattttcattaaagtgattacatagtgatgagataccaattttctttgtttaggaactatcctttattgatggctacatggaaggtagctcctgccttggctgctggatgtgctgcaattctaaagccatctgaattggcatctgtgtatgttcttattaatatttgcttactcttgatttttaattatcatgtttcatgatattgaccgtgcattcaatcctagaacttgtttggagcttgctgatatatgccaagaggtgggtctccccgctggtgtccttagtattttgactgggtatggacctgaagctggagcacctttggcaactcatccccatgttgataaggtttgtcttttgcttggaaactttgttgttatctattttattgacttgaaccatgtctttaatatcttaaaattatgttttataaatctctggttggataaactaacattatgacttattgtactgcatgtacaatgatggatcagattgtttatcatgcttagtaacatttgaaatgttttaacagattgcatttaccggaagcactgccactggaagcaaaattatggcgtctgcagctcagttggtcaaggtatgctaaaacattatgtggttcgatgataggaataagggcctcttgtgaggtttacttattctaggagaagtaaaagaaattagttattaagtagggtggaggctggattagtggtttgttgtttgtccaataggaataaaggaaatttccagcatggactaagggaaggttatatgcatgtttgattaaacaaaatataagtagatattttgtgagatttattttcaaaagacaaaattgtcttttaattttattttcaaaaagactaaataaaagtcattaccctcgttccatatctaattatgtttttccattctttatttagtaaacaaatgaaagggcatgagtgtgtcattccaatcctaatcagtatacattgatcagtaggaagggatataggcatttagattgtaatttggtatagctttgctcttggggagagttctaggcctctcgaatgccttgagtgtgggtataatcttttgacgtgctccataaaattgaggaattcttttaaaaattgttctagactaacattggacctgcaaaattttgcgttgatcatatatttttaacttaaattacaattgttacaatcatcctctgacgtgtgtgatctcttggtagcctgtttcactggagctcggtgggaaaagccctattgtcatctttgatgatgtcgaccttgacaaaggttagtacattatgtagtataatttaaaccctatgctacccattattcttagatggaggaattgcatgttgtaaatatttgtatatagtatctttaacatctatatttgatcaaatttatgtggctatacgtgttaattacatcagaataacttcttactcttgtgctgtgatcatgattacccagctgctgaatggactgcctttggttgcttctggacaaatggtcagatatgcagtgcaacatctcgtcttatagtgcatgtaagtgcattaccaaaatgtatatatgttccttatctcatgtgtttgaataaattattgctgaattagtacatgcttcagaacatggcagtttgtaacaatatatattagcggtttaggactttacattttctttagtcttcttttttgtatctgaatggacgtgtacaactaattgcaggaaagcattgcagctgaatttttggacagacttgtaaaatggatcaaaaacataaagatctcagatcctctggaagaaggttgccggcttggccctgttgttagcggagggcaggtgatatgccacgataagttttttcattattccaaagaggctattttttagtcttaaaagaatgttataatctaaatggctaatgttgttgcctgctaattagtttaaatctgtttctgtttttagttaaatatattgcattaggtgtgtaacaatgatgactcgagtcatgcagtctctaatactaatattatttta

SEQ ID NO: 186926 - DNA, 3505 bp, Cannabis indica
aatgagcttgtgctgaccgggtgacatttccaaagtacttaaattagttgaagaagaaaaggaaaaaaaatatacattttgaaacaaagctagcctctttgtcttagacatttgtatcacaaaatttcccgtccatgcgattttggacagctttgactgcagcaactcttgcagctgtggcagctctatttgcggccatcactgacttgttcacttgttcatccaccttgcgaaggttaatggcattctctgctgtcttccttgcagcctgaggttttcacatgcaaagaaaacgacaagaataagaggtcacaaaacgacacccaattatgctcaaacgacagagtcattttattttatatacctgaactgctctaagaactgcatcagttagtgggggtaacgattgcttaagcgtaccagcatcccattcaccacatctggtatcgccattcctgaaactatacataccaaagccttgttttcgaccttcatgccaagacccttcataacaatggccgttggcaaagtgatagaccccaaatccatgaattttgtccccaaaatattctcctgcatatctatctccatttctgaaacaaaaaaggaaaacaattatgaacttcccattccttctccatacatagattgtaatacaagggaaatgtctcacttggatgatcaaaaagagatacagaactgatatttgagctaaaatggaagattatgaacaattaaacaaaccggtttaaccattaatccataagaaagatagtttacaaaccaaggaaaaaaaaaaggtgtactcgtctttcaactattcaagaatcaaaaacattaggggggcttaaaaatttaaattttgattactttgtagtacataaaaaaaagggcatggtataataggcttttaaaaggaaaaataaattaaaataaatgtgagtacacacactcagattcctacttctagatccaacagtagaaaataacatcgtataatatgaatttaatgctgttctatactcaaatgaggaatcaaattcaaattttggtgaagccaagtgccaagactacaaagctaaagcaacagtgaccccaaaactcaaatgaaaagaagaaaagaattaaagaaatagaaatagaattgggaaagttggaaattgtatgaaagatataaaattgacctgaagtggtaacagccaaggccgtgtttgacaccacacttgaactccccaatgaaacagctaccatcggcacacgtttgaactccaacgccatggctctgcccactacaccactcaccggcgaaagagtcccccgtatagaatctataaactccatacccatgcctgtgaccttgcctatactgacccttgtaccgactccctctggcccagttctcaatcccatacccatcgtacctcccatcgatccaatcgccctcgtatcttcctttaacaaagaaattgtaaaccccactcccattactccttcccttatggaactcaccttcgtaaaaatcgccattactgtaaaactcgaccccttctcgaataatccgcctctcttttggcgccttattggcgttagaatcgccgataaaccactggaccggagtcgtccccgcattgttcttggagaatccgagccgcttcgcattttcctcaaacgagtgcttaataatcgaaaagctatggtgaatcaagctcttgttcttgcttgccaagaaaagcgtcaaggcaacgaaaataagagcaaggagaagattctccgaggtggatatctcttcccgtcggagatagaagaagaaaaagaaaaataaggtcaagaggaatagcgccgccatggcgagaaaatgttgggtgagccggccaggcccagttcgtggggacgaaccagaccggaccggtttcttgggcttctcctcctcctcatccatggcagcgatgacgtcctcctcggcgaccgatgagagactatgaatggacgatcggatcgtcggagatgaacggaggagcgaagattgggttcttgtgagcttagactgactcatctggccgtccattactgataacagtagtaaaatctccttcgtccgattatctcactttgatttctttctctactttttttcccttttagttaagcccttctgtaacgagatattcttatcactagcgtcgtcgctctaagctcctcaggcaacatctcaggcggcgcaagataagcagtgtctcccccgcgcacgttagcacgacttaaactcacaacaagtaaaaattaaaaaaaaaacaaaagaaaaaagctcaaaatgcggggagttttgtaagaggagaaatggacacaagaaagagagactgaaatctgtgagagaaagtggcccgggttcaattactatatttatcgtgaaattagagaaaggcggagattcaatcaacgccgtccgtttagaatgtgagggagggattcaaataagttttccccaccgtctgatagcacaaggagagaatatggccgttagatctagaatccgcaccttttcactttactgttcagagcggcacgtgccatgatcatctgtctaattttctttttagataaataaattggttgtgtatgatggtggtagtaagtggtaacttggtgaggtcttaggtaggatcaagggtcccatcaccgtccgtttgggtcgaacagacggtagtcaaaggtcgttctcaccctaatggggcccaccaccaaatcctatgaaaggcaaacaccaaactatacgccttttaactactaattagcaaattgttctgtacgtccactccactaaaccgtataatgtctcttgtattttttttttttatttttttttgttaatgttttacttttctgtacagttcttttttttttctttttaaatatctattttctattttgggagatcttgaatcaagaaaaagtttcttctaggggtgttcacggattggtttggttcggattttcataatttttgaatcaaaccagtataacggttttttgaatattagaaaccaaacagaccaataaatttctcaaaccgaaccaaaccaaaccattaaaaacagtttggtttggttcgaaactacagtttaagtggaatttataattattcttatttttttttaagtaattatactatttttactaagtttttaattttatttttcaaaatatatattgaacatgataagtaaaaagtcgataacatataaataacgatataaaggcgttctcaaatgtcaaacttaacataaaaattcaaaattcatgcaataaaaaagttgacacacaaaaaatttcaaaattatacatatagtcatacctaaaatatataaaaattaattatttattataaacggtccggtccggtttaaccgttaactatttattccgaatcgcaaccgaaccattacaccgtaaacggtccggattgaccaaaccaccaaaaacggtttctccggttatggtttacagt

SEQ ID NO: 186927 - DNA, 1063 bp, Cannabis indica
agtatagagtataattttctcaaaaaatttgggattaatttcaaaaatacacaaaaataataaaaaagattataaaaatacggaatttttaatatttttataatttttaagattttattaacataaaatatgatttttttttatgtatttctatgttgtaatattattattttattattaattttttgttatttacatattattttttttatgttatttttttgttattttcatgtagttttcttttcttaatgtttttgtattattttataaacatcgtaaaagtataaaaaaaaatctttaaacgtgaaagtgtaaaaattttacaaaaaattaataataatttatgtaaatttcccaaatatttttattgaaatttgagggttatgagctttatagccttaggcgtattactagtctgcctcagcttaaagttggacatggacaacatcatcctttaataaaagggtgacttgggttgttttttaacatatttttcttaacttttgtttcctgaacgcgcgaactactcgttgttgtgttaccccaatgcacggaagggcgtttgtgagtcgacgaaagttaaaaaaaaaataagaaaaacataattacaattattcctattaaagtaggggcataaataatttttctttttcacattacatgagctaaataatccaattgattttttttttaaaaaaaaaaaaaaaataccttatgtaaaatcatttatatatatgaacatgaagtttagacaaccaagtataaacagtctgaaggaaggtcgtgtatttctcaaaattagtgaaggtattgctctcaaaaaagtgctttcttcgttgaatgattttttccttatgtccattaggtcgaaagtgatagcctcgtttcggttcaagctgttagtaataatgttttcaattctacatttggtgttgttgtggaaaactgtcgacaatttttaaattctttttccaatgtttctttagcttttattaaacgatctgccaatcaggctatcacattgttcaagcttcttgtttttatgctgattgtatttttt

SEQ ID NO: 186928 - DNA, 4911 bp, Cannabis indica
gaaaacctattttcatagcttcttttcgttagtgactaccataagcttctttattttaatttcttcactaacctcagcgtaccgaaaacaataaccaatcttctctatatttgttaagtacataataattataatttacaaaaaaaaaaatcaaacaatttacactacaacaacaaagttgagttcaaaaaacttcaaacctaattaaaaatagaaaactatgagataatataacatatattattatgcaaaatatattagaattaaaacttaagtaaaaaggttcaaatagaaaattgtcattaatactcctcaatactaataaattggactttcaaatagtattaatagttcaaaatccaagtgggggagggggaccaatgtattctgtatcttactattggcaatagtattgactaaacacactttaaaatatttttgattaggagaaatgaaaatgaataggaatgaattccttccattttatttcatcacctccaaccaaatatccccaacaaaatttaagccaccataccatgataaacaatcgaattattattattatttatatgacacaaaccaaaacaaaaatcatgttaaaaataattgaaccggtataataaacccgagccaaaatcatgttaaacaacaacaacaacaacaaattggtaacacaaatcatcatagaaaatacgcaaattttgcttacagtaataaaaatgtcggatgaccattcttgcttatgaacaactaacaagaatagcctataacaaaattctcaaacttttattacattgaaaatcataatcaactaattaaaggataatcccataagaaatgaaaagtaaaaccaaaaaaaaaaaagaaggcgagattaagacccaatgattcattcgaaatttaactcttctatagtatttcttacctttcataggcggatatgaatgagaccacgccattgcctcagctaccaaaaggatgatgatgagcagaaaaaaaaaatggttgacaaattcttctggtttagcagtttaccgaatctgagcaggacaacacagcaacccagaagcatcagctccgacaatcgcaagatcacaaacagcacagagctgtccctcctggcttggtacaaaccgagaagtacagtacgggcaagaaacatctttttgtcctcggtagattggtatgtatgtagcgccacaaatcacaaacgggtttctgaagtcatagttcagctctgaagcatcggtcatgttcctctcagcagcctgcaacacttgcctggctgtcctagattgattctcgttaggcgggttggtctccaaaagccgcctggcaaagttagcagcagtagcaaggttcttcgctttgaagcaaatagtcattgcattttgcaaggcgagccttaagtgaggcagttgaaggttgcagtgggtaaaataggcagcaagctcttgctggcggaccggatcgtctctaagttccttcctcttcagctccatttgcagacctagcacatactctttaacgattatgatcaactccttgacttcatcaacttctctccttgattcaacaacaatcagaggaattgtatggagaatgctaatgaaaagacgaagagcctcggtaaaccttccaccagttgtagacttgtatcctagtttgagcttctcttccaattgagagaaattgtagacgagggctggagggcctctcacattcgggctagcagattcattccacccgcgttcaacggccaaaggtatcactggagcagatgaaaatgcacgaagaaaggaatgactgccagtttgaagatcaagaaacatggattttaatggagcaaagtttttgattccaagttgcctgttaagcaaacgcattgcagtgtcaaagtttccagcagcagcatgttcagcagcaagggatgatttctgaacccagatttggctcacggacatgccaggagttggagcaacaaaaactgatgagcgtgcattggtggcctttggtgtgtcagcttcagggggtagctccaaatcttcaaggtcccatcctccctcttcatcattttctccaacagcttctccatcttcagatattgcagtgacatcatttggtaagccatcaacatcaaccatgtcaagctcttcaccccagtcagcatcagcagcttcatcatcttcttcgactacaccagctcccttgccgaaattatccaaatgcccatcaaagatgcctttcattacccttagaagtggccaatcaccaccacacatgacaggagtagggggaatcagaagggtaggtactttcccttctggcaaagatggaacattatctcccaattgctcagctaaacgttcagcaatgtcatggagtccatgaactgaagctgtaatgtaagcaagtggcaggtggccaacattctccaagattttaatacgttcacgaacattacccaaatacaaagcattatggaactgacccatgacatcatttttaacctcggcaattttcagcatcttggatagcttgtctgtgttaccagttacaagatacaagaatgataacctctcaaagttctttgtcttctgataggcatattccacgatacctgcattgccctgacgcagagcctcgactcccaatctgtaccaaagatctttcttatcaagtgcagtagctgaagcaacagctgtttgaatattcccactctccaaagccaaattgaaacgagtcttctcatctttcacaaaatggagagcaacttcagggaaccccttctgctgaagataagcaatcatcgcctgtccgcagagttgtgagttctttatcatggtcataacatgctcatattttttcttcaatagggacagcttgaaaatatactcagttgcatcaataactatggctctgtttttcccatctctatccaggcaaaatatggtatttgcagaaacctttgttatgtatattggaacatcaagggttctgatgattccactatctccattgggcaggcaatacttaatatgattaagagttgtgtaaataaataccccgttgtcatcccaagcaccactctttacacggatcgtttcatgcaaagtacattgatgcacaagcttcttgctagcaattataatagcatgcttgctaagcaatgcaacattttcggcatcattagaccaaacaacatacttgacaaagggagtttgaagatcaccaagaacaagcctctgctggagatcaaatataactactctatcctctgctctacacagcaagttaccagttccagcatagaatatagcatcagcagctattggaaggacactcttctttacaacctcatttttcagattcttaaccagaacttggttgctgcttttgtcaagaacagcgaatctattacgagccacaaaaacagccgatcctccaacacctctctttgcatcttgtacattatcacccctactaatgttgtcttttggtatggaatacaattcgtaagagcccccctctgcatccatgcatataagaacagcgttttcagtagaactgtaactgagagttctagggctttgatttaaactagtggaaccagggcgtctaatcggagcaacttgtgtatccttttgagttgaaaactcgtaataccgcaagaatcgatctttaacatagaaaaggctatcaccactaactgcaaaagccggtcgctccctctctaacttaaagacaatcatgccactgtcatgacctgctgccaacagattcatctcaggatgagcagcaagaatccagaagcgatcatgctctctgcgaaatgtctgaaccccagttcgccttgttacatcccaaacacggatgcttttatcttctgaattggagacaattatgtcttgtttggcatggaacattacacatgaaacattattcatgtgccctctcaatgtgtctacttcccatgcttttgtgtctgaaaaacagcaaaaagaacccacaaaacatcttaattcagtcagtaatcatagaagaatttcaaaggtagacgctagctacctcaccaagtataaaaagcatcatataaaactaattagtataaccactagtaatcattaattcaccaccacatgatcagatagagaacacaatttagagaaatgaccagctaaaaggaaagaaagaaaaaaatgaaaataaattttatttttacttggtcaaatagaccatcatatgaataccattcatccgccacagtttgacttgacgatcatctgctccagaaacaatcagaggaagggtagggtggaatgcagcccaattgacacctcgatcatgaccctccaaaacatacttaacaacaacatcaacacctccaaaaagatctgtattcatctgactcaatcgcagcatgtcatctggaggagatccagatttctttctaagggcaccaatatcccaaacacgaacagtctgatcaagggatgctgacacaacaaggtcttctttaggatggaaggaagcacacatgacatagtgattgtgaccagttaataccgaaatacaagtgcgtgattgccagttccaaatgcgaatagtctgatcatcactggcacttactatccatggattttcatgatggaactgcacagtacgaatataatcaaggtgtccaagaagtgtaaaaagacacctatgcagcttgtagttccaaacttttattttgtagtcatcccctgaaaaagaagcaataacttgttaacatatataatttataaacagcactatctatatgaccaccctatccaatgggaagaagaaaataaaatgagttaagttttcacaatgagcagagcatggattgcatgaggacaaagactagagaagaaacagttatcagat

SEQ ID NO: 186929 - DNA, 5035 bp, Cannabis indica
tatatatatatataaaaactaattaaatgtaataattaaaacaaaattataattaactcattcaaaatagtactttggattaattaatttataatttacctcttcgacagtgtaagcatgatctgttgcacgacacatatcttgaacgtgtggtgggataatctcgtcattatactttcttctcaccagtacaatgtatatatatcatcagccaatgcaatattactaatttaaacatatatatacaattaagtttgaaataataataagaataatgtagtttttcagaagaatgaggctaaacgtacgaggctatgatgattgaagaaactcctagtaactgaagctttttccgattgagaatcttgattgataaaaatttatcaatatatgaaacggtaacgaacagagtttctagggatgtgaggtcgaatccgtttgcaacctccacaagccaatcaaccaaaattgctctcatattaggggtaatattgtcattctgaactctcctcatgtaatcaggtaagggtctcctctttgggtcaaccttattcaattatataaatatatatatataatacattaatatacacatcaaaagtacacaaactaaagaagaaaaaaaaccatatatatatatatacctccatttcgcgaagataagcataaaactcagaaacaaaaggaaggcgttgaggatcaccatcgccggaagacgtcgtttcggggtccaacttattgtctttttctttatgatcagttttttcttcctttccggcgccggaggtggtggtcgacgttgccgtggcagtggtgggtgcctccttgatcttgattttcttgggctcttgagaatcgatcccagacattagacaagttgatgagctggcacaaaacgacgcgtttcttgatcttggtgcggtttgtacttagtctttctcagccaactataacaaataacgaataatagcaaaacatgtatatatacaacacagtttgaagtatatatgtatatatgttaagttatagtaaacagtccacacacacaaaaattgcattaactagcatataataataataataataataaaaattaactgacctgaaaataacatataccaaattaatgcaacgaatttatagtcaattttcgatgtccatcaaatggccatatataaaaacctcaaattcttcatcaaaatataagttaatttaatctaatccatacatagaatgtttttttctataatcaacaaactaatttaaattcattcccgccaaattttgaatttaagttggaaaaaaatacgtacaacatttttcttttaaggagcttaattaattctaggtgggaattgggaaagaacaaatacaatcttcttgaaatgttgaagtcatgcgttgtcttagttttataaaaagaaatttgaaataaaaataaatggggaggaaatgaggggatatttcaagtgagggtggtaagagaaatttaataggttaattttatgtaacatttttaaaaattttgtaaatttttaaaatatattttttcaatttattaagtgattcttctttcatattcctcaaatttcccactaaaaattaataaagataaaagtttcctacaaattaaaaagtcaaacttatgaaaacgacttaacgtgtggtctaaattcttacaaatcgcaggtaagtctcatattgggctggtagagaaccacgtagcatggaatgtcttaatgccacgtgtcatctttctaagtgattaaagaaaaagttccctcctttcactctcttcagtagctacaaaaatggccatttctctgcttcaactcactcccgtctctttcccatattttatcagaaattcacatccaaagctaaactctaggacttcgatactcgtacacttcgtcaaatcgaatccgatgagttccggctctgatcccggcccggtcaggagggctagctctgctaaaattttcaaggttccggacctggaaaccgatcaagtggacctaatcgcggaccagagttttcagaggtactttttgtcttcgtctacaaggaggaggagcggcaatggagtcgccgttgtttggttcaggaatgatcttagagttttagacaatgaggctttgtataaagcatgggtgtcttctgagtcagttttgcctgtctactgtgtcgatcctcggctttttggtgctactcattactttgggttccctaaaactgggggtacgtatgtaaccgttttgtgttttcgaaattgttcttattttctgcaaattgaaacttatagatgagagaattatgaaaaatgaaatggaatattaagtgcttgaatccacagtttccaaatcggtcttttcaaaacattaaaaatgcaatgtcgtgttgtataatgttttggcagctttgagagcacaatttctcatagaatgcttggccgatttgagaaagaatttaaccaagcggggacttaacttgctaataaagcatggaaaaccggaggaaattttacccagtcttgccaaaacttatggagcacatattgttaagtgattttcagacttaaattggttttatagctcagctctgatctgatgttatttttgagataagtttttgatgtgttagaatgtgggtatttctattttatttgatcgagtcaggtatatgcccaaaaagaaacttgtagtgaggagctgattgttgaaaggttggtgagcaaaggtcttgagaaagttgtcttagaatcatcttcagagcgatccaacaaggccaagttacaacttgtttggggtgccactatgtaccacattgatgatcttccattttccaccagtagtttaccagatgtttatacgcaatttcgtaaggcatgccaattatatttcttattacgttttgaaaaattaataatttgcactcctagctttctgaatttccagatcgagcaggtgttgttattatgtctaatcttgtttgtgggaagtaaaatgcaggcagtcgaatcaaaatgctctatccgtggctgcataaaaatgccagcatctcttgggccaccaccacccagcattggtgattggggatgtattccttcaacggagagtcttggattaagctcacaagatgtaattttataggccgagctatttattgcatgaacatttgtctagaattagatttctgtttagaaatgttgaaaagccttggtaactttactgaaaaagaatgaaaatgccaaattgctgaagttttccccactttatgcaggtcagtaaaggaatgaagtttgttgggggtgaaagtgccgcactgagccgagtgtacgagtacttctggaagaaggtatgagaaatatattgcactatatttctgattatacttggttttgttaatagatttttcgtttcttatttgatatggttagaatggtgatgttgctatagaagacattgatactgacaaaaataaatgaatacaacatgataaaataaaatgatacttacctaatgatgtcattggatttggtgctgaagtatttcaaccgcctgacacggccggtgaaatcctcaataggaagggcaatcctcaatagatcctatctcataaactataattgttgatcaatcttcttctttatttgtgttttgttttggcttttggtagcatcattgatgagataaaagaatatttcagtactacaattttcaattcataaataagctttttcagaaccatgttcaggccaaagaggggagtttagaattaaaacataatactgtagaatatattaaaaactttagattctggaaacctgattcaatggaccattagttgtagcaataatgtatcatcttctccatgtatttccaggatttgctcaagaaatacaaagagaccagaaatgggatgttaggacctgattattcaacaaaattttctccatggcttgcttctggaagtgtctcccctcgcttaattcatgaagaagtcaggatttgttcgttttctttatatgtttacagattctgcattatgacttagaatactgaaaatcgaaactgatttttgatgaggtttcagttgatgtccccaggtcaaaagatatgaaaaggagaggctagcaaatgactctacatactggtaatagcttcgctatcccatttaaaatgttggcaatcagtttacaagcttaacttagtttggagattttgaactgtcaatatatttatttcaggcgaaaattgaaatgaaagcccctaaattcgttccttaggaacaatagttgacatggactgattgttggttaattgattttttaatattaacagggttttatttgaactaatatggagggactacttcaggtttctatctgtcaaatacgggaatgccctgttccatttaggtagatatagttctcatttgatttatacaatgtttaatgtgtttaaaagttaaaatactgcttgctaactgtttatacagtaatttagtgcttgttggccataaaatcaactactattgaagtgaaaaaaatttaaatttttcttcgcttcattgtctcttgcttgtgtcacattacttttttctcttaggaggaccaaggaatgtggagaaaagatggagtcaagacatcaaattgtttgaatcctggagagatggcactacagggtagtttttctttaagatctttcctccacagtactgagtatatcgcttaactcagatttctgtaaatgggcatttattttaaattgtgttaccatagatggagtcctactttttatgcaagcagaattttttgttgttttctttggtgagtggaagatgatagataatttccaaacaacatgctatccctaccagttattatttataaaaagtaaaacagatgacgtgttagaatgtaagatgtatggattttattttaaaactaatttttaatgagaggagtaatccatgtattttatgtatgttatttagttttcacacattgtcaatgtgggattctctaacaaga

SEQ ID NO: 186930 - DNA, 5283 bp, Cannabis indica
tttttttctaaaaaaaaatgaaatataaattatattatatactatccttatgatcaatctttgaatacttatgtattttcttcttgtggaatatcagatagaggcaattgttcaaaatggtccagttgacggtagcatatccaacattgaagctcttaatttgcgattggagactcaggtttgcttgctggtggcttctttatttatttattttggtttgctgtgtaaatgctctccttgttgcattaataattaatgtattctatgcaaacagtactgcgaaaaagtttgttgatgccactttgatcatatttgacatttcttcttttacaaaatagagctccttttttaaccccaatgggtggtttagcgttaaggagtgttagaaagttctggtaggcatttgttccaaggtttgaatccccgtagattgaaaaatcttggggccacgagaagttctctcgattgaacttgctagggccaaaaatttaaaagaagaaaacatggaacccctttttttggggtaaagaaggggagccgatagcagcaccgagtttacctgaagaaggaaattcaaatagtggttatgtatcttattttctttgatgtattctccttgatgtctcaggtgacctgaagcttattgcaactcagcagtataagaacgtgtgtatgaaaatactaatcatttagaataacaccatagctatgagttatacttatggctttcataaaataagatagttaaaacatgtaaattgtcaggtgtgatgttttgtctacttttcttgacagctacatatatgactttaaactatctatagggttccatttctgaattttattttattatatgcaatatttgtattggtcaatcttattcattgttatatgcaatttgataatttgtgtttctatattaggctcaaactgggacaggttcactatcacaagatggttattaccctgcactgaaaaatttctcattgagtcaaaaagaaactgctcttcaagaacttctgcgtgaccagtggctgtatcgtaccccagatggtaacattggacttggaatcagatctttccttgatctacgaagttggttccataataatgaggttcctttatgtgaagtttgcaatgaagctggagtgaaggttgtacctatgtttctttccgttggacaagagtttttcttttccattattaattcgtcttttgtttttgtcattatactggacatgcatgacgataaatgcagcaagagcattggttgtctgtgattctctctgtggtttgtatgtgatgttgaatctaactcttggctacttttgacaggcggaactctgccagaatgaagcgtgcagtgttcgaattcatcagtactgtttgaagaaaatgttttcccagcacaaggtatcaatcttgatgcacatttccatcgctaaaagaaaatttctaaaatcataaattgcttaaatttcagggtgcaagagtttgttctggttgtggcacacaatggcagcataaaggacccaaagccgaagctgttgaggaagacgagaagccaactgtagaattgcagagtcagcggagtcagccacctcctgcacccaaaagaaagaggctacaaactgatgatgcagctgaatcgagtgcctctcaacctccaatcccaagttcaaaccgtagaagagttactcgaagttcttcccactcttgataaatatggttacaaatattcctaggtgaagatgagcatgctgtatattttagctcaaatgtgcatatattacctctcttggtggagagttttttgctacgattagagtaacattagagttactaacaatacatctcccttaatttaacattaattagtgaatttggttaacaaatttaatggcactagttcactttccttgtacgtacatacaccacaccacctggtgaaactactgagaactgaggaggaatctgaagagagaatggtgttcatcaactctttttgtttgctagtgataatatgtttttatttttatttcatatattttttatcaaaatgtgtgttccttgtgaattcatttcttacaaatatccatgttcttacatctagatttggttatacccaaaatagaactccataaaactgagttatgttatgaatgggaagcttttcttagaattaattttgctcaaataagtgaaatccacacaaagtcttattattttttttttggcttttcaccaagtcaccactggatttctaaaatggattagcataaaagtttttgctccaagcgaaattgaattatgtgaagtatcacctaaaatataataatcatcttacttgcatgagctaacaacattcatagtgattttctcgtgtttatttcatctttaaatatttggtagtgattatcaagatttataaaccacttctaaaatacacattaaaacaatactaaaactaaattgatactagaaggtgagaattcagaaggccagtaaaagtattgtaaaatgcacgaggttccatctcaaaatcaattgacatgataagtgtagtttatagatcttatacatggtgttatatttttataaattaacaatgtgagactctttaacataatcatagaatataagtattgttttagggtatgtttaaggtgaagtttttagtttatattgttagtttatggattggcactaaaatttagggcctatcatcaaatctaatatctaatgatgtcatttttctttttaaaattattattagtatatttgtgcaaaattgagaccctaaaaactcaaagagcatattagctctagaagatgcaaggaagttttaagtctaaaatcaaaatagagttattttcgtcaactggctcaattaattaatatcgtcaactaggatttgataacatcaacattgagttcgattgccaaagagtggtgcttaagcttagtaattatgttccttttgattcctctttgaggtttgtcctcaaagacatcattcatacatgtaatggtttcaatgatgctgtaataataaggtgttcatcattatttttggtcgtgccattaggggtctcaacttttgccattttggtatgatctttaattaccttaacattccacatttgagagctcccaaacacaagtatacatagttcactaatatttgatcaactatcatatttatattaaattgcttttttatttttattaaattatttgcagcaattatttctagtttgatttcctaacaaaaagagtacgtgtaaattgttgtaagacaatgcatttaccgctggtcataattcttttctggtaagagaataaagtaattagagctctgtattttcacatatatttaatgaaaaggaaaaaagaaaagaaaaaattggtagaggtgtataggataggaggcataacgtacgtaaagacacatggtaataataataataatgttgtttggttatttggctgttttttcagtagttgacaatacatgaatccatttaaagagtagaagccaaataaaataaagctgtttcagatttgtttcgatcttagtcacatgtgtttcctaatttcttttttactttttctttttcttcatacaaattataaataaatatgtcatattaatggtcaattctgtacgttcctttctattaattcctttttaacgatagatccatctatctttctttccagcctaaaccaatacatatagtcatatataatgaattctgctataatatatatacagttgtctttcagcaaaaaggccaatactaatttaaagtcacttttaagtcaaagtaaaaggagttactatgtgatgacatttcttttcatttgtgtaaatatggccttaatattatgatattatgaaaaaggatccaaggagaggagttctgtttctttctaaatctccacctaaacataaatttttccaaatataaaagctaaattttttcagtttatatataattgtaaacgaagaagaaaatatgttaaaatggaatcatgcatattaagagaaaaaaaagtattaattttatgagcaatgctattaatacaagcattagtactcaatttaatttattttattaagaataagaggacaaaaatacaaacatatgcatgcattggtgtctttatttattatttagtaataatatatacaaatatacaattcagaaatggaataagaagacaaatatgttatatgaccaagtgacttgtatcgatcttactactggctagtacaaatctaacaaatggaatgcgaacgttaaagaaattaaaagcctttttagcttcataatataaaaattattttcagtttttaaaaataaaaaataatttttaaaaactaacaagagttgttagactaaatttttaaattttaaaaaattagaaaacaaaaatatcaaaatgttattttccgttttcaaaaaatatttttttgtctaacatattatattttatatttttgctcacatacctggaccttaaacctaaattcggacccggacttggactcggacctggacctcgaactcacttggaccccagacctagaccgggacctgaacctggatgtcggacttggacctggactcaaacccaaacttggactcctagacccagacgcaggacctggacctcagatccaatattggacccagactcggactcggacccgaacctagacccggaccctgaccccaagcccaagcccaaacccgggccccagattcaggccccaaacccagactcggaccccgtacctaaagcatggacccgaacccaaaccttgacccggacccggacccaaacctcggatgccaacccagatttggaccttggatgtcgactcggacccagctccctgaccccgaccctagaaccataaccccgaccccagaccctggacccgaacgcggactcctgacctcgacctggaccccgaacccagaatcggacgtagacccctgaccctaaccctgacccaggcttaaaatcgaatgccggacatggaacttgacctagacgcggaccccacatgcagatccgaactcgaacccgaatatgaacccaaactaggacctcagatgctgacccggacctagacccctgaccctgatcccgaacgcgaacctagacccgaatcccaaacctagacacggacctaaacctagaccctgacccgtacctagatctggaccttagacccagacctggaccatggaccgggaccccggaccc

SEQ ID NO: 186931 - DNA, 1240 bp, Cannabis indica
ctgaaatcttttgaaaaagctttggggtattcaatagaataaaggggtaatagtatatagattgtgtacagataggttctgtttttgcacttgctcttttattttatatgttagagtgttaaaatgcttacatgatcaaattgttattcttgtgaacgttcgtttgaaaattcataacgtgcaatcattttgttttggctcaatagtgctggaagctgatgaactgattgaaacctgagttccgttatgaatttattttaataatttatgtctaaattcaacatgatgagtagcttgttctctggctgtgtttcacctttgtgataaccccatcccatatgtaaaagtaaagtgcaacttttctaatttcccatatattttttctggaagccattacagaaaaccttttgacaagcttttgcatatgtttatcatccttacaatctattatctcattactgattatatgcagatgtgtgacatcgtattctcccaattgtgcttgagagtccctttggcaactgcaatgccattcggagatgacttgcaccatggcagagttcttggttgcatggaagaaaataaaaaatttgatgtaaatgagcttgtgtctcaatcagagaagtcttctgattgttgtatagaagttgacagtagatccatccacagtaacaactatcctcttgattatgagacagcttcaatggcggcactgcttcttcagggacaggctgtcattcccatgcagttagtttcacgcgtacctgctgctttgttctattggcctttaattcaacttgctggtgcagcaacagacaatattgcattgggtgtagctgttggtagcaaaggaagagggaacctgcctggtgctacttcagatattcgatcagctcttctcttgcttctaattggtaaatgcactgcagattctgctgctttcctagaagttggtggcgaagatttttttaggtgactttctatttcactgttcctagtgaatgaatttttatgctctcttttgttcttttgcatatctaaagggtttcttttgtcctaactgcattgcagggaacttttggatgacacagattcaagggttgcatattattcttcagcttttcttttgaaggcaagagtttctttcttttccagttgattaattgttattgaaattaactttatatgattgctaattattcaaggcttgtatattgcagcgcatgatgacagaaaaacc

SEQ ID NO: 186932 - DNA, 3283 bp, Cannabis indica
tcctcctcctcctcctcctccttgactcgcccttccgtcaggtgagatagtgaagcccgagggaaggaggggaatgtaggacgggtcctcgccgctcatggcaatgttgattgccggaagatcaactgggcagtacaccaccattgaccctgatgagtctacgcagctctcttggagtatcagcatattgttctggctggtgttgaaagcctatgatcatgaacccaaaacagatttttatattacttaataaattattattattattattattttattatataaatagccaaaatacaatcttcatacatgttgttgttagttaacttactcgaagaacagaaatacagtttccatggtgggatccatttgcaatgtgagctacttcttgaactgcgttgccatttgagagaacatcccactgcgtaataaaataataataataattaatgtaacagtggcatgagtttattgtttttgctatgtattaattaattaaaaataaacaaaagtaaaaaccaatgtaagaatacctgagcgcgagttctttcgtccttgaaaaaattgaaaacatcttgaggagaaaccggaagccaaatggtggtagctgcactgagaacaaccccattgggttgaccgggatcggtgctcttatggacggtgactcggactccgacttcgttaataccggtaccggaaagtgtcgtccaccgttggccattggaggtactactactaacgctcgcacagaaatggttcaccatcctttgagctaatttcatcagacttcttttgccatcaggagaaggaatcactgaatatcaattatttaaaaaaaaaaaaacaaaaaacaaaaaaggttaataattaaacgacaaagaaacgaatgtcgttttagtttgaataatattcgaattttgagctctttttaattacctccaccaagttcacgagtggaagtgcctgataccattaaacaagcatatctttcacacattctttgaagagttgttagccacctttcagctccaaaagccatgccactgtgaactaggtctctatacagcctgtgagttggtactttgtcttctatttcaatatgttcaacccaagtaacctgacacaaaaacgaaaaataaagttatcttaaaatttagtcttatatcttgtatgatgatgatgatgaagtgaattttgaagaaacttattattattacctttgaatatccattgggcatgtcttgtattaagcatccagaaggaagacgatgacaacgacattgattacaaactggttgtctcgaggaaaatcgtacgaaacatcgacgactgcccaaagtccttgctcaattggtgacagtaacgaaggaagtaaaattctcttgtgggaaccaatggggagagaacctgcaactctgcatacatctgcagtgcaagatttagaattttcataccaaacttaaaagaaagaaagctttaaaaatggtgaagcattattgaaaaagtttaaactcaattaccagctgcaatgtgctactatggcttcctaacccgccagatgatatgacttcaagtgttctcgccattgaaacaatatttggaaatagctcagcccatttgttctgcagcaacctcaaacaagttaataaagaaagaaagaaagataggaaactgtttttaagataattaatattatgagagaaaattggaagaaatgattattatataccgggtccatgaacatgtcaactaatgccaaaccattcataatcacaacgccagtatcttttgaggcttcaattcttagattaggattcttcatgtgagtattggctctggggaaatttctgtcgtagttatcgagattaaggacgtctctgccatctcctgaggatggcctcatccaaaaaggctcgtttggctggagaagcctgagaagctcttccatagcgtttgttgcaatgtcagacatgagagacttgtccatgtctgaaattccaggtggttgataaggcatagtgggcatggtggaagagcttccggggagaagatcaaggtcgagagaagtgcaaccaccaccaccaccaccaccacaaccaagtccaatccccatcccttgaggaaaactcgccatggataaatccaaagaagagatgtgaattggctgaactggtggaagttgagatattggtcttcctatgtacttagcagcaatgctagaaactctgtcaagctggagagatgaaaattatgaaaataccaagtgttgttaaacttaatgactgaaaaaaaaaacaaataaaagagataatattgaatggaaatgaacctcttctttcaattgggcattttccattcgaagtttttgatcatcaaaatatggatcctcaattgggggtggacccccacaagatgggcagataacattcttaagtgcttctctgatggcaatgttctcacatcggatcttgtcattctctgctcggagagcacagttgtcagctctctcatgttgagcctgaagtgtcgttttagagttttttatgttttttagaccataacataatataataatatacgaaaaacgacgagagaacaacagtggatttcttttttattattagtattattattttaccttcatctgggttctcctgttttgaaaccaaaatttgatctgtcttggagccaaacccaattctctgctcaactgtagcctttgcttttcatctgggtgggggcactccttgaacattcttcattcccaaacgaaaaaataaaaagaaataaagcaattaaaaaaaaaaatactaaggctaaaaaaccattattttttaaataatatagtgaaaatttagaccgagataataaaatgaaaaggatggttacgattcaagcttttgaatctggtgagcagtgtgacgatggtatcgctttttcctcctttgagcgttggaagcatcgttgtctcctccgccagaaccgccgccgcctccactcgcgtattccattttctcgcgaccccttttttgttttttctcagtaaacaaacaccaggactaatacgaatgataatactactactgttattaccgacgacgatgacgatgacgatgacgataaatcaacttctttcatttacacccaaaaccattacacacagaaacggaagaccacgacaataaacaaacaaacaagagacaagattgcacttttgggtttttggaaggggaaagggagatgttttatacataaaatatgctacatacatatatatatgtgt

SEQ ID NO: 186933 - DNA, 3946 bp, Cannabis indica
aaaaaaaaaaaaaaacactatttaccaaaaaattgttattttcattggcaaaggccgtattattcaccactggtacttggcagccacaagtacctcttcgtaagtctcagcagctttatcccagctaaggtcttttgtcatacctcgtctctggagtccttcccaactctgcttgtaatcccggtaagtaaataaacagttccctaatgcatgtatgagcttgtgcgattcagcgctatcaaatgtccaccccagtccagattcttcgtacggattgaactgctcgactgtgtctcttagcccaccaacagcatgaacaacaggaatcgtgccatacttcatggcgtacagttggttcagcccacaaggctcgaatcttgatggcatgagtagaatgtctgcacctgcggttatcctgtgagatgttttaacagaaaaaccgacccatccccttactttgtccctatgttggccttcgaattgcctgagcatctcttccaaatcaggtcggccagttcccaacatgactagttgcacatcctgatccatcatccatggaattgcctcagcaatgatgtcaacacctttttgtggatccaacctaccgatgaagccaatgaggggaacatctggacgaacgggtagacccagctctttttgcaaagctgccttacactgagactttccggtttggagtgtctctagggagtagtttgtgtaaccatctgtggttagatgaacgtcgtattgtggattccactcctttgtatcgattccattcacaatgccccgaagtttccagtcgttctcattgatgattccatgtaaaccccaaccgccttcaatagttttaatctcccacgcatacccatggcttacagtgacaactcggtctgctgtctttaaaccagctgcgaagatattaaagtgctcgccgccaacaggatcatataatttgaaataatcgatgtaatgttgtgggagatccacagtgaggaagtcctctactggccctcggccctggagacaatgaacataaaagttaacatttgttattaggaaaacacgaaaaactatatgcagctttatatttcaagtttacgaacctattcactcaatagcaactgtaaatagtaactacaaattgatttgtgaaagggatttttttgaagatgaggatgaacagacctggtgagctatgttatgaatgacaaggattgaccgtgtatatgtcattaagccgttatcacgatagtacgccttcaaatatactggtaaaagtgctgtatgccaatcatttgcaatgaaagccaagttcccatctccatagacaacaccaccgcatggaacataccaagggacctgaaaatcccagatagaggataaaacgatatcccaacgccaattaaattaaattagcacaaaaatgtataagcatagaaaagtgcaagtgatctggagacagaataaacaggcattcagccaatgtacctcaacagcagctttgcaaaacaacgccatgcgtcttaaaatgtcctgaaacacaaaaccataggcatgtgaggttcgattattcacagactagttgaagttgaaagaacaagaccagatactatctcaccaatcggtttcctccatatatattgttttctaagtgctgaaagataggactgtcaatgaaaacgaaatctacaccatcgatatatgcttggaagtatgtcacttccatatcctggccagctactttatatcttttccgtactcctgtctctttcgcttcagcgtattgaccatagcgaggtgccacaacctttgagagaaacaaaattaggaaaatcagtctatcaaagagtcatagtaaagtaatcatgtatgagacaggttacaggaaaatcagttattttgaaatgtaaaggtcagtttattgaaaggattaggaccataccataaccctgtgtccacgccgagccaaagcctttggtaaagccccagcaacatctccgagaccacctataagaactctttgtacatcaatcttgaattgcagagaaatgcatgagttcatgtttacattattatacggatatgtttgctatataaatatgtaaaataatcattgctgagatcgttttcctagaaagcaaagatgcaagaaattttttaaaaacagctacattcccattaatacctgtttttgaccatggagcacattctgcagataccattatgatattcatgacatttgtcccagccaaaggagggggttttgcgtcttcatctgaggagtcatctttcttatcatggactggttgaggaattgattcttccgaacttacctgcttttcatcttcaaaactcgaggctaaacttggttccttcaaatttacgtgcctttcatctctaacaggggaggctttgaagttacttgcaagaaaggatggaaggggactggactgttgtgactgtttcagagggagggtgctttctttagatgaatcgctgtcagggtttttctcactttcactaaactttctgctagcaacagaaggcggggtttctctcttcttttctttagaagaaaggacataggtgctgaaagggattctgtcgttttggtattcagcaggactgttatcctcataagaagctttttcctccaaactagagtatttcgactgtttgatagaatcaactcgagggggagtgttttgtttaggtaaatctttttcaggtatgttcttaactccactaaactcactactggtagcagaaggcgggttttctagcttctgttctttggtagaatatgaataggtactggaaaggattctgtcgtcatagctttcagcagcattcttatcgtctcctacctcatcagatgcgtcatcatcttcttcttctgaatcaatagtactacttttgatagaagaaatcatttttcttctttctgcaatctgaaaaaaatataattctaatgataaatttatcaaagtgatggaaatttcaaatagaaatggataaacctttaatcttttaaccataagtacaactctccttaaaattgccaaggaatagaaaaagaaaacaaattcaagaacaaaaagcttatgacatttatctacaaatacaacagctccaacttaaacaagatcaatattttgtcaatactttgttctagtccacataaagaagcacaacaacaaaggtttttttttccaaacatgttgatgcaatgcagcaagatttgtaacttagctagactgacactcttaaacaggtaacttctattaacttcaaaattttcccatgtaccatttctctgtattcatcttttacaatgacattactctttttgaagggtacagagaaagatttgttcttgtacttgataaatggtaataagaaagctcacaaaaagaaaagattcttgttaattagaaactttaatgttaatttcaaacaagaacaatgaattttagtacctgttgcagcaagtctctttgcatagcaagaaccttcttgctcttctcaatggtggcctgaattgcatcatctgatccctcaagtctttcatcactaccttcagaatccttatccaaagctttcagaggcttattccactgtaactgccttctactactgctgccacctaagattaatccattacaaaatcccactactgaagaagacccacgacttgagccagtgagggattttcttggtagattagagaagaaggggaatctggtgggtgacaacttttgtggttgataatcacaaaagtgtcagtctttgtctctgggacaaaagggaaataccctacagaagaagccataggagatagttctcaaagaactgcgtctacaaaacaaggaaagatcgttcctttgtaagaagattgagaaacccagttgaggaaactgagagacaagaaaacccaattgag

SEQ ID NO: 186934 - DNA, 2090 bp, Cannabis indica
gggttggtgagacttaatcctaacttcattctctaatatttatattctcatttacactcatttaaggactgataacaaccataggatgctgaaagttttaatcttgaaattacggttactaaacactattataggttcactttttgtgaaactagtttccatcaagcacattgttagaaactattttgtgataggcgaaaatatatttttggacaaaagtataaaattttattcaagtttggtaatactaattatcctcttatacatttgagatgtattggttgttgagattgttctcacacttcttctatttcttgctataaatctttgtgttttatttccctgtaacttttaatttggtattgtatttttttcctttactattaaactctatgtaacttttatttaaattagattggctattttatgaacaactctagctgccaccacctaaaatcatgatttttgcacgggtagtgttgttcataatgttctaccaatagttgattctttgctgaaacaaaatattaatgaagtagctatctgttctttatgttcaagtgattgggaaacaattggcctgttaggtcgtaaatatgctaagccagtttgggaacattcagatggaggctgtcttatatgactatttcaaaatcagatcttaaagctattaatttgcaccacatggactatccaaatgatttaataattaataatgagaatttgattttgattggcacaaccactaaggttctgggattttgagtggtaataagagatcattatgggaaaattatggctgctccatccaaaccaatgcaaagttattattatatatcttttttcttttaattaggttattaaatctcatgagatgtaagctaaagccatgtttcatggtcttaattgggcaatacacactcacaagcatctatttaacctatttatcaagttttcaggaccaaactaaatagaacaaaaattatatttgttttcgttccattaaaataaaacaaaaagctttcaatcccatcacattaacatccacaccaccctaacataacataaccaaaccttaaatctaaaattaccatcatttgtggactataacggcatgaaattacaattttaagatcattaacggaattttcttttctcaaatttaaaatactgtatgaacacattatatttaatttgtttacatcaacgaaattatttttaaaaaagtgaaggtatcatgtacggcacaactgatattcaaagagcgagaactctacactatctttattttttcattttaattttcaaaataaaaaaaagccggataagaatcaaagtacaaaaataaaacgacatcaatgcaaaaaaaaaagtgtaatttagagcacactaattgttatgatgcaaatgcataaagtaattcttagtttcttactagttccaaagacattttaactgggaaattaaaaatgaaaatataactgggcataaacgaaagatcattaaatttaaaagtgattttgaaaataaatggaaaagtgagagatgcatcagagtcatggaagttacaaggctgaacatggcttgtatttaaaaatatcaagcttctcataccacaaaatagtcatcgtcatttgcataacttctctccattattactacctataatataatagaaaatccaaaactattaataaattaacaaatatatgggatgaagagatgtaagaatagaatatcatataaatttttaaagcatgatgagtatttagaagagaaaaccagtcgacaatccctgacccaagctagggatttgagagccgactcggtcgagttttggaagtggaacgaagattaggttatcaatcttaacacttaaataagagacataacctggaatggatctcatatgaaacttataacaagcccaacattctaaataagcccaaattgttgttgggcctttagccctgaatatgaatgggagattttacacaatatactatggaaaatttacatggtatactaacttttattatttttttataaaaatactgctaagcggtaatttttacttttttattgtattt

SEQ ID NO: 186935 - DNA, 3208 bp, Cannabis indica
atttttagtaattacagtgtttcaatttatatcgatctgtattaggtataattaatgtacttatataaacaggtaatatattacagttaatgcgtgacaaatgtatatttattttgtgaacaatatatattatatatttatatatttttatatcacgagtttcaacgtatataattagctagatcgaagatttaatctttaactttctatcatattcatatgactcataatttaatatgtcgatgtttttattattacattcacatttaatttttcacagttcattaatacatgtgtgtttgtattttgtagtagccagtatttttttttgttttgaaaaatgctaaaagatactagtagtgtctagtatttattttttacgtgttactattgttattggtgcgattaagtatcgggtcttatatagtttaatgtaatagtttttagagagtaccgctagttaatcacaaagtgacacatctagaaagtactaggcaccagtactgatacctaatagctatactatttttttttatatgttaatttgttggaaaggttattttgtactagttggattactcaacactactagtaagtattgtttggtaggttatataaagattatattatattaaataacaaataatattatatataaataaaaattatattgtattaattattgttattataataaatttaaatataatgtgaatcatattatttaatatataacaaataatctatattagtttgtattataatatatacaaagagtttgggaccaactcctgcctcgactctagatctcgaaccctaactcggactctgacttgcaccctgacccccaaccctgacctgggatccaaaactggaatccgaggctcaaattcggacccagaccgagacccgggacccagctttggacttcggactcgagaccaaaaacctaaacaaggacccagaccctaggtccgaagtccagggccaggtcccaggtcttgggtctgggttggggcgaaggtcaggttggggtctagtttattgtaaaaatattttatacaacttattaatacaagtcgacactaaatagtattgtattaaataatactaatataatacaataaaatccagtataatattatacaatacaatacaatacaacatgatatactagacaagaccttaataaaatattttgtacgaacgatataaaatttcatatttatataattattttattgtttgtggtgattatattatagttaaatttagagtttggattgtgtttttttcgacacaacacaaaatcggcacaaattcaggaggcatgagtattttttttaattattttttatatattaatcagttatttttaaatatatattatgtgttaattttacattgtgaaaatatattaatactagtatatttatgcttcaaaaatattaaattatttatttcatattgaagtttaaaagttctttcaaaaaaaaagttctttcaaaaaaaagaaatatatttggagccatattaatacccaatttgagtatgataaagcatgacatagattcgaatgcttaattcaaactattagttgggctaaactttatcggcacaacactgttcgaatttgttaataaggttaataggttcatcttaaaactaattgataatgtgaggatatattctattattattctatacattagcaatgtgagactctctaatatcccctcaagataactttgggcatagataggctatgctcgtgcgtaaggcccacctagttttcttttataaatttgtatatttttttagtgattttgaaaataccatatttttttattaatataagagctcattatttatttttgacccactaatattcagagcagactaacagcacgactcatatttttatatagatcagatcggatcaggccgccgtatatatgtacaactctagttaattaaaaaatcactctgcacttaaaatcctaacttttttgttttgtagaccgaaaatgatgtgtattaaaaagggatggatagactctattttacattttttactttcttcaattctattattatgagttaattaattaaacagtgatgtatatccattaattaataatctctactttctacaagtaatttgttgtgctgttcttctacactagctagttccaacctatcaaattaatgctaataataataattttcggggttatttttttttttttttttgaaagggtaatgtattttcatcatcttataatttacactatcaaattattattgaaatacatttacaaattaaatgagaaaattctatacttttttttgtatgtatttatcaaagttctttatttatatagtgtgaaaacaagaggttgtttagttgttaaatgtcaacccaataaatacctagttccaaaaattaaagttattgtcattaataatagggaaatataataataataataataataattggagcatttaacaccattacaatatagtgacttattaaattaaattaatttatattatagtaaatattaaattaaaatatttgagatataattactatattataataatattaccttcaccccacaactatatagtaacatttttctctaacaaacaattgaattcaaaattaattttgaaaaattcaaagggtttggttactaaaacttaagatttagaaagtgccaattccattggttacatcatatatatatacacccaccaatataacattaatgcctacatttatgtatatgtgccacgtccacccatgcatgtggtacgtactcaagtcaatataataccttttactatttcatattttctgttttccaattatttagcacttacatattattggtaacaataaaaatgctttccattttttctccacaaactttcatacatattaaattttattcctaaaattttcattgaaattattgaatttaattttttttttattcaaattacatttaattttattaacagatacataacatgacaatgatctatatatacaaaattgtactctcaaaattaatttaggttcaaatcaaactccaattaataaaattaaactaaaaatattaaatccaaacaataaaagagatagaggctaggagtatattgccccattttatttatttattttattaaaaattat

SEQ ID NO: 186936 - DNA, 1733 bp, Cannabis indica
gattgatttttcaattaaaaaaaatattatttgaaatttttgatttttgcgtattgtgaaaatcaatattctatttatagacaaaatattttgattaatagtgcaataatcgcgtacttagaatatgaattagtaacacaattagcattagttaactctattatatgagtatatgtaattattttatatataggccctaaatttaataaatagatattagaattataatatctcgattgcgaagatttcattaaactctagctgtattatatatgatatatgtcaaattaatgttttatgattttttctcgataatgatagaaatgtaacagtttgaccattagagtcacatatgtatagtttaaaatctttcttttagtgggacatgtatatttgatatttaaaatatcaaaatcaggcgaaattgtgttacttgaccattttatccctaaaccttaaagttacttaagcttgaaataaaaggtaaaattagaatttcaccttaagttgggttttgattttagtggaattagtaggcttttatttggctgttctagctgatttgattaaggaataaaattaaattaaataaagaaaatgagttatccatttttagtaaagttagaaatcaattctctcccctaaaaacctctatctttttggccctaattagaaaaatcagcacaaccaggtccttttcttcattaattcttagaggaattcagtaggaattaaaggaaaattagagagcaagacctaaggtaaatcctaaaacacctttctctttggtttttgggagaaaattgttagttggagcatgcaattttgagggttaggttgcttatggtttgatttttgggttaatttagagttttttttgttgcttgttggattggtttttgatggctggttgaggtgttgagtaagatgctgttattgctagaaatgtatttatagggatgttattaggtattctagagagttttgtgaagtttgaggttgatttgagttaagaattgaaattctttagaatttctatagaaaaacggttcattatatttccaaaaatggtgaacagttttcccatgcaggatctcaggaaatggtttaccatttaagaattcggtggaccagttgaggtggttttcaagaatcctaatttttacattttctcgatatttaggttattgctacattatttattaatagataaactttcaatttcatgtttaagttcctgaaaacgtttcagcaagttacttactcattttacataaatgtgacataaggcctccgttcaacgagcgatattttcattcaggttgaccgacacacttgaatctagaaatgagataagattagtataagatatatttatatatgtgtgcatgtgatatacatgttgaattatatgattgtatactaccaatactagtacggttgaagtacgtagtgcattggtacaatatattattaagaggatatgacactgcgttaccaacgttagtacgagacgaggatggagtgtatgtggtatgacaattagttatactcgaggtacaaacaaaccctaccaacaaatgtattagaaagatacttggtgcatgtggtttagagatcgtaccttcgttaagaacgttcttgattcatatgttaagccttgtagataggtgtatgggtgcctagttgcaagttggtattatgcatggtcgaccataatggtgtgcaaggtg

SEQ ID NO: 186937 - DNA, 1119 bp, Cannabis indica
tatgtacacttttacatacgtgacgcgtttatattagtacacctaataacaaaagaaaaaaaatttcttttagctacaaaaaggaaaaaaaaaaacactaaaataaaaaccatagctaactaactagcaactctactcataaatgttcatcataaatctggtaaagtcatttttttcacttttttttgtaaaaggcaagtgattgtaattaatatgtgtaatgtttatactctttatttggtatatataatgttttggctccaaaatgagagagagagagtagctcagcacagcaagagcagaatctttctcactactccattttcgcttctctcatttctttcaatcaataaaaccttaattttctctctctctctctctctctctttccctccttcttcaatggcttccgtcgttgaggatcctatgctctcctaccgaatactagacgaagaatcctcttcttctctatcttccaatccctcagatgctgtcatcttcgtcggcatctctttggtgctcggaattgcctgccgccacctcctgcgtggtaccagagttccttataccgtcggcttgctcgttctcggcattgctcttggatctataggtttctttctcttctcaattctttttttttttaaattcacaaactggtttgactgtgctgaggtttttcttgatgatgatgtattggtttttgtttgtgaaacttgctttgtttggacaatacgtgactttctttctccaaaactttttgtttgtttttagttctgaaatctgtaggtcatatcaactttgtgagattagtttcagatcataatcctattgttattgactcgaatccgcctaaatgggggcctggaccgtttcggtttgacaatctttggctggaacacaaatcttttcctaagttacttgaaggttggtggagaaatgctagtgttgacggctggccaggaacgaaaattatgtgcaagctaaagaaagtgcaaaaaaatataaaggaatggagtaaaggggtttatggaaataacaaagtggccaagaatgctgtagaaaggagaatagtggagctggataaaaaagaggggagtattatgtggaatcaatctctag

SEQ ID NO: 186938 - DNA, 5079 bp, Cannabis indica
ctctctctacccatcctctccattgcttacaagctcaggaaatgagaaatttgattagctgaaacctggggagggacaccatcgagagagagggaaagtgtgaaaactcaagaaacgcttccgattcttggtcacaagtaatgggttacctttatttggggccaaatttgatcgagtagtttcgcttttgatctcactctttttcagtctctcaggtacttctcctcctttgttggttggttaatcaaccctatatttagtcattatatttttttttttttaatttttttaatttttttgggtttttgaccatcatttccttgtctacagagaaattttgatttttgatttttgggttgttttggtttccctttcgtgataatttaagagattttgatgatcggtttcgacccattacttcctttttcctataattttttttttgggtaaagggaaattattcgctgtttggtttatactacaatttcgttactttatatttggttttgatgaattgttggcatcggattatctctacctctaaaatgggtagatttgttgagtaataacgctgccgatttttcttctttcggaacttgctcgtcttgtgtgtgtgtgtgtgtgttcagtttcacaagcttgttccatttcagagttatgctttagtattgtatatgtctgcctaatctttcgttgaagaagtttttgtgttgatatgtgatgctaagtattagatcctttgttgcactcgccattgtatccttcttcccaattttgcaatgatatatataggtaattttggtgccaaatctgaacgctgaaactgtgagagttgcaattgtttgcttcagttttgctatacatattatgcttgattttttctttttctccgttttctgaattatctagaaaagtaatgtggcaaatattttacatggaaggtttcggagacagaaaacgccactcacacatgaccaattgtttttttaggctgctattctttgggtttttgtgtggcattgtgtactgcataatgtgaaataatttttgcttgcactctctatttcaaccatggtgtgtttaaatgtggtatccggctgatggaaataatatgatcaattatactttttgaagaattcttagtctttttagcctcttatatacaattagggtaccatgttctgagtctgaggagtagtttttttaaaataaaaacagtatcgtatatactttggtgtcattatttagaaaattatatcttaactttgaaatttaaaatttgaactttgtacttgttttttgagttttctgttctaagcgggtgtatctctttctttttcttgttgctgttttttgatttcaggtgtgcccaagaagtgttttttgtggtcaccaattctgtaggaggtttcattattgttcattgttctgaacattgttttgggggagcagacctattctgatgcaaggaacagggagaagcattaatctgtttccagaaagtgtggatattgttgggcaggggtcagattcacacagtggtatgaatcagcagacctcttccaatagcatgatacctcctgtagaaagtcggtggtccagttatgcgactcctggtgagttatttgtaaatgctggcaataatgaagtacagaactttgcttctacaagtgagcctactggatctggtctccgaaatcagatcaatgatgatgggattaagatcgaaaatggtaggtcatcttcatatggttctcaactcacagttggttcaatgtctgatgaagttctttttcctgagacttctatcatcagtcttggtagtgatcaggtaagaaatgggcattccttcttgcaaggttctagctctagtcatgtccatcagaacatgaatttaaatggaggatttgttagcaatagtggtaacggtgatcagaggtttgaagctagtttaggctcagatctctacttgtcaagcagactggaaatggagcagacatctagtactactgtgtcatctgatattggtggaacctcatctggaaacgctggtggtattgtgggaaaaagtgagagtagttcaggtactctcggtaactggggtttatcctgtaaaagaaaggctcttgaaggtacttcgggccagtcatgtcctggcgggagttctagctcttttccgcaatctgaaaattctgcatggcaaactggtgtcactcgttatagtccttctagcagtttacgtttatctgcaccgtcatgtacttttcctagtggcagtacttcagatcatagtgactcgaggactgtagtcacttcaggaacaatagcttctgattctttttctccaaattttacagaaataccagatacttctcgaagacatttgggtggtgagtctaatgctagatctcgacgcgagtctttactttttaatttagcctctgcagaaaactccaggcggttgtgtctgcgctctcctcatcaatcacaacatagttctgccccattcagtgcacccttggacttgagatcaactgcagcagcaacaaccaattcaggttcctcacaaaaccattctcgcagtgtgcatgcccctttattagcaggaagtggtacacatccttttctttggaatggggcttctaattcaagagcggcaggcatgccaacttcgttagcacttggagaaagaggcacagaagtacgagaagaatcaagcgtattaaacatgccaagacctaatgtagagcatcctatgtttccttctgcaaatgaaataagaaattcagctcatgatccaacactttcaagtttggcctctggaaacataagcacttctcttggtattccttcttctacaaggattgtctcctcttccagcagtcctccattatctactcctgcgtggatccctcatcacattccaccaacacaaagccgtcaaagaacattggaatttgcaccttggtctctgtttccatccgttgattctcaacctggaggtcgtagtggtctttctatcccatcacctcctggaccgtcctcttcttcacaggacacaataatgtcctctgggcgtaatagccaaaaccgtcaccattcattacttaggtcagcattcatgggggacagacaaggtgaagatgttcttaatatttctaattcactgagggttttatctgctgacattgaagggaggcgtcgactcatatctgaggtttggtttattttccttttttctttatttcatattgttctttcacttttttattcttatttgtatttttaaaaatgttaagaaatgcatgaatcaccgtttcctaatggataaagttccagtcagaagtgaatttgtagttgagccgagtcttcaacaaaacctgaaagttgcataaacttgctgtttttttgtgtagagtgattgatttttgattctatatttgtgtaattacggaaggtaatgttggatttgttacattagcattgtgttcatgattgttggatttgttggttggagcctactcgtggtacaaagctacttgtgttcataatcgaacagggtaagtatatatcaatgggacaatcaaaatgataaagagtttctggaagaagataattttgacaatgattatatacgtatgctgtatgcccaaattttatgtagcagagaaattgacaattctttttggagtgatcagttcgacacgcatgttgctgatatccgcgtaatatttttctttttgttactttgatattgttttggctctaaaggtgattgttatatatgtgtgacctttgtacaaaaggaaaacaaagtgacctttgcaaatggactaataattctcgaactgactaaatatgttattcaccatttagcagattcgtcaagtcttgcatgctatgcgacggggagaaaatttacaagttgaggttagatttttattctattttatttttatgctcgcagtgatttaccttcgtatgacaatagattttactttgctttggaatgctgttgctattcaattttttgcttgatttactgaaataactttgctcggctttggctgtcagttttatatttatgcctcatgtattagtattaccttaaagccttgtgccattgtatgtggtgccaaatatgctctagtagatttagacctgtaatgtttacagtaaagccattcttagtgaaatagtttacaatgtcacttctatttttgtcatcttcttgtagttgagatatgattgttactggatgactgatgactgaatagtttctttatttttgatgatgagtgtatggttaatttttgtacttatttttgatgatgtgccaggattatatgctctttgacccattcgtatatcatggtatggctgaaatgcacgacaggcacagagatatgcgcttggatgttgataacatgtcctatgaggtacataaaagcaaagctgctctagtggcctttactagttggcatgttaacatagcttagctccttaatatttatgtttacatattccccgtaatttggccttttgaagcagcctttgatatttgtttttcccataacatgtccttatggataataggaacttttggctctggaggaacgcataggagatgttagcacaggactgagtgaggagatagttttgaagttaatgaaacagcgcaaatatgaacctattccagtagaagccggaccagatcccgaaccatgctgcatctgccaggtactagtttttcaagtgttccctatcattaggaaatagaaagaagaaaagatgcatacattaccatatctcctcttagaaccatttcatttaagctcaagtttatttataacaggaggaatacgctgatggagacgatgttggagccctcgactgtggacatgatttccatactgactgcgtcaaacaatggcttatgcagaagaacctgtgtcctatctgtaaaacaacaggcttgctaacgtgaaggaagggagaaagccacccaaagctcttaatcatagtattttaagtttctctatagctacatttatcaattggttcccaaaataatctatt

SEQ ID NO: 186939 - DNA, 3153 bp, Cannabis indica
ggactttcacgattgatacatgttgctttctttagtgcctcactattcgcatttagcaacatatggtttctcgcttatatactaagttctagtttgtacattgattcctcgcctaagaccagcgggttataaatatactctgatacttacgtaattaatgagttattccataagaagcaattgcatcgattcatattccctttatcttgacacatgtcctccagccaaattttgagtataacaatactttatgaagttctctctcgtcgccaatttgcatatgttccatcttgaggcgggcaacgagaggatgtgattagctctgtccctgagctgcatgatgggaattggtaagtcaaaggtgggaacccttatgaaataatgtcacacaccctctgcatcgtaaatcatgaaatagttcttggcataaccatcgatcttggacatggcagtaatttttgtgccactcaaccagatgaagcccacctagctgaaatagaagtatctcgaccgggcctggccagggttgggctttaagtcgaagtaccaactgatctcaaatggtgaaggttgtggccagcccatctgtgcgtacaacacgaagacggtggatagatactttatcccctttggtgacaatagcaccgcgcaaatcccatagtagttggcgatatcgtagaaatatgagtggagcgacaagatatccccctaattagcgtggggacctaaccatgtcatccatttctttagaggggcattttccaggtacgcttcacctggaagatcaatattgaggccgctgaccaaacctttaatcacaaggtttttaaacatttcctcaataagtgttgataaggggctcccctcttttaggcaaaggctctggagcctccaactcctcctcagcatggtctattcctagttgagatggtagtccagccacattcagaggctccctagcctcagtgtaactccccatggggttgtctgtgcggatgtcacactccctgacatgcctcctagcaagtcgtgccctttccttgggctcagtaggccccttagtatgctcctcaggcctctcgagctcttcaataggcatctcagcctcctcagcaggccttgcaacttgattgggccgtgtagctcacccccttgccattaggtcagcaaggtaagggtcagtggaaggggttacgctgtatgtttgcttggttcgtgcctgatttggatcctagtcaatgtaccgtgcaagggtaacagcaacttcaacctaagatggttcttcatgaaggacaacctacgtccatctagcagggtgtttggaacacctggccagactatatacgtccatgaggctagaaggaatttcctccaaccctagttcagttcccaaatgaaccactcgtatgtctctcctctaatctttttcagagtggtggtggtgttggatttcaagtttaggagaaccaatactgacttctaagtcagagaagctgcttgaagagcaggtcgaagaatgaccagatgaagattacttgcctggggtacgggctagtcttcaaagagaagctcaagcaagtctgggtctatccggtgttcacctcctcagcagtcgtgcaagttcatctatgcaaaaaggaaagggaagtgaacatttggataacatacaaatattcgggcagcatataacctgttggccaaggtgaaaacacctcaaataggccagctagggttcctgacaggtctaaaatagcctattctaccaaaagaagccattaaatccaagttcttcatgttcttcaagacccatagtccaaaatgaagtaaacagtaccaagattcaacctttcttccctaaaagtcctacatccatctatcttattgtacccatgtaactattgaagttggggtctctctaaaaccacagtgtgcagcttttttgcatccaacaatggcaaaaaaaaagatattcattgcagaaacataaatttctaaaaaaaaaaaagagagaatagatagagggacttaatcactgagggattttgattcaaggtctggatggagacagcgaggatgatggttttcctttgcacaacggtgggaaaatggcaaaaaggcttcgagttttcttggagtttcttctggttttctttctttgagaatttctttcaatgtaataaatgaacgtgaaaggtttaaaagaggagaaatggcctttatataagccaattttatttccctaaaaaaaaacacaattgaatgggaaattaaatcccactaaaagtattatggggaagtggaaagagcaaaaaggggtaatcatgaatgtgtaactgtcagcacgtttcccacaaagcatgtttttaaactgccataatgaagagctaacaattaaaattcagttgaagagacagaagtgtgacagtcacaaccgtcaaggtactaagcacatgaaacccacatgcctgctagcacccgaacaggtatataaagcccccatctgtacagatgctcgtaaggggacttggggggaaatattatcccaaagtttacaaagctaacgtggctcttacacgtggcatagtctagctatctcattgacctggcaaaaacatccaggcaaaaatatgtctggcaggtctacataaggagtaacagctatacgctggccaaaatgtcccctacagcttctggccagatactcaatctatcggccagataaaatgggacaacaccttgcaagggtgattgtacaagccaaattcgtaaagaagacaagtgtcaagggatttgactggatgacccacatgctggccaaatcttgcactgccaggggtaccggacagagatactcgatcctttatttcgtcttcatcaagcttcctcaaatatctacaactaaatcttacaaactcagatccaacaaatctatccaagaataaaagagctttattagatcataattgtatcctagaaaacagggatgtttattatttacttactccttttacagagccatatgtaacaactctctccctataaatagtgaaggcaatgacaaggggaggggaccgaaaaactgagagccatactcatatgtacgcatctgagagtactttgttgagagatatctgtaaacactttgaaagtcgt

SEQ ID NO: 186940 - DNA, 3357 bp, Cannabis indica
tcatttcgaattttgagctgcatttgaaagaaagaaaataaagcatttaattaagtgaaccaaagtttcaagcttagtgcagaatcagtaataatgcatgcatctgtaaagaagttccatctagaaaagatatattcacaaaacaaaatttatattaaaaaaaaaacgacctacattgtcactaacacattaacaaactccctaatccatatctttaaaaaacgaaacttctttctgtggttaaaaaggcataaaagaaacacaaaattgcctattgcaaaattcaaataaaaaatagtttttatttgaagaagattgtttctaggtttcttgaaatactcttaaaatagcaagtagcaatgagaagataatttgtctttgtatataactctgaaagactccaaatccactaacatgtgcatgaacaagatgtggctcaatgtgctgctgaaacattggaaacactgtcatcataatctcattctgggacaaaaaacaccccactctacttttatctctttggactcgagaaataagatgtgagtgaacacccccaacctgttatttaccatatcaggaaagaaagaagaagattaacgtaaaagaaaattggtcttatactcaatttgaaaaagacagattcgaataataaaaaggggaggggggaacggtaaaaagtacaaggataaaaagcctcaaaagagaagtgggaggttatctttaccacagcaatccaaaagtctagtgattctctgatatcaggatgcaaagcataaactccttccaaaatgatctgctcaaagaaaaccaatattttttttcaccaatctagaaaaagcttaaaaaccagcacaataaggtacagctttacttgcttggggcacttagttaatggaatgatcatgaaagatgagatattttagaccagctactcttcagttaaaaaaagtaaaaggccaaattttctgtcttcgtcattttcataaagtaacatgtcatttttaccacacagaaaataaagcataatctgaaaacttccagcgcaaattccacagcaatacaaaacatgtttgacaacagaccactccacaatcttctgaaacttcgagttccttgaagccactccgagcaccagtctccaagtcaaatacaggtacttttgttcttctgccattccttatgtcatcgaaattctgcagtaacacaaatttggagtaaaacatttcaatcaataaaaaagaagttgcgtttgtagaacaggaaaactagacactagcacgaccatgtatggagtttacatacaatataaaacaattgtaaaagagatgcggttggttctcttagcaacttgagcttttgggatgaattggttttctaacatgataacaatcagggaggtaagtccagatcatttctctggccaatattttattttctatgtttcttttagtgctttggtggaaaatgtccgactttactcgtacttttaatcatttatcaataatataacttcctaacctcttgtttgcatttcatactattattggtggcttacattgtaatagtgttaggcctttggataaataaaaaaaggtacattggtaattgtaatgggggtatttagatagtatatgtatgagagtttgagatgtgttttgggtagagaattatttggttaaagagcgcattagctcttgcgagagaactgggtattctcaaatacccaacaaccttgttctctttaccatctttatcaatataccatctattatttccttattacttgctattgttgggtactattattctatctttgctactgttcttacttaattgataggaaattcctattaagtggtatcagagcatgtcgatctatggggcgaggtgtgacggaaatttgattggaatttcagcaagcccccaaccaattggaactgatgaaatcagctctcgaggctatgattgatcccatcgtgaaacggttggatctgatgatcgatcggatacagaaatccaaagaggacgaaacaccaatgacactctagtggcgaccaaggacgaacatcttgatggggctgctaaggttgaaacagtgatgatttcaaatgtgcaactggtctcaagtacaatcccagtcatacaccacaatgaggcactacaagaaacgtcatcggagcatagtcgatgcgcactggagctagagaaggaagagcctgaacgagcacgatgacagcgtcgccgatcgccggctagacaagggaaaccaacaaatttgtatgaatgcgatactattcgcaatagggaggtcgtggtctctatggatgaatgtgggctcattattttcctcatctgcttggggcaaacccaagttttgggcccaaaagtcattactaaaggctcaatggccaagttaagtcacgaattgcaaaagaattgtgatcctggtataacttcatctccttctaatcacacgaatatccagcaaccttattctctttaccatcttcatcaatataccatctattatttccttattacttgctactgttgggcactattactctttctttgctactgttcttacttaattgataggaaattcctatcaaatagtttataagcttttaggaatcgattggtaatccaataagaacctagctgaaaattttattagtcagtcatagactcaatcatataaacattgttgtttcatccaactctctaaactccatgactgtcaccaaaattacagcacataattaatcaagaaattcatacaacacaagatacaaggcacataaaacgtaaataaataaaagataatttactgaagaagacatacagagtgattgaagtcttacttttaaaagcaaggataaatcaagtgaactgaagtcatcatacttgaaatcctttacttgttcagatcgataatagctttctagagaaactacttcacagccaactatatttgccattttgtgagccaaactagtctttcccgacccacttggaccacctataacaacaagaaaagtaaattatcactagcacaaacaatgtcaaactgcgggagaagcaaattccacaaacaagaaaataacataccccaaaatataactttcaatataataactaaacctgtagtatagtcattttataaatgagaaaacaagtaactttattgttttacacttactgacacttgagggtagcttaagcaatcttgggtggatggacgagtctatgtttgtgagcagtaaggagttcaagtatccataaatacataaatatagatagactagattggttgattcggttaggagcgttatcttcattcgaatagaaagaata

SEQ ID NO: 186941 - DNA, 6109 bp, Cannabis indica
gcatcatcacgtaaaaattggatgacgacatgcatgcaagaaaactgtgttactaaaaaatttacagcaaattattgcctattatgattatgcttcttaaggggtgaattgactcacttattcaataaaatatggaatggatctaatcatctccttgtctctgttttttattttattttttaaatcgtttttttactttcgaaagacctaaatatatccatgtgtattttattttatttttttctttatcaatttgtacgtttatattattttctactatcatcaattcattggctcaacatttcatgcaaactcttatgctttttattctcattaattattaaaattatattaatttctttgattttcgacaaatatataagacgatatggaggcaaacttacacctataaacaaaatcaataaactagtaaaatatcaaaagatgaagctactcttcttcaacttaaacctgttttaccacatgtaattgcatgcatgccacataattacgttcaagcattcccatcccaagtggctgcacaaaagaaacaacacattggtttgatattcctcaaatattgatatcgaaaagtaattttttcaaataatttattagtatctatatatgtaccttattattgaagctaatataagttgcataaaaccgtcttaatactttctaagaagatgcagtgcaccttcttcgtaaacttgtaccaaataatctgtatatataaaagtcctgattgcctcttttttttcacagtattactatatattttatgcaactcaacaagctttgcactcaatttgttttagagctgtgtttcgtcaatacttgtttttctctctacaatcaaacagtcgatatatatccatgtctctaagacctggccaaaaattcgtgcaaacagccatgcatgagaatgagcatgaatatggggatgaatctgggtcaccctcaaaatccaacagacgcagatggaggttggctttcttggccatatcattcactagtgcacttcgttttctagccaagaatgttcatgaaaacaaagcaaaccttttgcgctccctatcctatgttgccattgacgtccaaccctcagccgacgatggagctgacgagcctgctgctggtaatgaaaacctttcttttcttgatattgatgcggaagatcttgctgatattgttagggctaagaactttgagagtctcatgactcaatacggaggagtcgaaagattagttgaaactcttgaaactgatgccaaaagcggtattaatggtactgattctgatttgatacgtagaaagaatgtctttggagccaatgaataccgaaggcaacctataaaaaggtttttgtctttcctgtttgatgcatttaaagataccgtaattattatactcttggtatgtgctctgctctctttaggttttggtatcaaacaacatggttggaaagacggatggtttgatggggggagtattattttcgcaatctttctcgtggtcgttgtctctgctgtgtctaactttaatcagtctaaacaatttcaaaaactttccacacagagtagtgacataagtgttgaagtggttagaaatggacgacgccatcccatatccatctttgacattgtagtgggtgatgtcgtttgcttgaaaattggtgatcaaatcccagctgatggactatttttgaaaggtcattctttgaaggtggatgagtcgagtatgaccggagaaagtgaccatgtagagatcaatgcctctggcaataatccctttttgatatccggaacaaaggtggcagatgggtttggaaccatgcttgtaacttctgtgggcatgaacactgtttggggagagatgatgagctcagtaagcagggacttggatgaggagacgcctttgcaagcacgactcgagaacatgacatctttaataggaaaggttggtttgtctgttgctgcacttgttcttttcgtattgatggttcgatatttcacggggcacaccactgacgataaaggattgagggaattcaatagcagcaaaactaagtttgatgatatcatgaatgtcgttctaggcattattgcagcagcagtgaccatcgtggtggtggcaattcctgaaggcctgcctcttgctgtcactcttacacttgcttattcaatgaagaggatgatgaaagacaatgcaatggttcgaaagctctctgcttgtgagacaatggggtcagccacaataatttgtactgacaaaacaggaactctcactttgaatgagatgaaggttacagaggtgtggattggcgaaaaacatttgagtgagaacagcgcatcacagatgtctccaactgttattagcttactgcaggaatccattggtctaaacaccacggggagtgtttataagccaagtcctgaatctaatactgaaatttctggcagcccaactgaaaaagcaatactatcatgggcagttttcagtttgggattggatatggatgaagtgactttacaatgtgatataatccaagtagaggccttcaattcagagaaaaagatgagcggagttttaatcaagagaagacacgaacaagctcttcaagcccactggaagggagctgcggaaattgtcctcaccatgtgctccaattattatgacagagatggagtcattaggccgttgaataatgaagaaagaaaatgtattgaaagaaacatccagaatatggcagccaaaagcttgagatgcattgcctttgcccataaaaacttcaagtgaaaatggacaggttgatgagagaataagaaagtggacttacttacttggtgttgcaggtctgaaggatccatgtcgaccagaagttaaggctgccgtggagacttgcattgctgctggtgtgagcattaaaatgataacaggcgataatgtgcacactgcaagagctatagcaattgattgtgggattttaaagcctggtgaggattcagaaagtgaagctatagttgaaggggtgcaatttaggaattattcaccagaagaacgaagagaaaaagtcgaaagaatttgcgttatggctaggtcatccccatttgacaagcttctaatggtccaatgcttgaagctaaaaggtcacgtggttgcagtcactggagatggaacgaatgatgcaccggctctcaaggaagcagatatcgggctttcaatggggatccaaggtactgaagtggcaaaggaaagctcagatataattatattagatgataattttaattcggtagtgaaggttctaaaatggggcaggtgtgtatacaacaacattcaaaaattcattcagtttcaacttactgtgaatgttgccgctctagtcatcaactttgtagcctctgtgtcttctggtaaagtccctttgactgctgtccagcttttgtgggtgaaccttattatggatacattagcagctttagcattagccactgagaaaccaactaatgaactcatgaagaagctgccagtcggtcgaaaagagactctcataaccagaatcatgtggaggaacatcattgcccatgccttgtttcaggtgactgtcttgctgactcttcaattcaagggaagatccatctttggtgtagatgaaaaggtaaagaatacaatcatattcaacaccttcgttctttgccaagtcttcaacgaatttaatgcaagaaaactagagaagaagaacatatttgaaggtatacataagaacaagctgtttttagcaataataggaattaccattcttcttcaagtattaatggtagagtttctcaagaagtttgctagtactgagaggctgaattgggggcagtggggtgctagcattggcattgcagctttgtcttggccaattggttggcttgttaagtgcattccagtttcttgaaactacatcccgaccacaactagatcctgcatggtgaataatatatacataacaaggagtttattaatgcttaggtttttcttcacccttttttatttatttatttatgattttatccgtattatttctgcttttatcttctaaaccctctggtagtttatgtaagttttggtgtatgaatttatataaataaacgtattaggtttttgtaatggcaatttaaacactagaaattaagcactattatattcaaaagcataatggcctgcgttttaagctaataataataataacacaatgcaattaaatgcaacattttctatctgcccctgttggagagactgaagttttgagaattcaagaaagatcagggcaagatgagagttgtttatcattacattagttgccaagtggaagtatagtgatgtatggagttgaggcatcctaacagatcggtagacttgaacgtacttcatttgattgatacgacattctaacgaaatttatttgattgatatatgtacttacttcaacttagatcaaaaatatttcctcttcacctaaactcgtacttgatttagtagctttttccaaaagacgtgaatgcaaataaaaacatttctgggataagcttcgcggctcttctcatcacaatgcctattgcattggcttgtagtacaaatataacttatactaccaatgttgcagtgcaagagttttcttatatgaattataatgaataaataggatttttttttccaaactatggcacttgtaaaattttgctctgaatttgtatcttctttttttttttttgaagaaaaccctgaactataaaagccattgtaaatgtccactttcagttacattctgtttatttttaaaataattaatttgttgatgtaacactaatgtgatgctaattcagtgcaatcaaaagtcaaggcgaagcagtctaatgacgaattttgatgttcatatatatatttagtatcaataaactaaatttttactaacttaagttaatcacatagaccaccgcattgcaactatattggtgatcatggccaatacataggcaaatgtttttaaaaaatgaacagaatgtatataaaggaggacatttgcaataactttttatagtttaggggaattctttttgtttctataaaaaaaagttcaagatatttgaaaaacactaaaataatgaagcaactacaaacctgtgatttacaggaatatttgaaatgtataactgcaaatgcaaagttaacaattaggataaggacatcagaaatcttgagaaaacatattcaataaacacaaaaaataaaatctcaacttttgtataaagacttcaagatcttctgtcactttgtcacaccatatattgataatagaatagagcacgacaatctatagtcatgaacaaaaacaaaaacacaaatttaatatttggatacatagccacaactagcactcaatatagctatttcttaaaggttcccacctccgaaatcaaaagctcaatccatgtatcatatccaaaccaacgtagatccaaggataaaagtaaatttgaagcaaaagaaaaattgatagatccccaatggtgagataaattgacaaaatgaacaaaaaaaaaaacctctctttttagatgttctaaaatgttctaacttctaacactataaaacttgttatttagaaagtggtagaaacttgttatcgataagaataatcaaacaagtagaccaaagaacttctaatgttataactgtggaaagaaagggcaaattgctaaacattgtcattcaaagaatattgttgaaggcaaggcaacaacctctaacaagaagattgatgctaaagaagagtgggattttgaagcatcatttgcagtagaagaatcttgaatgaagaatgcaagctttgaagaatgggcattggcaactgtcactccagagcatattaattataagagcgactggattattgattcttgatactcaaatcatatgattggagatatggagaagctgcgagatgcgacaaaatacaaaagaaaacgtgtagtagatactgcaaataattcaatgtgccaatcactctaggtgtgaccaaattcaatttcaaaatgtttatcaagtgttgggaatg

SEQ ID NO: 186942 - DNA, 3069 bp, Cannabis indica
gttttttaatttttatttttaactcaacttttaccaaattgtttttgaaaattttggccaaataccacttggctgtttgtttgaatttgggagaatttttcatgttccattttttttttccttagtaaatagtaataatatttaaagtaaatttactttagtttttaaataaaagggtcattagaacatttttgtggtccaagtgctgccatgcctactttccataattataataattttttaaacacttgacttaatgattgggacacaaatgtttttgatatagaaccataccatgtgcatatgccatatgtggtgaaaattatataattttatgaaacactcatatttctcaaaagggagctttatgctttgaagatccaatatttatattttggaattttgtaccatctttaaatcaacattttcaagtgataaataaaataaataaaagaaaaatctcatgagggacactacctaaatggtagtagagattattttagttttgagattttaaatgtgatataaattgttttattttagaatcattaagataagaaattgtttaatttacagaattataatttttcaaagttgtttgttagaaaagtaaatcttaaaactgacttttcaacaaagagcaactggttaccttaattaagaaatgaaaaataagaccattttggcaacttttttggttacttgtgttggagttgctctgagatgataaatattcatacatgcatcactaaaataatgaataaattctaaaattattgaaagtttggtacttaaaaaagagatttcgctagtttctaatttcaccgttagtgttagtgttcttattgtctctcgcgatccataatattataactcaacatgattcttaggaaggatgacaaaaccttataaataattataaggaatgcgtttgtaaagccatattttaattggaatttggagtaactattagatttgttgtgtttatttaatcaaacaactatataatttgagataatcgagatatcttcagttctcataaccagttgaaaatagggtgtgattatattattatgaaatattatttatttatttatttttaagaagaaaagtctcaaccaccaacactaagagcaacataaactttaaaaagttggaggtgagaattcattagagaatagcatctattatcaaatagttctgaatacaacttgggttatgcgtcagcaaaccttgctacaagtagctgatagaacaagttggctaagacatgagtaaccatattacaagatctagaataatgaataaaactaacatgttaaaacctattattaagactaaaaatgtcatttaaaacaagtttcaaagatgaaatgaaaaatactttcctcttgatattgacaacaatactctggcagtccaattcaaaacaaatattatcatacctaaaagaaaggcattaaatcaaggcattgcaaagagctaaagcctttgccagcttgcagacgccttgaccactcgcaacacatcttgaactaccatgccaagaccgctataattgcccattgaatcaatagttgcatccgtattaactttgaggtagccctctaagggaggaacccaactactgatagttagctctaactcaactaaggacttgaagaagaaggaaccgccaacaacctttgcttgctttgaaagttaccaaggtcatctcgggcccaattcacaaccaactcaggcgccatctcaatgttattatgaatatttttgttgtgcttataccaaatttccatagaatcaccatcacaaaatcaattttttcttttggtaaatggtcaatgtatttatgaataaattgaagaaaatcctcacagtggattgatggatccccaaaatcaaaatcatataatttcttgcaaattatatatataaaaaaaagcatccccaaagagcatgatggaaaatttatttttttaacttgcaaataggacaaagaccatttaataaaaggtcatgacgaggtatgttgatttttgaatccagctagcagagacttgtcagccaaaaagtctaaccttcggagaaggtttattaaccaaatattattattttgtaaataattaattgctatacaatgttaattttttttgtgtaattactaacggtgtacttgcaaagccattttataattttattcaagtgcgattcttgataactatttaatttgatttatttatttaattatgtaattatatgatataattagagataattgaggacttctaactacactttgactcttatgaaattgagtgaattactaaattttttctattttaatattaattattaacgatattatttattgtgtaatcaaccaagacaatcaaaatattctttttatgaaatatttgataaaataaactttataaaaaaaatgatgaattcactatcattcacttttattattttattgagaaatgttaaaaagtattattagtgcctagtacccttctcatattgttcttagtgtaattaaatatcaaatctcatataactcaataacataacttttaagtaatatctttaatcgacgccagctatagaaagtaatagacactactcatgcttaagagcatctccaagaatagcattgtaaagaatacttgatgaggtgaaaaacttaggtggaagaataaaaaaaatgctataccattagagataaaagaatactattcttgaaatttgcattgatgctatatttttttttaaataaaaaattaaaagtgaaatatatataataatttaaataaaaaggttatatatattataatgtgtgagatcataatcacagtatttttaaaaggtgttataccattagagtgtttttagaaataaaggtataaaaaatgatatgaaaaaaagataaaataaaatattatattttaaataacataaagatatgtaacacctttaaaaaaatagtactattgaagatgctctaataagctaatagcaatactctactttttttaccccaatcaaatatttaggctttttttttgt

SEQ ID NO: 186943 - DNA, 1885 bp, Cannabis indica
ttccatttcattacctcgccacctaagatatgcaagcactttattgcataaaaaaaacattctgcctcatactgcgcttaaaatttctatatgttaagtttaaaaacatgtagcaagaaaaaataataaattttcagagttattaagaattgcgaacatacttcacaaaataaaaaatatagcatataaactaaacagcctttaattttggacaggaaagaaaggtcaacatctatccgagaaaaaaaaaaccattacactgcaaaggaaaattgtacaccacttattaactatgcaaaccctcaaaaccatcttgatttgagctactcaagtcattcagctatcaaattgagaaagtcaaaatatagtgactcacctgtggaaacaaacctctgcattgggggcatggacagttgaatttcgtactgatactttaactgtcacagagtgtgcaaacttcttcaaatgtttaacccttgacaatccacgaatatgaattctttcacaaaccacagtttttccaggctttccaggagtattttgcaccggtaacccacgagataattgaaggacagaggatggcgcaacaactgcaagaaaattcaaagcaaatcaagagagtcattagttgagaacactttttttgtaagagcaggaatactttttaggttgtgcatctctatataattgttagaaacatgagtatgtttagtcgacttcgggaaacagcaccaaaatccaaaacacgcacatattatgatctccaatgctaatgtggtagggtcagcattgcactttgcagcacaacaatacgttgatataatacaacaagacacggttgatcatggaaatcaataccacatcacctattccagatttcctatcatattttggttgtaacgcatgaattgccaaataacctgttagtaactggtactactttactttgtcatttaagagcctcattttaaaaaatcccactgctcctaatcacaactgaagaataaccctgcaagattagtaaaggctgtggcgaaaatccccatatcccatctaaaactagctaaaacagtctattaaaggatctcataatgtcaaagagacacataaatatataagatctaaaactgtaaactaaattaaatattaaaatacgcatgacatacaaagcatgaaaaatacagtttcatgcaatctcccttcgagttcgaattgaattaattcgagactctaaatcaacacagcaagtaataagaaaccaaaggaaattcgaaacgtagttctacgtgtaccatgtttaaaaatttgattacagaatgaaaagaaaaagatttcccataaatttggtcccatccttccaaacaaaccaaataacaccacgcctctaaattcgaaactatattaaaagcttagttactcggttatacatttacaaagccagaaacaaataattcatacgagaaaagggaagacgccaatggttcatttcgaaatcaaaatgaaaaccctagagctacggaagttgagcaaatacgatgaagatttaactaaagtaatgttaaaaagaaagaaagaaagtacctaaagaacggtcggtggtggttggttcagagaatgatgaagacgaagggaagagcagaagaattaaggcagacattaaaatgagcttcagatgaggaggggaacccattgttggtttctgggttttgggtttcaaattctctaacagtctcaggccgaaagatatatattgaagaaaggcgcgcgtagaaaatacgggacctaactcgggaaacaattataatggttttttttcttttaaaaagaattataatggttttcttaatgaataagtatttttatcttcatttcaaaaaaaaaaaaa

SEQ ID NO: 186944 - DNA, 2130 bp, Cannabis indica
tgatttcaatgttataaaagagtgatgttattggaatttatgagacctaggtatatgttagctaattctaatggaactaagcacataatattatcaccatttttcaggtgaatggaatacaagttcgcttggtacaaattttatgcctcatatcataactgtcaatgctggcgaggtatatattcctagaagacaaataacttttctcatttgtcatatttataaacacttcttaaaggcatttatttttgtgtaagttattcacattaagactgatctcagttgcatcattgaagtctttagagtgaggaaatcttatgctatgttgttattatttgatattacatagccccttttcaatttaatgcccaaaacgtggctgtttcatgtgctttcaattccctaatgttttgctttgcatttctgatattgataatgatttttattttcttctttattattaggatgtcacaatgaaggttatatcattttctcaacaaggacctcgagctatttgcatcctatcagctaatggagtaatttcaaatgttacattgcgccaactggattcatctgggggtactttaacatacgaggtatggtaatgttccttccaatttagaatgccttgtttttgctttgttttgcacaagcttcattcaactttcaacagcgatattgaatgtaatgtgtcaaatgttttcatgtcgtgtaaatgattatatttgtctgtatgacaattgacaaatagataagttgtcataacgccaacacaaagacatggagacactgggatatcttggcatgtctctgtgtagtattttatggaagttggtggttaacacatgcaagtgtgaattgtaagcaactatgtcgtatttaacaataacttttgttctcttctggggaaacaagttacagttatatttggtttctccaaaggcatcacaagagcgttttgttttaatattattagccataacaacaggttttctttaattccttgatcatataattttataaaagtttccaattttatagtaattctgttagtttgaatattatttgctggagaacttgataggaattggctattttgacccaataagtcttcaaaaacaagagtgtgtccatccatgaaattggttatctttgtccgatgttctattttgttgctaagagcctaagcttatcatttctttcttacagggtcgttttgagatactatctctatctggatcattcatgccgactgagagtcaaggaacaaggagcagatcaggtgggatgagcgtatctttagccagcccggatggtcgtgttgttgggggaagtgttgctggactactagtggctgctagtcctgtgcaggtaaatgattccattcttcatgttctttgggatagtacacttacgcagtaagccaagtactagcaagaacgcaattaagatgaaatcttgaccctcaatttatttctctctatttttgacatgtgagcaataatctgaagaagacttaccctggttttatctctgagcatatcaggttgtggttggcagttttctaccaagcacccaacaccaagatcaaaagctgaaaaagcataaggacttcgcctgggagtgtagcaccagcagcaaccatagctgctgcaatgccgtttccaatgccgaaaaagaagatggcatgagtgcgcatggacatcaaaactcgggtgccctgagaccaaatcttggttcttcgtctcctttccagagagaaaactggcctgccatgaattccatgcaggattcgagaaattcggctactgatataaacatctctttgcctggaggttaaacttagacaaatgatctcaagcagccctgaccgacattgattcttgatattgttctgaattgagtctctctgccctcatctctacattgccttaaaaagtacttatggagcaccaccaccacaggttgaagtaaggggtagtagttttccacctctcattagggtttatacacttgatttatctggtaggatatctgatttgtaggctcatttagtagctctttagctgttataatcagaatttatggatgtaaggacaatttatttctttttacgtctgaattatttat

SEQ ID NO: 186945 - DNA, 4435 bp, Cannabis indica
tttcttaggagccaaatatgagacatgtttcctcaccagatccaatatttttaaaattcccatctccgatctccttctttgaattcaaagttagactatgatagttttgtaaattaaaaattcaaaaagaaaaaagaagtttctgttgcgtacaaacttctcaaaaatccaattatttcttgtgataaaaggacaaaacatgtcaattaaattctgtaactcaagttttttttttttttaaaaaaaaaaaaaaactataaatagtgtctagttggggtagctttgagactttcgatgcacagtgaaaaagtttctctgcagccggcattacagttagctttgggaggagcgaatcccggtctttgatcactctgatgtaatgctttgctatgcgtgccatttagtttttttcctttaggcggcgcacgatcgtagccgtcgattaacagtccacatcgcgtggttggttgcatcatcgttgggtggttggtattgacatttttattttcttgggtggcccttgtggggttattagtccttaatagttaatacgaatagcattaatgtttacgaatcgagaccgagttggcgggtcaactctgaaatcgttaggtggtgcatccaatgaaaattagttaaatagtactggtgtttggaaatccgtataagctagtctaagactgtgatagtggtgagaacgaagtgcttttgttctttgtttgttttaatgtctccttcctttttggtcggccttttctgtgcgttgctcattgacagcttctcttttgttgttgtagctagcaccaccgttacttgttgtggccccacttatttaattttaaataaatatagaaaaagaaaaacgtgagagtaatcacaatgatcaaagctttttttggtagtgtttataaaataattagatgggttaaaaacgtgtgaggcaataatggaattttaattattttcaataggttctcatgaggttcacgaagctaatattgagatatgttctaatcatgaagactgcgaagcacgtcttgaccagattaaattgactaaaggtttttcagcaaaggagcaattgaagggccatacggcgagttttttttttttttaattttatatgttgtatgtacatataatataataaataaaaatgttttccgaatttatgtgattgacagattgattattaaatgtgcaggtgaatgttgtgaaaggattaaagctgtacgaacaagtgtttactgattctgaaatctctaaattggttgattttgtcaatgaatacagagctgctggccagagtggagagctgtcaggtgaatttttaatttgtttaagccctgtgacttcgaattcatctgtagctttatttacattcgtttgtcttatttacaaggttgcaactaataatgacaaaatttcattagtttgtaaaaacaaaaatgttagttataataacttatttggaatgattacaggtgagacttatatcttattcaaccagcaaataaaaggaaacaaagagagttgattcaatttggggttccaatttttggacaaatcaaagaggaatctgctggtgatgatcaatcttgtacgactttcttctttaaatgtaatgttggtttatgtaaataatgtgctaaagctcactttatgatttggactttacttttgtggtttttgtaggtaacatagaacctattccagctatacttcaaagtgtcattgatcactttatacagtggaaacttattccagaatacaaaaggccaaatggttgtatcatcagcttcttcgaggaggtattctatcaacttcatgttccattgttccttcactcctctcttattgtttactagcacattgctagctgcaaagtggggagcttcacactattggtttgtgttattattattattcttgaattgttgtttcttatttgttgagttgaatatagaggcaactaaaattacttttctttcattgcagggagaatattcgcagccttttctgaaaccaccccatttggaccaacctttatcaactctgcttcttaatgagtcaactatggcttttggacgcactcttgtgagtgataatgatggaaactacaagggccctcttatgctctcacttaaggaggggtatgtcctcaaattctcttaaaaattatcgttcttgtagtgctcctctcctttagcgttgttttcttttctgtgatcatttgtgtccttttgaacgaaaccactataaaaaaataaataaacaaatatatgaaactgtgcataccctccttttctgcccaagtctacagtttacaacagtacaacatcaaaatattctacattgtcctgatttatttcttatgaatcttacaggtctcttttggtgatgagaggtaacagcagtgacatggcaagacatgtcatgtgtccgtctccaagcacaagggtcagcctcacattcttcagagtccgaccagaatcgaaccaatgcctgtcaccaaccagtccaacctcggctggtgcaatgactgtttggcaaccagcgggaataccaaacccttacgcgatgccaaatgggggagttggctatgagcccatggacctaatgcccaagtggggagtcatgcgtggtccggtagtcatgctggctccagtccgccccatggttatgagtcctaggagagctcctcgcggtggaaatggaactggagttttcttgccatgggcaaatggttcaagaaaaccggcaaaacatcttccaccacgtgcccaaaaagggcgatttcttgcattgccatcccctcctgcattagaagctcgagtggaggagcccacccctgaagcaggcaacaatatttgatggaaaagtcgtatagaaaaaggagttggttggtggcagcaaactggatttaatgcaatacatattcagctgaggcagcagtatgttcacttcttaagagagtctatttaagtgttgtacaaacagtgtccaggtgctgtaacgagtctctttgttaaatttttccttttacttttcaccttgttccctttggtaagaataggttttagtaatggtcattttataccttactttttcttggaagccaatcaatggtatgtcttgagtagttattgagcttgagtttggaaagtgtgaattggctcaaccgtaggacagaattttgtatttgaggtacttcattattaatcttttttcatagacagatcatattattttcataggtatatttcgcccagtgaatgttttattatttcattcatttatcagttgtaatttattgattctctttatatcaagaaaaaaaagtacaaacaatcaaaaagaaatcattatcaagagatggactcatttagcaaaaaaactaaatgtaatctatatgggagttgtaaattgtttttgtgatggagccaaaacaaatttcagagattcaagatacactcaaatcaatggacatttttgtttggcattttatagttttcaaagttatcttttccatgtatatcccattcccaaatttgatatagagatatactgccaaaaaagaagataatgatgtcctaatactagggtttggattattatgggtttagtcttttagatcacttcaattgattcagtacccaaaaaaaatgaaacctgaaaacacctcatatgtaactatatgaattattgttaattgcaaagagataaaatccaataccactagaaaaagaatctttaagaatctgcacatggattacatataaatgtagcaaaattaaatgacattacatgattatgatagagttacttttaaacctcacaaattgatattacatgattaaacatatttgcatttaaaacagcagaaaaaaaaaatagaggaaaagaaaagaaatcctcccagaatcataataatcaaataaggaggaaaatatgaaagcagtacaattattaactaagtaattgaagttttagttttaagctttacttggttcatcatcatcatcatcttcaatatcccagctcaagtcctcatcatcttcttccgcagcactaagccgctttcgcagctctgctctattaggactcccaagatgagtgattttcttatcttcaatagtgctaagatcctcaatctcatcccagccaaggtcttcctcctcaggcattgagggctgagttgaaacaactgtaacatcactatctttgctggattcaccagattcagtcatccctttcgaagccaatttatcatcagctttggatacatccaattttttagtacttacttcagaatcaacatcttcttccaaatgcacactctgtttagactcttccccactactctttccctcattcacattataagttttctcaacattcttattagtttctatggaactttcttccttcgtaa

SEQ ID NO: 186946 - DNA, 1299 bp, Cannabis indica
ccaaaaaaagaaattgccaaattcccaatcaaatattaggattttcacataaagagtcattggtttcgaaaatagaaccatacccaaggaggatgagaaccttcatatgcagcctgatgcttaaaattcttaaactgatcactctttgcagcagcaggaaatgaatccaactggcccttccaacttgtccaaggagggaaattctcattcccgccgtgcttatcaagccgctcattctcttgtgttttcaatttgcaattcatcaagtgaggagcatttgggacatcagattcattcagtccaagtttgaggaggtgatgctcattcttttctaatgaaatgccagtagtaagtaaggaactccaagctgaatagagttgtgccaccctctcatcattgattttttctttacttaaccttgaatcagttattttctctgttgctttcggtacaaaatcgcagtctgttgatgagttcgttcatttatttcaataatgtcaataaattctactcaagtagagtgaatgatcagtcaatttaatgcaaaccagttattttgtatggctgggattgatgattcaaattaatttttccaaggaaatagtgtacaacacattaattgtttctatattggcttttattgaaagtaaatagaaaattaagtattattaagaactgaaatgccaattaaatttagtcttagagaagctaaacaacaaactttttttttccttttgaaaactaagtgattctagctttgactttactttgaatacaccttttaatcattcttgttattgcttttcaattgttcacttcagaattaagacacattttaaagaaacttcatgaaaagtggggaaaaatcaagataaaatataatggccaatttaaaaaacccaaaattcttatcattgcataatcaatccattcttaattttcctttgaatttaagcaaagtcccaattttaaataaaaataaataaatcagaacactaagaaataggaaaatgatcaagaagtgaagaaattatcagaagaaaaataaaagaagaggaaactataatttaactcactgatcatatctgaggttgaagtccccattgaaatggcagaaaatgaaaacccaccaagctcaaaagtaccaagagatgtaagagcagcaagaaacacagttgtgagacatattccacttagaaaacccaccacacaaatttgacatggaaatgaatttcccatctgcaatgccttctgtgacacaactctctcaagagacttctggtttaatgcttccatcat

SEQ ID NO: 186947 - DNA, 2542 bp, Cannabis indica
ttttttttttttttcctttcaaaagatttgatcttttcttacctttccctcttctctaactaaacaaataatagttagaatcacaagaaagaatactcaagctattttgtcacaagaagtaaatgaagagttcactttcttttgttgactaagaaagagtatgggctaaaggctactactaaagcctcctccatggctagctagctccaactattactcaaaacaaggaacaaattttacagaattgtcatcgtacgtcttcataaccatttatttcacctttgcatttagtggtccacttctatatatattgtccttcccatgctgcacaaacaaaatttaagaaaacaaaaaaaatcattttcataatcagaaactgtcttagacaaatgacagtctaaggtttttataaagagaaagtggcagaagcaaatgttatatgattaaaacctccatagttgagagaaaaaattggtaaagaaatatagagtgagagagggaaaccgtacatgcagaaaaagtagggaaagggaagatactttcaaggacttgaattattttaaatatatcttcaaatttaaatcacatgaaaatgaaaatgaaacgtacacttggacgaatagacaaaaaagagaaaagagagagagagaaagagagtaactaaacaagtgggctataaatctacagcataccataccacaccatgcaaagtgacacatatatcataaacgacaataaactgatttggatttggagagataagactcaaaaacaggcaattaatatattcatatataaatgggatattttgaggtttgtatcatcataatttaagtgggtatttcagtaaaaccgaaaagaatataggttttgtatcagaatgggaaatgacaaaagagggagagaaatggccattgggaaactgaccagtttcagcttctcaagaaagaaaaattaaataagggaaagatagacaaacgtgtcatttatctccctctctctcttgttctctttactcagtcactaactaatatccaatgagaggagagagagagagtgagagagttgataatattctcaacctccagagtttgtggaccctacctcactcctttcctttccttatcgttcttttttcttttaccaacttcttccaatatttagtactgatcatcacccacgttatcatattttttgcacaaattatttctttagagtatcatgtattgatagattaaaaaagataaaaggattgagtgccatttataaaatgccagaacattgtataataacaagtgaggatttgggtattcattatctaaaatgtcgtacatttttctccttcactagctaattgcacttactttcctttcttataaagataagtttcttttttttgcttaacataaagatatgcctagtagcggtccaaccaactccaaacatatatataatatatagaaattttaagatatgattttgtcttaagtaaagagattaaattagtttgaaatttaatacttacgtgtacgtgataacatctgtataattaagaaaaagattacaatacttcaattttggtattttaattattattattatcattaaatcaagtctttctttattattacttttcatagataggtgagttttagtgataaaattaacacaagtggtggtgttggtggctacgaattccagatgggatgatcatgaggacagttgactgggatgaaagtgtgttttacttaggtctcccgtgaattcctaggtaagacagttgggagctcactgagtttgtcagatttggatatataattaagttaaaactcaacaaaacaaaagcatcttttccattgccaatccttgagttcagttgagattattgattacatttacgtgagtaccaaacaaaggatatatgtataactatatcaaattatatcatacatcttattatattaagctattcacttgtttctactaatattcatttacaatcggcacaactggggacttttgtttacttatttatttattcattttgtatattgaaagaggggaatacaaacttaggatacttgctattcgccagaaaaaaaatgttaggatgtattaattaaaataaggggattatttcacaaatacacaaaaacaacaaataaattataaaaatacgcttttacggaattttaaatatttttacgattttgttaattttatttacaaaaaatacggtctttttatgttgtactcttgttgttaagtttttgttatttgtatgttattatttgttattgttttgatgttatttagatgctattttaatattactcttatgtaattttcttgttgtttttgtgttgtttctacgaaaaaccataaaaatataaaaaaaaattctttaaacgtaaaaatgtaattttttttacaaaaaatgacatcttatgtaattattcttaaaataaatgggcaagatttttattgggcctataataaataattttggaagaatttacaaaaagtggaaattacatgcagt

SEQ ID NO: 186948 - DNA, 3148 bp, Cannabis indica
aaaaaaaagttatatttttacaatcttataccttaaaaattattaaaaaagtgaaaataacccttaaaattagaaattagcaaaatagagatcacatgtgcaattatgcttaaaatagaggatgattatgcaaatgtcaaccttaaaaaaaaagtcccatttccataattttgactaaaaataggggtattaattttgtcattttgcataggggcatcatcatcatctaactaagtgcacatgttattcttcctgataataatgcccaaatcttttttggctgctgtcctatggtaaaaagcaaaagaaaaagcacctaattacttaattaggtttattactctttaattgtacggttagagcttttcatatattttaaaattaatagtcaagattaccaaaaataatgatcactaattagtgttcaacataagaactacaatctctttgtttttatatgtcaaagtgtcaataggggaattcttagtaggacattatggtagggctaataggttagggactctacttggtaaagtagcatagccaaagaaatatttgagaaagacaagaagaatcccatcctatggtgccacgtggctcacagttggaatgttttgtattgtacaccccttaaagaattcttttagtatacatctctctatctgtttcgatacacgacatattacaccttaattaagagaaattgtaaatttttataaaattataaataattaacaatacaaaaaacaaacataaaaaaaaaattacaacaaaacattggaaatttatgttcaacacgtaaataagttatttgaaaaatttataaataatactaaatgattataacgtacacaaacaaaaaaaattaaactaaaaaattattttaaatactgacataagaaatacacgaacaaaatccctttgagggtattccaaagaacattatatttagcaccaaggacaactaacatcttttaaaaatggtgtcttaaaaactcaatatttaattgcacgaataattacatccacgagaaaggtaccaggatgctttttaacatatcttattccaaaaaaaacccttttaaaggtgtactttgaaagactactataaaattaccctgaaataaaatccacatacaataacaagatgtgtatgattttgttccaaacaatgtatgtatatatatattcatttataaagataaggaaaataaagtattagaaaggaataccaaagacatcaaagtgataccatatgaagaaacacaaaagaagacgtgttaaaatgtgcttacataaaccaggaaaacaataattgaatctttcaattgaatatatatattatatttatatatgtgtgcgtatatttattgaacccagaaaccaaatttaaatgtgttacaaaggcaaggaagatactgtcaaaaaaaaaaatagaataagaacaccaaaaggtacaaatggaaaccaagaaaatttgcaaaaaataaaaataaaaaatataaatccaagacagacaatcaccagtttttgctaataagatttaaataaaggcaaataaataggaatatgatgaactgtacagaaacaaaaccaacctaaaataatttagtcagtatgggttactaatattatgctactatatcatctttgttcccatcaaactcttcttgtggtctctttcgtttgcaccaacataagtactgagggagcggtccgtggtctccgattacccatggatgttctgcaatagcttcaagactcaacctttgtaatgggtctgcacaagaaaatttcgatatatatatatcttatttaaacgatatatatatatcttatttaaaaggaaaaaaaaaaaacaactagccataaccaagaatggaatactaaacaatttcttgaaatcttgctgacctttgcaaagaatcccttctattaaattcttcaattctgggttcatatcatcgggaagtattatagggttattaacaatctgaaaaggagaaaataatgtattaaaagatgttaagaggaaacacagcaaaggatacaagatcagcgagtgtctgaaacataccttctcgtatgtatcttgtagtgtttccccgagaaacgggtattgccccaaaatcatacagtataaggtgatgcctacggcccatgtgtccgctgctctacctctataagtcacacctacataaaaaaaccgacgccatgtaaatccacataccaaaaaaattatcgcttttaacaaaattggggttgtcgctacctcatttaaaatatgattcaacaatatccactaacaatttccagttaaaatcagtttaccccgaaatttctagtccaattgacctgagaattttttctttacttagacaaataaataaattatttacctagacaacattctggtgcagtaaaaacaggagtcccgggagatcgccgtagctcatcattatcatcctgaaaaaaagaatgaaagaggttgatatccaataatcttttgagcgaagaatgtccatagaaacttgatgatcaactggacaattgcatgttataaaaactatgcacaacatctctcgaaagataaatttaatgcattgaaatacttagaaaaaagtggcaaagatcccaacagcccaattacctcaaaaacttggctaacactgaagtctcctatcttcactgtaccatgacgtgtaaccagtaaattatcaggtttaatatcaccatgaactattttctgtttcaaagaaaaacaagcaccacaatatcaataccaagtgatcacttcatatgattgaaagtaaaagagctcacattaaggaagcacatggggcacattattaacactccaaattccgaatgtacaaactgtgtcatttatctctatctgtctatataatagaaaccgaagtatcaagatatccagatattcacatgtgatgtgcttggtcaaaaactagtacaagcagaaaaatgtaaagaaacctaatgaggcataattaggaatgcaaacaaaaatatgaagtggtaagattcacgcaatcatagatataaagcttagtagctgaactttaacattcatacatgatcatgaaggtacattagccctgaaactatgtcccgcaaatacttcctagca

SEQ ID NO: 186949 - DNA, 2463 bp, Cannabis indica
catatacataatacatacaattaattaacacaaaagcatatcatatgatatatatatataagtcagtgtaatttaatccacgtggcgtgactaggtatctcaccatgcaccacaaacatcatataataacccggcggagcaatctcagccgttgaaggacccaacacggaagcattataaccctccaatccaatcctaaccacactcacaactctcaacacgatcatcctttgattcatcccaaaagcgtgagtactaaacgacggagctattatcctaaacgacaacgaatccaatgtcgtttctccaataaccctaaataccacactcatcaattccccatacccaacactctcacgcgccgccacaatcctcggccgcaccgccttgtgctccaacgacaaatacgccggcgaaaatgattcgaggctaagatccgtcggataattcactccggtgaaattatagtacacgtgtggattactgccgccgatcaaaaccctcccgtccggcaacaaaattgccgtcgaatggtaaagtctcggccgcggcgacgactccattaccgaaaatctctccccgtgctcggctgcagggtcgtaaagtattggagtcgtcaccggatcttctccgcattcccaaccggcggtgccgcgttgggcaccgttgattatgatgacgtggccagatggtaaaattaccatatcgcccatgactctagacataggcatgtactcaacttgccagctaggattttcatcactcacttttaatctgccacaactactgagtgcctccacgtaagcacccctcatggcgcgccggtgggacccactcggcgcgcccccacatatcataatttccacaattatttccttttcatctaaaggaagtaaaacagacgagcctgaactaggatagtttctaggctcgctgttcgggataggaggaaactccttgaccacactatttcaattataatcgaatagtatggatttcgtgttagcgaacaagaacaagtttccatcaggtaacaagtggacaaaagggtacatattcttctcatcaaaatctgaagtttccctaagaaaatcaagctcaaaaagagaaccattattattattgttaattcttttaggaaaaaactcataattgaattgtcttctcccaccaattatgataatctcaccattaggtaaaatctgatttgttgcataccatctcctttgggataaataatttgggatctcaatccaatcacagatttgattgagacacggggcaaaaacacggacaacatgatcgccgtcgttgtaaccgccggtttggattagggttccgttggggagaacggctccggaagaacaccacaaatcggtttgcacggtgagaggacgaaaggtgtttgataaaatgtcgtagaggacagagtgagcggtgcagtctacttgtagggcggtgtcggcggggtccacacggcatcggccaccggggagagagatgtttgatcggccgaaatcggtgcggtcgtagatgatgactttgttgttacgtaaaagttgcatgtgcatggctgatatgccaatactctcatgtaaaagatgccatcttccattgctactaaagaatggtaatggtaatggtgttatgttaataatttgggatgaaagtaataataataataatggatttttgaagattagtaggattaaataataataataatgaatagtgaaaattatgctcatgatgttataattatatatttgtttttataggttttttgttggttaattttgggtaagaatattaaaactagtgatggttttggagggctataggtgaaaaaaaaaagattaaagaagaagttggtttagtgtagtgtgatcttaatgaaaatggaagaggtgtgtttgagtagtatttaaataattcttaatatatacaatatatatataaggagggtaaccaatattattgatatggttattattttttattttggaaatgaaagaaagtttatctttacgtggatagaagtttttgcacaaaaatatgcatgtcaaaacaacatatctatagctatatatatatcatgatttattattataagccttacactacaccaaaaaaatagaattagtgacatataaattggtaacatttgtaaaaaaattgtcataataataacatttttagtaacatttggctacaattgtcacttttaagagtataattgacattttaaatattttttcttgcaatcaccaatcaaaattttgtgggaaatcgtacttttggtcttctttactgtaataaatagaaaaagacaagattaaataaaaatatattttgacataacaagtataatggaatatgagcaattataatatgaatttcttatttgtagtaataaatttcaatgttacattacaaaacaaagtgggcatttggtctagtggt

SEQ ID NO: 186950 - DNA, 6374 bp, Cannabis indica
ctctctctctctctctctctctctctctctctctctctctctctctctctctctctctctctctctcctcgatcaatgagtatttcttgtgtatcaagactaaagttgatcgtctgagttctgttggtcatgttgtatctgttaaagaacatgtagctgcaatcttcaagggtcttcctcctgattatgacaagttttgtcatctatgttatttctagaaattttccttacgtggtcactaaaattgaatcattgtttctttctcaagagcatcaaatggataatcactataaagatcttgattatacaaatcttgctacgaattgtgaaaatcgcgataagaatccaagctattctccctttcctagttcacgaccttccccttcaaatacatctagtcgaggtacatggaatccatattctatgaatcctcgcagcaatttctcctctggcatatcttctcctcctcctagatttgttaaaagtactccacctcagtttctacctaacaccacctctacttctggtaacacaaaaagaccagtatgtcaactctgctcaagagttggccacattgcttccctttgctatcaaagatttaatatggaatttccaagagtttgtgtagttaatgttgatagataatctgctaacaaagcagctgttgatactatttcaaatgttgtgtggtaccctgattcaggagcaacatctcactgtactataaatgtgaacaatttcactcacaaggacccttactttggcttagaacaagttcatatggggatggtttaggtattccaattcagaatgttggtaagacttcattcactactccttactcctcaaatcatttatatcttaatcaaattattcatgtttccatgatcaccaaaatttaatgtttatctcttaattttcctctaataataatgtctattttgagttcttccctaaccattactttgtcaaagattagacttccaaggaagtaatcttgcagggtcagcttagccaaggactttatgtcattcatccatctcaaatgcattaagctcatcactcctctccaatctcctcatccatgtcttcttctacattatgctttcttaataatattacagattttgttgttaatgtaccaaattcttcaaaattttcttagtggcatagcatgttgggtcatccatctgcaaaaattgtaaaaggcatcatgctagcttgtgaaatttttgatgttaatataagtgttcatgatttctgcgaaacatgttgcaaaggtaaaattacaagtctcctttttctaactctaaaattgtttacacttttccactgcaactcattcatacagatatttggggtccctctcccattctttcctcaaatggatataagtaatacatacatttcattgatgcatactctagatgtacttgggtttttttgttgaaagtaaaatttgaagctttacaaacgttcattaattttaacattttcataaagtctgttcaatcagattagggcagtgaatatcattctcttgaaccatatctcataaaattttgtatttctcattgagccatttgtcccaccactcatgattagaatggtgttgctgaatgcaaacacaaacacctcattgagtctgctctcacctatcttgctcatacatccgtgcctctctcttattggatgaagctgtgagaactaacgcctttgtcataaatagattgcctactattgtgctttagcaacaatctcctcttcatgttctatttcataaaccacctgattacacctccttaagggtatatagttgtgcctgtttttccaacatcaggccctagaacaaaaataagtttcagtttaggtctatcaaatgcaccttcctaggctatagcctaaaacacaaaggctacaaatgtttgtctcccacaagcagaatttacatctctagagatgtgttgttcaatgaattttctctcccctttactactaagtcaaattatgttcttgtgtctcaaactagagatcactccatgcatactgctacacctgttcttatcctatgtctaccaccaccactactcatatctctgatcccattatctctctttctccttttacatctacttcatctgtgtctccctccacttcctattcctcttccatcacaattccacatccacacctcatcccccctccctggcgacactgcacttcatcctgcccctctccctgcccctgctcccacatctctcaacactcatcttatggtaactagagccaaacccggcatctcaaaacctaaagctttgctatatactattatactattgtatgttactaaagctttacaagataagaactggaacaaagccatggacactgaatgcatgctttagtaaagaacaaaatctggactttagtaaaattacctaaagggagaagagctacaggctacaaatgggtgctaagaatcaaagaaaaccctaatggcaccattaacaagtacaaggccattggttgccaagggtttcctatatcagtttatctttgattttcaagagacttttagttgcatgtgttgtaaagccaaccaccattagggttattgtgacagttgctctatctaaataatgacaaatcaagcaactagatttcaacaatgctttccttattaatggtgatataactaaagagggttacatgctacaaccccctgatttcgttggttcaggcaaacctaattcaatttacaaactgcataaggctttgtatggcctaaaataagcacctcgtgcttggtttgacaagctcaaaataatccttctgttatttggttttgtatgctccaaagcagacaattctctctttatttgtattactcatcaacacacactttttgtgcttgtgtatgttgatgacacaattgtcactgggagttctaacactgttattcagttcctcatcactcaactgcattcttcttttgctcttaaagatctgagtgatcttagctacttccttggaacacaagttcaccacactactatataggttttcatctctgtaaaaagaagtacatacacgatattttaacaaaggtaaaaatgcatgatgccgatcctttgctaacccctatgcttggcggtgaaaaactttcagcctttaggagtgatcctatttctgaacctttcctatacataagcacagtgggtgctctccaatatgccactgttacaaggccaaaaattacttatgtagtagacaaggtatctcaatttgtgcaaactccattaaaatctcattagaagattgtcaaaaagatcctgagatttcttagaggaacattggatcatggtcttcatctcaaatctgctttagcattgcctctcactggtttccgtgatattgaataggcatcagacccttatgataagaggtctacatcaggcatctctgtttatcttggccccaatttggtgtcctagtcctctaagaaacaaagaacagtttcaagatcaagtactgaagcagaacacaggagcttagcaaatgctacatatgaagttgtgtgggtttcaagcttttcttactgagattggccttcatttgcagcaacatccaactatccggtatgataacaaaagcattgttcttatgttagccattcttatattgcattctcggaccaaacacattaagttggacctatatcttgtgagagaaaggatcttgtccaaacaactacaagttaaacatacccctgctcatgatcagattgtagacatattaacaaaggctctctctagcactaggtttatgttacttagagataaaatcgacttattctcattggtcaagttgagtttgagggggtgttagagatgttacagagctttatctttctgttaaaatgtttataggttagcttagttaggtaacttatgccatgtgtaattagttacagttagttattattgtatcactttgttaggcttgtatacatagagcttatgctcattcagttaataaattatccatttcacaattcaattctctctttctttcgattatgttattcctcacaagcttggccaccacactttaccatatccaaagataaggcaattttagcaagattatgagcaaaggagttctgcaggaaaaattaaaattgtatccctacacaactctctcacacacacattagtgtacaaggtcatttttgacctttcctggattttgaattgtggatagaattttgacacgtttttctttttattactttctttaagtttctttaattttaactttacaaagttgtaaattgttctaaacaggattcgagagatacgatctcaaccagagcataaatcaattgaaatcaacagctcaagaatatgagctcaatcaaagaaagcaacaaaaaactaaaaaattaagcaaagaaaagagatgagagaaattgagaaacaagcatagaattttacaaggttcaccaccaaatttggggatacatccttggtgagatgcctcagagaaagctcagatcaaatccactatcacgatcaatgattacattgagttccaagtcacattcatcgactggtaacccttttccttcaaactaggtaagaatcactcctctatcactcttttcttctctggatcaaaatcgattcctctcttttctctctctaactcctcttctttttcttctctctgcacttgagagcttctctcactaggttcacactctggatctcacttcactcaatcctgggaagaattttctgaagttgtgttatttctactcttcttctcttctatttatagtggttgtgtagttgggtgagttagtaagagcaactaactatttgctgatcttgatttgtgattctattaagttggacaggattttatcttagatgatttgtttctgttgtgataggtcaacttatatggggaattagttccaacaagttcgcagaatggttacaaaagagaaacttagaaacattaacatgattacaaataacgtaaatgtgtttaacaatcattcaaaagaaagccaaaaacatgtctctcttcttcaagatatgaataacacgttgcaatctgatttgacctccacattgttgataccaaggcgcgaacaaagaaataagccatggaagactgccatagcttctaccattggtgggtagcttctaccacttgtggggaaagggatcccaaatctggaatagtcgcagaagccaaacaattaccccgttgatcacgcaccactaccccgtaccccacatgtcgatccgtaccttaaagccccacatcaacattcagttccagctgactactaccaagcaacacccatggaggaacaatcaggcatagaataggtggagcgagacactcaataagttgaaacttcttcgcatttgcggcctgaaaattctttgtgaacttagaaccccaccctaagaccccatcagtatcaagcaatttcttattataaacccattgattcctacgaaaccaatttctccaaagaaggaccaataaaaaatccatctcatctctagttaaaattacctcatgttcacagattgcataaaaattggccaagggtaatgaggaaggagaactcacaaaataaattttcttagtaatatcatggagaccgagcattcccaaagggcgtggaatgatgatgactcctctgaatgacacacaagacaccataaatcagtaagaatcttatgagtagccagattacgcttcgtagggaaccaatctaaacaagccttccaaatatacactttaatttttataggggcgatgagactccaaatgtatttccactaagaaaaaggctctgaagaagaatcaaaataactctttcccacgagtctgatagcattctagtaaccacttttcacagtatactcacttaaggagttacagtgccaaattgatttcgtgatttgattaaatttatctaagaaaattctctcagcttgaaagtcatatgaaaattcctgaaaacatattacagcaaatttaaataaatcacttaatcaagttttaaattttttttcttagtggtgaggaggttgggaaaaaagaaagtttatgggttccaaccctaacttattagtcttaagatatcaccataacgctataatgctatagtaaaaaaatctgttaagttgagaaataagtttttttttttttttttgtatccattaatcaaaaatactcttatattatatttcattaaaatttagtcactttttaaaagtaaattgcccaatataccctcaccctttacttaagtctagcacataatttacattaacctaagggat

SEQ ID NO: 186951 - DNA, 1599 bp, Cannabis indica
cacaccaagctgtgaaaaataattgcatgagaaaaaaatgcacatcaagttatacgataaaagttcttggtcttaccaaataaaggagtatcctcgaagggatacattgttcataaacaaaattattgtcttaaaatattgtcaagtacaaaatgcgagtacccatgcaccgcttaaaaaagaaaagttcgataaaattaggcagcaggaacattgggatcatctacgacttcagcagcagttgcatctccagcatctttagggaaaaggttttcacccaatccttgattctcaataggtgacatggtacgaaaagcattggacatctcaactgcctgtggcccaaaaacagtaaagttgaattctggtagtttggtcagggtggtgtagatataatcagagacagcctggtcatacgccttcttcgcgttctcctttttagtctgaagattacgagtgagctcagcattgtcttcctccagtttcttaactcgcgtttctagagtcctgacttgttcttccacttgacccttggctttaccgaggtcctcgacttccttgtctttagcagccgcatctaattttgctttcttcagaccctcttgaagattcgaattctgtttcttcagaagattgagttctttgaatcttgcaacaaaatcccgcaaaacattttcataaattgcgaggtgagttcaaatgaacgaggtaggagatcctcgataggaatcccctcgactttggagacgaacccgtcactcacaaacatgtcttgtaagaccatgatgtcgcaagccttgacggcagggttgatcacaactttctttccctcgtcttgagcaacattctgttgcttcttcgacaagtcagccaccggggtaggagcgacgtcgcttttcctcttcagaggcgtcgcggtaccaaccttagacttgcgattgaagattggggcatgtttcaggaaagtcatatctatgaagaggaaaatggaaggtgagaatttgaaaaatcaagacaatattaccagtgatatattaaattatattacctgatgcaggcctcaaagtttgcttggataaacgcttgtctattctttcttcctgcttctcagaaggatatatttgtacactggttcttgctgaagtttagggtcctctgagattagcttgtgctctcacaattttgcagtagtacacaacaagcgccagtcgcgcgatcttgcacagggaggctgcttaacacttcggtaatttctaaatgaatttggtcaagtacagatcgagtcggtccatctgcgaacaaggaaaataaacttagcatctatgaggttatcaaaataaatactaagtgtaaaagtacacgacatacgaggtcggtgattaaagtcaattttgactcctggcattttaaacatgtataaccattttgatttttaatcccccatattggaaattgtaccttccaccctgtttattatagagctggcccatttactaaaacaatagaaacaattatcatggccaacactttttatgtcataaaagaagctaaaatcttcgactgttggttctcctcacgtatactccatatacatcgcat

SEQ ID NO: 186952 - DNA, 2322 bp, Cannabis indica
tacaatgatatgatattaaagatattactttatctacgttttttctagttttttttttgtaataataatgaaaacttcattaacttaaatcatccaaaaccagagaagaaattacaaaaggtaaagaagaaatattaaaaatacaatcagcctcatgaagagaggatcgcgctaaacaatgcgccaccctattagcatttaacatttaccatcaataaaaatatagtcaaaggtgattacttgagtcaaagtgcaattaataaattaaaaagttacaaggaccatttggtaaatctagattaaattgaaatagatagaagtgttgtcctttactttcaccaaagcaaagcaaatgatttttatttttatgagttgaaacaaaagcaagagtttgattgagttgtgttttgtgttgtgtcctaaactaaacactactaaactaaaacaaacaacaacataggcagtcacagatcacaacaacgctgctcagtagttagtcacttccctctttctttctcctttatttcattttatgtctttcctgtttttgtgtttttcaaaattccatttccatacattaattaatgttttggggaattgttttctgtgtttctcaatttcaggagctaaatatgagatgagatcacccttcttcttcttcttcttcttcttcttcttcttctactcaacccataaacatgagaggcacttcttccaatcctgttgagcccagacttcgtttgtctgcttcatacaagtctttctctttctctctttctttttctgggttttgtcttaatttgattatggaatatgataatttcagttttatgaatgtacttaatactgatagacagatctttatagttctgggatttttgtttttctgggtgatttctactttgagtatttatttacttgggttttctgaaattttactttttgtcttggtttttgttatgtatctatcaatcatttcactttctgatcctgttgtttgaagcgtttgacttttttcttttttctcttcttctattctcttttaggcagctcaacaaggttactttattaggttgttggaatttatgtgcattttgatatgtattcactcacgtagatttctatatacttaggttgttgttgacttggtttttggtagaaaaattattaattgggcataaatgttttataaatctgtatttttcacaatacaagaatgatattcaaggaaatgggtgaatgttttcttatttctttttatatattgtcatattgtgtttggtgaattgggaattttttcgacaagagacttctttttggggttatctgtttttatcagcaagttggagttttcctcagttctatttagaaagccagaaaacttattatatagtggtgaataagccattcaagataaaacctttgaatttaatctttaatgtgctaggtttttgactctttgattttatttttgttatagtctctgtctgaacattcttttacttgccagaaagtttctcatgtggacataattgctttttacagtgaagacacaaacaaaaaaagaccccaaagaaatagagtttttggacattttgagaaagcattccgaattcctgtacaagataggaatttgaactacaaacctacattgaaagttgtacttgtcatcatactgctcggaacttttgtgacgcttttccttgctcctgcagtttataacacagaacatctatcacattcactgtcccggtatgataaatctgcatactcatcttgttttcgtttctagttagcttcggtttttggtttagttgttggagggaatagccttctgtcgtcgagaatgttgtatgttatgtttgattttccttattgaatgctgaaacataaagtctaatacttaatgcaggcctaattacatagagagatgggttggagagagcaatgctgcagatttacgttatgtttcatcattagacatcaattgggatcaaatttcagatgtcttagagaagctgactgaacgagatacatacaagggaattggccttttgaactttataaaagtgagattgtgcaatggaatgagctgatacctgatgctgagcatgtagttctgcatctcgaccatgtttcacgcaacacaacatgggagtctttgtaccccgaatggatcgatgaagaagaagattttgactttcccacttgtccttatgtccccaggatccaagttcctggaaagcctaggcttgatcttatcgctgtcaagctcccttgcgacaagtcagggaggtggtcgagagatgtggctcgtttgca

SEQ ID NO: 186953 - DNA, 1739 bp, Cannabis indica
gggcataaaatctcaacacctacttttttggctggtcatgctttaaaggatttgtatttcagaaacaaaccctttactgggattaaaaagttgaaaaaggcttcttttgtttggaaaaatatttgtggagtaaataactttttgattcaggggctatttggagagtgggaaataataatgacattgctatctatgctgattattggattccttcagtggcgacaacactattatccactccgcattagcttgatgattcaagaaaagtttcgttgttgtgggatgcatcaggtggttgggatagagatttagtccaagccaatttttgttctaatgaagtggtgactataatctctattctgtggtcctcttcagatgtatcagacgaagttgatatcgaactttgagaaatcaagttggtattttgttaagagtggttgctaacttggacttgggtcattcttctccttttgtgaatttttctagttggtggaaaaagcttttgactcctaatctaccctaaaggcgagactttttcttggaaagtgtctaataattgaatccccatgattattaatctagctcaccatagattgttatcaaatcgtttgtgtcctatatgtgaattgagagaagaatctacttatcatgccctttgtgggtattttttgttaccttgtagaaaattttgtgagtttgctttaggggatcctcttgttccttgtaaggattttttaaactttattcatagatatattgatcccctttcgaaggagatgattgagtttgtgatggttattatgtggcgaatttggtataagcgaaataaaaaagtccacaataataccgagttgttgctcgttctaattgttaatggggctcgtgatttccttggaaactatcaaaaccataaatggacaacgttgactccaatctatacaaggccagtaggagccactttttcttctcgaccaaaggtgagttttcactcaatcctgatggtgcatagatggattcctcctccgttaggttgcctcaaaatcaacacagatgcagccattgacttgattggtggttgtagtggtctaggcatggtgattagagatgaatggagtgtagttctttcttcgacgtgttggagatcagagggttgttttgaccctgaagtggcagaagttatggttattcgcaatgtgctggcttaatatctttcttttgggcatgccaatattattattgaatctgattgtttgagtgttgttcttaaaatcaagagcaatgtatctattattgcttctttaagactagtgttgaatgacattgttggtcattgtaataggttcaaaattattagttttgtcattattataaatcttataatgttgttgctattttttagctaaactaatcttatcagctagtaatgtgatttggtggccatataatttgatttgtatccacaaattgttgatatgttatgattgaataaattcttaccccacctttttagagcttggtgcttagtagatgaaacttttcaacttaaagaaaatgtattattatgtttatgtatattagtaccaagtaatatcttatctatgtaacggagagaagtgatcttatgacatgggatatattttgttactatatatgcatataaatagtatatattagagacatactatatcgtattggagaagcttctttgctatcgttgtctgttcgatctctctctctct

SEQ ID NO: 186954 - DNA, 2626 bp, Cannabis indica
gataagaagagacagtaaccataggattcatcgactccaagactacggctaaaaaaagaatgattctttatcaaagatttatattatgcttcacatataaaaaaactgattctttatcaccccaacatagaataccaatttctttgctaaaaaagcaaaagcatcaaaaattaagtaattttttttccagaaatttcacactctgtaatagtatttaacataacaatacatcacaagaaaattttcatttaattttaaggaaagactacccacgtatagaaactgaacaaaatttacacttctaaataattacataatacaaattctaaaacatgcaaaccaacaaaatatacagactactgaatgattctcaagtcactatgggtcacctgagtgtgagagagcttgcagttagctccgatggatgaaagagagtccactgagaggaggacgaaagatggagaaggggtgttaaccattaatatttagttcaaaataagtttcttttttaaattaaaagaaattgaagacaaatttcttaattattaagttttgttttcaccttaattattaaattagaaaatgtgtgttttaaaactttccagttagacttttgtaatttaaatatagtaaccgtacagttacgtttttcactcgtttaatttaaatttaaataattatttatttattttctatatatatatatttttttaaaaaaagattataaaaatcagccgcctttctatgaaccatcccaaaaaaactataaatattcatagaatgcttcttaaagcccaaagaaaaaacgtttgtggtgttgttataaactagggttttgtattcaacttagggtttaataataatcagtttatttttattttcataatgaaaaaatcgaatctgattaagtcaaggactttcgataatatgcggccgaagatttttaattcttgggttccagaaacccatctttgtcaggtataacattggatttttaatcaaaatttcatttaaattcttggatctttacacacttttctattatgatgagatcatgagatttaatgaattcaagttaaaataattgaactgtgctgagttttctatcaagaattccaatttctgcaaaatttgtttttggattaaaatatttgcacaagtttcttattcaaattttgttcgattaatacagttagataatctttgaatcttcaaatgaatatgaactattcaataatgttttaaaaataaaaataaaacaatttatatatatatcaaaatttaattttaaaaaattgttatattttgttaatatgattttacagtgaaagttagatcttttccataattttgttttgctaattatttagatttagctattttaatgaatgattttacattcatttatgtcaccattgttttgaatttaattttcgttcatattttatttaggttaagtcttttaactcaaaagatagtcctacaaaaatatctatgacatctcaagaaaaaattgaagaaaaattactaaaaccttcctatgtatcttatattccatggaaatttcctcccaaggtaactatagattttgtttaataaagctaaattaataatagtgtgttgaaaagcatgcattcacatcacaagattttaattaaagttgatttagtattattagctttaataataatttgtgtacaaataggttgttttgattccctcttggagggttctcaatggtgaggagagtgaggaaatacatcatcaaaattggagggagtcaagagtgcttgaagcattttatccacgacattcttcgattccgactaggtaaaagttttctctggcttcatttctttgtccctttaaaaccttacgattcatctcgaggttgagcaatagagcccacccaagggcgggtggggtgcgcccatcccagacttaatttttttttttaagaaaaaatctcaagttattttttaaacactatttttaaaatttttatcaatatttatttaaataatacaattattattttttgtttgaaaaaagtccaatttatttttttaaaacattacattttatattttatttagacaaaataaaattaattttacaataccatatcttaaatttttataactatataaatatatacaaaaaagtttttttaacatgtaatttttgttttaataaaaaaaagaaaaaattagagggtcataacactctcttgtcctttaattttatcattggtcgtaattagtcgtaatactgactcaagcaagttgaacacaaattttcttttatttgacattatgttgtacaatactaacactttttttttctttctttccattagttcttgtgtctctgcagaagtagaaaatgaacactatgatgatagccaaactccacttatcccttcaattcccattgaagaagaagaagaaaaagaagtatcaccatcactagccaccaccacaagttcccaagttcaaagtgaccaaacctcttcaaccaaaccatctttcaatttgctcaacaaaatcttaagtgatccacaaaccattgaaaagttcagacaaaatggactagccatcactacaagttcccaagttcaatgtga

SEQ ID NO: 186955 - DNA, 5387 bp, Cannabis indica
agaatttgatagcgtgtaatggctcagtctttaaatgtgaaaacttcagtgatttttttgtctactctctttttacatgtaatacaattataggagtgtaattttcttttccaatacatgtttaaagagtataaaacttaaccaacatgaacataagaaatcaagaaaggagcaagtgagatattgtaatgtaaatgtataggtatagcagctgcatagtttatttatatatttctcaaaaagtcgtatggaaacaaaatgttgatacataagtcaacatgaacaaaacagaaaaggaaaaaaaaaaaaaaaaaagaaaagaaatgtagatattagtagagaattcagtcatgggtcaattatcagtaatgagttgtaggaggagggcaatcattagggcggaaagccaaaggtcctgcggcgtatatcacagcctcataatgtttgccgcctctcaaaaccttgtcctcaaaacgaagaggagcaccgtacattccatagttgatattggaaagaaggttacacttctcatctggagacgaaacaagtttgactttgcacgattggagtggatgatcaagcaaatcatggctcatttggaatccatcaagctgagcatagaaatacccttcattgtcagcttcaaaagacttgtagtagctcacttgacccctgtagttcttgcagacaacgctgactttagccgatgggattggcttggcaccagtcaaagaccagcttccgaactgatcacagctctggcagtagaccactccttccactacaacggagacttccttctccatcggtttggcggggacatattcgctggctgcaatggaagggaaggccaagggaaggagaagaagtgttgagatgaggattatgaattggtggcttgccatttcttctgaattctgatggttgttggaactgactaaagcttgttagagagaagggaaactctagttttaatggtgagtgattctgatttgattggtatttataggaagcctagctttgtttggataatgagaaaatattgatagattttagaaggtatttgatcaacgtgagagcaactaagcttgcattgcatgttttgtcaacggcttccattccatgtcatggttcgtaccacataatacgtgaagcccacctttccttttgtttaatgcaaaaataatataatacacatcagttaacaatctaaggatatattataacattttattaacgatgtatgatctttcccgggtgctatctgatttaaactttattattagtcttaaagaagtgagcattcgatcatttggagagtaatgatatttcgttttaacaagttttagtttgctcttaagtataatatcattcagttgctacaacaagcgtttttctcctttggtaacggaactacatacaatctggaatggaataatttggtgtccattagaatacttaatttgaacaacttatgttttggtgagatagatttgattgtcaaagatgttttgttggataattaaattcaggtggtttgagctttaatttaagtctcaaggttcaaacaaggtggcgcattgtgaagtgggagttctcgcttgtgcattgtcagctttgtattcggttttccccagcgataatataagcgggtctgacctctaatttacagtttgtttataccaaattgcaggagaaaatgaatttttgttgccacccttttctcatctgggctaatcattttcattcagatatctaatccaaatgaaaaagaaaaagatggttgaattgcttcccttctttttcttgactgctgctgcaaatgtcttgtgataggaacaaacaagaggtaccactagagaaaggaagagaaaagagaggtggcactagagaaattctcaaaaatgaagtagaagaactttttgttatgtatttgccacattgatttcgaaaccaagcagaggaaaatttaaaagtggggaaaagggaagaagaatttcccatgtttccctcctattccatctatgtacaagtaaaagattctctaactgctataagcacaagcattgccaaaactaagactgaagaacatttttttagtacttacatttttctaagttacaattttttagagtgcatctgtggacataagctcaagctctgcccaccaaagaggtgagagtctaggtgaagctccatcaggtgttattccagttatatctctcagcctcatagcaacatctctcattgtaggtctttgattcgggtcagaatcaacacaagacttaatgacttgcccaatttgctccaactgttcttcttggaatgaacttaaagtcggatcgaccatttctttcaagggttgatctcctttaagatagtctgatgcccagtcttcaagtgagccattgtccactgagtaaggaagcctacctgtgaccatttcaaacagaataactccaaagttgtagacattactttctgggctgactgacatagttgtatttggatgcttcttcatctgggggggaaattctgttggagctacagcaatctcattccagaaactgaattcggcaatttttgcagcgtagtcttctgtgagacgaacagccgaggaattcaaattgttatgcgctgtaggtggctccagatggtgaacgtgatccaggcagtaaatcatgcccattgcaattctcaaacgcattccccagtcaaggtgctcagcttctcttactgcaaaatcaaatttcaccagcattagaatttcatggaatatcagtagaaagtagaacactcagcatacaaatcttgagaccattactacgttagtcttacagatttggaataaaagtgatcaaaagtactttatatctagtacttaaaactaataagctagataggcactcactgtgtaggtgctcaaagagtgttccatttggcgcatattcaaaaaccatcattctagtgaaaggttcctcttcctgacaaaacccaataaggttgacaaagttcttgtggttcacctttgataatatatcaatctgaaaagatggttgtaaaacaattagaggctgtgatactgaataaaccgaagctatccaatagagatttttttttttctggtccaataccttcttgcaaaactggacttgtaatttttctgaccattccttggaagatgtatctgtaagagaggctacagctatttcaactccattggacaatgtccctttgtatagtgtaccaactggtgaagaacctattacgttgctgaaatcttcacaagctacttcaagctctgatctcttaagctttggaacacctaaaatcaaagcacgaattaatatttgctgtgataaaacttgcagcatggacatgaggtcaaatttataaaatagacaactttttttattattagtgagacagaattacctgtcacaaatgctttctgaagctgtccactcaatcctgttgcccatggtttgacattagctaccttggacgatatacacagataggcgagtattgcaactgcaaggacaccagctcctccaagggatccagccactattgcagtatgatgactcctccaagacggtttgttgtttctggcaggcaaagctgatttaggaatagaaactggaggcggtgccaaagaaggcgatggtgaagagggagatggcgctggcgctggtgcagcctttggtatttggggtggagtttttgattttgatggtggtgcagtatcttcttgagcagatgatgaagatggagatggtgaaggggaaactttctgtccaccttgagatgttggattaacaggaacttgattaggtgattctgctctcttggcctgcagcactcgtcggtgaatatagtcttcagcttgcatcctggcagagataagagcactctataatgtcacaaaagcagaacatgtaccaactcaatgtccatatagaaattaaaccaaacaaaaactacgaaaaagattacactgctaatttttcaaaaatgcatgtcgataccgatacttactagaaagtcctacattaataatgtgtaagaacatattatcatacagaaaaacatgtggatcttactgattgataattggttttgagatttcttacaaaaaaaaaagaagacaactggttttgagataggattccattttcacattctatctacgttgattgtggtactagggaattacttatttcccttcctactttgaaatgagcacaaacagaaaaataaagcatttcacatgagagttgagactccctaaagatatttttcttttttaacagtctaaaagcttatgttacataccaaaaacttgatatttggttgaaagatgattctctagctgcaccagacatctgtactttatcaacttgaaactcagaattcatctttaatgcattcagttcaggggacaagctacccataagaccattgttgtccaagagtctgcaaaaccaggcagaaaagcatgtcaataagcaaataaagaaagaatgagctgtacacatatggctgccactatataataacttacagggttgtaagtgacaaatttctgccaagatctttcggaaggggtccgctgaagttgttatatcctaaatcaagtatctccaattcttctaactcgccgatcccctcaggaatcgatccactgaaggagttgttgcgcaagatgctgcagcatacaaagacaattgatttgagaacattagtacttatgaacaacaagtattaatacatggaagtatctggtttgacaagataaaagaagaaatgcttacattgatttcaagtggccaaggattgtaagttctggtgctagtgttccttcaaggaaaagatccttcaagttcctaaacaaagcataattctaatattagaatgggcaataaagttaatataaatttgtgaagagggaaaaagaatgaaaaggagataagctagactagtattatttcatcaaatttacgggttaagttgagtgattgataagatttcatcaaatttgactttaaatatgcaatttggtcaataatgaaaaaaccatcttgaatcattttaagcttcgaactataatctaaggcacaaatgttctgagataccaaaagaagaagaagaagaagaaagaatatatatatatatatatatatatatatttatgaaacgaaaacagttcagatattaaaagtacttacaaaacgacgacttttccatctgaagaacagtccgaccccgaaccaggagcatggatcaacctctccaatatcatctttccaattagacaaagcgttaaaagggtcacttgtaactccttccttaaaccttaaaagcgccaaaccttaacacaaaac

SEQ ID NO: 186956 - DNA, 1227 bp, Cannabis indica
attaattaattaagcatgaaaactatcgatgcatccaatccaatgaggttgatcaaaccgaaagtatcatgctttttttgtccattattataattcgatcatattttagttaatgcaaattaatgtcaacttaattaaagtataaaaagttaaacaaagcgacatttggaattaagaattttattctcagtacaatcttcaacttaaattaatcaggtaattaattgtgttcatttaatacatttatgtacatcacttttttaaagattggtcaatataattaattaaaaccataaccatatctgtgttcattaatcatggaaggttaaatagtcctataataataaacatatctaaaaaaaaaaaaaggggccatcttaattcacatgcatatatatgcacgattattaatcccaatttcaggcctgagttagaggaaaattacgttaaaaaatttactttaattattagttatattaattattcatttttcttttaaaaaaagaaaagcgtgatatatagaatatataatagcgtagatcttatagtcgttagaaaataataagtctgaaacattacatatatattaattattgattatcaaagaataataaaggctataaattctccctttctggtacttttcttttctattaaatattgatctcaaatactatttagaattctatattttacaaaaaattattaataaattagactatatttttcaattacaccaaagtagaagtttaccctaatacttttcccattggttgggacaagaaatgttttgtctgtatcctcatattgctctatgaattatatattgatcgatcatgacctctgaaaattgtacaacataacatattttcttttcagcaatcacttgtagcactctcacacagtctcactcacaattattataaatagcaaacaatttattcataatttctaaattaaagaatagcagcctttgtttgtggcaaatattaatagagaaaaattggttgataaaaaaataataataatgtataatatatagggcaccgggcgggtatcatgcaaaggatcaacccgacctacccatgtttgtgccacgtgaactgcatatgcatgcagatttgcagaatgactaataattatttaattacaatataaataaaaatatgtatgatatgattgcctccgaccaattatatatacctggagaatttttatttttttttt

SEQ ID NO: 186957 - DNA, 1146 bp, Cannabis indica
attacttatttaattagctttaccaaatacataattaagactcattattcaatgttgtactttagattttatcagctccaaaaaaacatgccccattatgttggtaataattacttaaaacatatttaaaaaagtaaaaatattttcaaaaaatatatttggtaaaattattttcataaaatcaaaattttgaaactaaattactttactttgccaaaaaaaaaaaagaaaacttaaaatttatttaaatattttttaattatagtttattttgtactctattttatcaatattcacttcattttcttttggccactttactttacttttcctctcctcatttaaataaataaaattatgttttcaattataaaaataattattaaatgtgtttttaacttttcaaaaaaaaaaaaaaattatttcaatttttatattttaaaatttatttatttatttattttacaaaatgcacccataaatattgagactaattaagtacattttcatccgttgataaatcaattttagaagaagaagacgagaaaagtaattcaaaaatttgaaatagacagagaaaattttatccaaattcaatatttttatccacacatatctcttatctattttaaggtggaaattataaatggactataacaagattggtgttattcttgttgttattcgtgtttttggaaggaagacacgtggtatttctaaatcagaattaaccatttaagacctgatcaaaagccctaacaagatagcagtcccaatctgtacagaaggatgggcctcacacctatccagacccaagaaatttacatccaagacctaatctctccagatctgaaagggcatcctgcccatttaagaaggagcaacaaattcgaatgagcatatgggatacattcgaaagggaattccaagaggtgtccccaaaaccaagtccaggatgacatagcgccccctgactctgaatcttagagaatcaggggattgtcccctgtgtcagaccctaagagtgcgcgcaccaccaaaataaacctactttttgtctgacggccactattctaacactacagtgcacaaagacggcacacacatgcgatctttcaatatcgcgtggtccttaagcatacgatt

SEQ ID NO: 186958 - DNA, 4040 bp, Cannabis indica
ttttgtagtggttctttacccatacaaggcaatatgttgtccctagctagatattccccaacacctttttattcatcagttagtatacttttcatcagagcttttgactataatcctctcatttcctttataataagattcttgttttatatttaaatgtataaataacttgttaataatatccttggagaacttgttaaagaattatatacatatgctgagtcattgttatgagaacttggaagataaaatggatatatcgtataacatggtactggaatattatgccaattaagtcattgtttgttagatataataacaataatataatcccataaaatattacaggttacttcaagtataaagatgactttattcagatgatcaaatgtttatttttgtgttcatatttgtaaattattctctaaggaagtctggtgatgttaaccttcaaaccatgtgccattgaaagaatagtcatcattctatactccactggatgaccagccaccaaagtaaacttataaaatctacacaaaatggccaaacacatcttcatttgaaggtatgcagagtcctttcctaggcagattcttggtccagcctgcaataacaaaaacgagtctttagttactcaaataacaacagaagtgtttttggaatttcggaagtctaaaagcaactgttaaaagcccagtcaaccaggacacatatgtattgtttaagttgaaactaatgaaaattaacctgaaatgctgtgaacttaaatggtgatgcattttgaaaaaagccatctttgagccatctttcagggttgaatgaagatgcatctggaccccaattgtaatccattctccccattgagtaaggaacataagtcaccatacctcctgccttaacttttgttccatctggtaacacatcatcctccaatattcccttgggatcctatgatatgataaagtagacaattaggcctaataaaatgtttggatatgactaaaaacttaaaagaaaactctattgtgagatttagcataatgtaggtacttggggaactgcagggtacaaacgtagtgtctctgtgataactgcatgcaaatagtacaatttcgccaatgcatcataactcaagagtcctgcaaattgtcttgctctttcgttgaaagaattagggtcgtcggtgttgaactcgagcaaggacacattttcttctcttgcttgatcttgttcaagagttttgagctctgaatagagcctttcagctacatggggatgtgtcattatcatgtaaattgcccatgaaagagttgttgctgtggtatcccggccagcaattacaaagttaagcacaacatctctgaggcctttgtctgtaaactgatcttcatgatcttctcctaactcaatgaatcttgacaatatgtcatgcttcattgatcatgatcaaaaattttcagttagtttagtgatcaacaaaacagaataaagagcgattttatgttatgttaccttgctatccttgctgttttcgcgagcttcttttatctcttttttcctctttcgaataacagaatatgtaaaatcatcaattgttttaatgctcttatcaagcaaagcttctgaaccaacattaagaaatctctttattctccataatggatcgatgaaacgtaatgtcacaatgatgtttgcagtgtcaaaagcttgagcaaagttgttttcgggtaaatttggagccaaagttccaatttcaacaccaaatcccactttgcagatagagtccaaagtcatcctcatcaacaattcctacaaaaaagatgatccacataagctctgttatgaatgaatgtatttcaatagtaacataacataacattaaggcaagatttttcggtatgctatacctgcatatcaactacttggtttttaaaagaagtttggctaagaataccatggagctttaagctataatctctgaacactatagtactaaagtccctcaaattcttggatgcaaattcgaaactcgcagtctttctttgtctcctccacaactcgccgtccacattaaaaatcccttctccaagtagtacttccatgtaagacctgtaagtctcacccttttgacaaaagaacaaacaattggtaatgtgcatgaaaatcttgaagatgactaaacaattgatgcattaatattagttattattattattattaccttggggtaattagcaaagttggtcttgagaatatgctccacattagcagggtctgcaatgtaagtataagtagtgaaaggcattggtaccacaacagtcttcaattcagagaaatattgaacgagccaatcatgcattttgtcatagttaatcaactgttcaattgcagctcccactaagggccatgttttaggacctttcttattcctctggctccatctgtggatgagaatccatgataagacagtgcagcctagcattaatattaatgtatatccattttgagaagaacaatctaataaaaaattgtccaattttttcaatggaaaatataatatgggaaaggaagccactttgggttgaagagaatgctaaagcttggattgtttttataatatattaaagaagtaagtgattaatatgtgtttagtgagcattaatcttttgtattagaaaagtagttgagattttgttaataatctttgtatgttggtggataggttagtataaaaaattgtctcatttcttttgtgcttctaacctaatcatcccttaggcgaagttattgctacaaatagtaacaataggaattggtgagattaaatacactctattacacacctcatcatctcatagaagataaccaaaccaagctttttggtaaaaatatataaatattaaaccaaacaaaattgcttacatatcccaactaccaaccaactatagtgtgttgctaagttgataaccttgaaatttccttcatggccaaaaaaaataaaccccttgaaattcccttaaataaaagaacaaaaaagattaaaacaagacaatcctagaaaattatttgaaatgttgtgggatcccttaatattactatgttttgttaccaagttttccatcaaaaagtttaatactaaaaattcaaatttcaaacaaaaagtctaaaaacacatagcaaaacactaacaaagatatttaacatccacacaaataaacatattcaaatgatgtcataacattcatacaatactatgtagcataaaagatatagacagtgaaataagaaaaggttgacaaatacgattcctcatggttcttgcttcttctttggcaaattcttgttgttgttgttcttcctcttcttctgcaaattctgagcatttgtctctgtttcacatagaggttctggcaaaacagtgccttgaggaaaagcatctttcagcaatttaagaagagaatcaaatgactcattactcaattgattacagccttcatatgcatcaatttatctgaaaaagtaagattattataatcttctccgaccaaatcagccaatgcatccctgttactactgcccctttcttcttcttcatcttcttcttcttcactgtcatattctcgaggcgggtaagattccccatgataagcccaaatagtataagtatgctgaatacctttctctatcaaatgatgctcaaccgtgcttaaatcgtggagatttcgattcaagcaaaccgcacacggacatctaatttgaccactctcattagtgtaaaccttagctctttcaacaaatgcctttacacctcctacatactcatcagatgatctatccttcacactcatccaactcttgtcaatcgtcatattctgttgacatgaaagaaagaaaaataaaaagaaagcctttcataatcatcttaaagaaaaagaacttgtctttcaaaacggtgttcttccaaaatgaagtgttatatatcaaattagaggactcctaatagaagtaactagggtacatgtaactcctatgaagtttct

SEQ ID NO: 186959 - DNA, 2652 bp, Cannabis indica
ctgttgttgtaaacgatttgcagttttaataacagtgaaatttctacaaaaaaaaaaaaaatattatttttgtccaattatagaggatagttactgattaagatccgatgtgtcatatttcaacctgaaaattgtattttgtattgaattacaaatttgacccctcaaaatccaactccgccatttacctttctccattcatgagctcacgaaacctagttgcttgatcgccacgcgttatgttacgcgctcaaaaggtgaaaattctcaagtcctgtacggacaatcatgggataatagtcaaccaatattttatcctaaaaacgccgtcgttccactgtcttgtttttttgcctatttatacctgaacaccctcctcatctcatttacgaaacgactaccctcctaatctctaattctctctcctggcccctcattcctacttataattctcgagaaacaaacacaaaatatttcaggttgtctaatgccgagaaaaggaatgaggagcatttgctttaaccccaaaacgccgtctctttcaatatctcgctacggcactgctacgtcgtcctctccgtcgtcgcaaaggactactccagcatcgacgccgactcggcggcagagcttattccccgattccatgatggaccagatgattgaatcagctgctgtgctgatcatgaaatgggatccagagtcctctagctacgctaaagtgacttctctcttttacgagagcaaagtcgaagctcaacagttcatccactgcgttaacgatctacagaaagccatgcatttcctggtaacggaagattcctcatcggagaaactcattctctgtcagagtcttatgcaggttgccatgaagagactccaaaaagagttttaccagattctctctatgaatcgtgcttacttagatcctgagtcagtttccaccactcgctcctcacgcgcttccaccagatcaagcacctccgattacgacgacgacggtggagccactactgatgatgaaattcgtgtcgctagcgattcaatttctgaagtagaacaggtctcttctgttgccatggacgagctgaaatcaatcgctgaatgcatgatctctgctggttatgctaaggagtgtataagcatatacaaagtaatcagaaaatcaatcatcgatgaaggcatatatcgaatgggagtagagaaattaagctcgtctcagatcaataagacggattgggacgtaattgaaatgaggatcaagaattggttagacgcagttaaaatctcgatgagaacactcttcaatggagagaggatcctctgcgatcacgttttctcggcctcagattctatcagagagtcatgctttttggacatttccaaagaaggagcacttcttctgtttggattcccagaactcgtggctaagagcaagaagacacccgagaaaatgttccgcatactcgacatgtacaactcgatcttcgagaactggccggaaatcgaggctatattctcgtacgaatcaactgccgtagtccgtacacaagctttcaactcgctcgtcaagctagccgagttcgttcaagcagttctctcagacttcgaatctacaatccaaaaagactcatcgaagtcggttccagcgcaaggcggcggtgtccaccgcttgaccatctacgtaatgaattacctctcactccttgccgactacagcaacatcctgattgatatcttccgagattggacaaggccgacgaatttctccattccggaatcattcttcgacagctcggattccgaagattcaccagcgccggcgatgtcactccgagtagcctggcttatactcgtcctcctctgcaaactcgatggaaaagccaagcaatacaacgatgtttcgctcaggtacttatttttggccaataatcttcaacacgtcatcgtcaaagttcgcacatcgaatttacagtacctcttgggagaggaatgggccgcaaagcaggaaaccattgtcaaacaattcgcagagacctacgaagagctaggatggggccacgtcatcacggcactaaaggaaactaataataatcagacggcggtgatgacgccgggggaagcgaaaacggtgttccggaacttcaacgcgagcttcgaagaagcttataggaagcaaagagcgagtgtggtaccgaaccagaaactccgagacgagattaaggtttcgctggcgagaaaggtcgtgtctagttacaaagagttctacgaaacgcaccgttctagggttgggaatgaggagaatgagattaggtgttatgtcaaatatacccccgaagacgtagcgaattacttgtctgacctgttctttggagtgtcggaatcggagagctcctccgcttcttcttctccctcttcctcgccacgttggcggcattggcgaattctgtgagagttgaaagagaacggcacgtttcattttgagaaaaaaatggcggttttcttttaaatacaatcgccacaaaccttttttgcccaaatatgtaatgtatatttttctaaattttcatgtaaaaaacacaaaaaaaatatccatatgtcccacagttcgaataaaacggcagttatttatgtaacaattttgatttttttttt

SEQ ID NO: 186960 - DNA, 7596 bp, Cannabis indica
aaagaaaaaaaatggttgtaataagcgaattaagtgaacaaataaagggaaatcgatggttgtgccgtgtgtgtatacttaaattggtgggtattagcttaagtttgcgagaaaaaagggagacatatttttttggttggtaagttattagttatatagtccgatatatatacgtgcgtactacgtgctcaattattatataaaaaaaataaaagtcaatatacatgaccgattatttagaatattttaaaattgtgtctctaataatgaatggtttactttgttatggtctttttcttttataaggacccgcgtttaaaggtagtgtcagattttgtttaactttgacaaaaacaaaaaatggaaacttcgttgtatttttatttatttattttttggaaaaaggaaaaaattgttgtattgaacgatttacatatatggagatgggggctacttctacataaaatacagatccgacaacacaaacggaatgaaacactaacaagtgagtatttttgcatgtactggttttatcatcactattccttaagagcaatcttaaagctggcaactttggtggttagccaatgtaactaaaattaattatgttagttaacagtttgagctttagttagttttttttaacaattttctgtaataaacttgatgtttagttttgtttgtgtaacttgattcttgagcttcataaataaaagatagaggctcacaatttagttaattcattttttttgcttctctcttttttggtttgtactatggtatcagtaacttaaaatttagagagaatcggtttgtaaaaatacagctcaatgagcttctgcaatttcattgtattttatagtcgtttggcattgttacaagaatattctagagcaatgacacctcatcacaaaataatgaaaataccctaacaacaatgagaatacactatgacacctattaccgaaaggagagagaaaacaaggtacatgattctccaatcattgcacataaaggtgctgacaaaaataaaaagaataaaacagagtacaatgataaattgtaacaaattagttactggtaacaaatattattttctaacacatccttttaaattaagtggggtggaaaccacatctagtttgtcaaccagaaaataaaattttgaacttgataaactcttagtgagacagtcaccaacttgatcgtgtgaaggcacatatgtaatgtctagagatttagccaacactttgtctctaacaaaatgaatgtccaactctatatgctttctcgagcatgatagaatgggtttgagacaagagcattaactcccatgttgttataccatgtcatagggatgtctttaagagggaactggagttcttgaagaagagattggatccatgtaaatttggctgaggcttgagcaagagccttgtattcaaattcagttcttgagcgagacacaacaacttttttcttagaggatcatgagaccaaagtgtctccaaagtatacacagtagccacccacagacttcctgttatcagggcagcatgcccagtcaacatctgaaaaacctatcaaagctaatctttcactatatttcatgtgcagtccatgattgagagtaccttttaggtaccgaagaattcttttggttgcaaaccaatgacgacagtaagagctttcaagaactgactcaatttgttcacagcaaaactgagatcaggtcttgtatgagttaggtattagaccaccaattaggctcatgtattctgttgggttcttgagtagagtcccattttgtaatgggtagagtttttcctacaaccattggcgtaggccaaggctttaaatgtgtcatgttgttctttttcaataactctattatgtacttagcttaagataagtacgttggagacttatcttgtacacctcaatactaaggaaataattcagtgattcaagatccttcaaagcaaaaaccaggttctattgcctcagtttttcaaagttgtttccagtgacaattatatcatctacatagatgagtaccattaaaatttcatttgctatcttgtcgaaaaatagtgaggaatcaactttagaattgacaaatttccaactcattagggtctgttttagcttgtcaaaccaagctcttggtgcttgtctcagtccatacaaactctttgtcaatttgcacacataatctgggtgtactttgtcttaaaaaccaagtggctggttcatgtaaacatcctcactcaaggtgccattcagaaagacattatttatgttgagttgcctaacttcctaggaatttaccacagcaatgcttagcacaactctaattgtacaagctttgacaataggactaaaagtttcaccataatcgaccctaggtctttgattaaaccctatgacattgttccatccttcatgctctaaagcttcttaaagagagacaagtttagcatagtagtcactgaaatgagctttactcatgtaagttttgggtttgaaaattcatgctttggctctggttatcataggatgagtgggagccacttgaactactggttggctgttagttgttgcatctgattgcccttcaatagtttgatcattatcagtatgttgtactcctaattgttcagcattaacattaatgtccccttgattgagatcatgttcataaccctgagggacagagttgtggactaagaacctggtgatgctccaaggacacttagatcgggatcttaatcagtttgaggattgatattgtgttgtggttgagtatgagggacaccaaaagagacatttataaaggttgaccaagaagaaatttggacgttaacattttgtttagcttgatatgtttttagaaaaccagttttgaaaggaaacttagcttcattgaaaattacatttcttgaaatgtagattctgcctgtgctacttaggcatttgtaacccttgaagctttcactatgccctaagttgacacactaagttgacacacttagttgaatggtactggaatttgtgggattaataggctctaagacaagggtaacaagctattccgaaggtttttaaaaacttataatctggttttcttttctatagcatttcaaatggtgaaatgttgtctaacactggtgtaggcagtcgatttattaagtaaacagttgtcatgaaggcatcacactatacttaagaggcatacatatgcttgagcaagcaaggttagtctcatttccacaatatgtctgtgttttttctaagctctaacattttgagctgaggtatggagacaagagtgagtgaaatcaatgccactttctgcaacaagatttgagaaagcttggtattctcctccccaatcagtttgcaaacttttaattttcctactgaactgattttcaacaaaggttttgaattgagtgaaggcagagagtgcgtcagattttgtttttaaaggatatagccaagtgtgcctactataatcatcttcaaatgagatgtaaaacttgaaattagtatttgacatgactggggaagggccccaaatgtctgtatgaattaagtctaagggaaactgagcctttttagggttttgcttgaatggcaaagtgtgtgattttccatattgacatgcttcacagaaatcacactcctcgttgttaatatttgttaaattcaaatgtttcaatacaagacttaacacaagatttgatggatggcctagtctcctatgccatctatctttgagtgaatttgaaaaaggcacactcttagttcttgactgagttacactttgattgatagggaaagataaactacaaaaacaactatgcttagtttggacagaggaggagataagagcattgtgagtattttgagtagtaggcttgacacaaactagttcaaagagtcccttggagcaccttcctctttgttagtttgtccttcacacaataatgattagatgagaattcaacaataacatcattatcacttgttaaccttgaaatgctaataagattttttgtaatttctggaacatgtaatatctcttgcagcatcagaacactattatttttagtagacagagtgatagatgcaccatgtttaataggtaattttatttccattaccaacagtaagaaatttcttaccattgtatttttccttctgattcaggttgttcgcatcagaagcgatgtggttgttggccctactgttggcataccaagcaccatccattccaacatttttagtgtggcaatgaatattgcagcattctggtttagcttgttcccatcagtgttgtttctagtgggtgcagatcccatataggactcatcataacgattgtagcagagtgcagctgagtgtctatattttccacatacttgataagttttggaccattggatctgcctcttcttcatctgccactagatttatctcgatttccaccattgtagcctcctatgcctctgttaccatgttagtctggactgtagtgaccactaggactattttcgttagcaagattagcagatggagaagagttttttgaggacttactgttaccagaaagtgtgctaagcctaccaagcttactgtcaaatcttagaagtatttctaagagagtttgccaggatgtcttctctcttgcctcaacctgtagaataataggtaaatactctatatctagccctgacagtgcattggacaccagcaaagcttttggatagggatcaccggccaatgccaagacattagcccattgtctcttttgtttgagataatctagcatagtcgtggtccctttccttactgtttgtatttttgttctgtactcatctatttttgccttggagtgagcaccaaaaaggaattctagagcaatccaaacttcagctgaagaagagcagcccatcacttctgtggctatactctcggtcatagataatgaaagagtatgaataagagtatcatttgtgtaatgagaaataaatatttatgttaattaagtaatcttaaataaaaaattaactgagatttttagtgatttgaacttgatgagatgtggaatagagtcactaattctgacatctgacatgattagtcatgggttttaataattttattaattagtataattaataaaattaattagatatgactaatagaaggttctagattagtcaaattcaaaatatcagttttgaatatcaaatttaagtatctaacattttagaatattaaatgatgaaaggatgtgaaatgaaattgatcattccaacatctgacttgattagtcatggaatctgtttacaccaaaagtagcattgataatgtgaacatcaatatttaacacgtggcaagaaagatgatttctcagagttgagtagtcccgagtcataacaagtcgactttaggaactttaaaatagaagtttggactttgataactcgttttcaactcagtatctttaagtattctgtaccatcaagatatggagcaaccaaatccagaccccgagaactgaaattacatgaatctgtaccctggaagtcaacttagggacctagtgcttcacccagtgcctaggttgatgtcctaactaggatttcagttttcaggaccgtcttagtgcatatgggttaaactttgtattaagtcatgaactagatataccacggatatatttgaggcatcaaaatcatattcggagaaattttatttttgagcacccagagcacccggtgcccgggcacctagcgcctagattgataatttgtcaatataggcaacttccaagtatcagattgatgattcagattttgcatcttcttcatcttaattaaaaatagagaaataggtacttttggggaagaaacaacacttcctgggtgccacaaacaaggcccagcgccaaggttgacacctcgagctggcccaacgcccaagttgatattttgtcaacctgggccgattccaatgatgtttctaagaaatctttcgagcatcttcttcgttctcagcgaattattaagattcaattattttaaggaccaaacgaaacttctaaagggccataaaggggacccaactccccagttgacacctgttactaggcccaatgcccaggttgatatattatcaacctgggctgtttccaatcaagttcttgaaaaagtactccaagtatttttttttcgtcatcagaaataatgaagattcaagcaaactcggggagaaaaccacaaacctgaggccctggaaacaaagcctaatgccgaggttagcctagtgcggggcctagcgcccatgttgacaatcaacctggtgcactggttttgatcattcaaatgacaaatttaattcgaccattcaatcaaaaatggtcaaaaataggataggagacctcgtcctcaagttcaagaaacttggaattgtcaaaacgacaactcgggagctcaaaaatgaagtacccaatgcccaagttgacaaatggcctggtgcgttgggttctgcttatccgattcttattctgtttcgaccgttcgtctagtttttcacaataaataagatacatgaagttagagaagtcaaattcataacttcacctttctcatttccaacatggatagaacaataagaaatgaagagtttaaagtctctcatttccacagaacaacatctctgggaactagtgaccaactttgccagaacacaaagacagagtgatgtcaaaatatcacttacgaatcagaaagtacatccctttgtttttttttcagttacctagcttccatgttgacgtcatatgtcaactcgggcattggatgtcaacctgggcgctggatcatggacattcttcagtaaaacaatcataaatcactagatattgatccaattgacataattcaacttgagttttgaagctatttcaattctctataaagtcatatctcacacttcaatctcaattctgaagttatcgactctaaatttcacccaagggagttacaaaaataagctccaacttacccagagcgggtcacaccatcggtgacccgggctctgaattttgactattaacctcaaaataaaattttcactgatagatcatcatctacggtcaaaactagccaacttgtatttttttttattattttattcttattttcaagggcctccttatctataaaggaaagctcccttagttcatttttcacattcaaaaaactacccagaaggtcaaagcacctctctctagtttctctctatagaaaccagagcttaaacacttagcacttttctataatttccatctcgtgaaaaataaaaactcgaagtagacgtagctctattaccatcgcgacatggggagtgaactactatacattgtgtgtgcctttctaaattttttacttaaactcattattcatctcaccaatctagctagctagtgttggacccttttgagtgtcaatattttggtactttcatttgagagccacaatttgagttcttgaactcagttcgaattctctgctggaactttgt

SEQ ID NO: 186961 - DNA, 4174 bp, Cannabis indica
aacaatatttagaacagcttcaattattttttaattacttgtgtgaacaatttatattatgtattaagaaccaaattttataccaatagaaactaataggtaccaaaaccaaaatcacaatacttattccaaaatgtcatacaatatatataaaaaattatgagtagcatatattgtaataatataataataatataattcaataccatttgtgtaaaagaatgcatcagagactagagactgaaatatattgtaataataatataattcaataccatttgtgcaaaagaatgcatcagagactaaaaattgattttaaaattaaaacagagtatcaaaatcaattaacactaacccttgtatccgcacaccaaataagaaaattaattgaataatatatgtcatcctatgatattggatatgaaatgatatgatgggtatatgatctttcacagactaatcttttttttttatgagttttcactcaattaatgagaatggaggagaagaatggtttagatggaacaaaccctaatgttctttatataacaaagttcatactgaataagatgtttattggtttcatataattatatcatttatttagacaaatttaaaatatcaactcaaatagtcataatttataagctcacatattgaattattaaaaataacccaacattaatacttatactcaattcaaaccacttcactaatttagcacatatgagatggtctaagtcacttttatcttcatgctcctattctatatccatacatttttcaaaatataattagtcaatgcatatttacccgcacgttcatcttctcgcaccaatatctatatatactgtattttaaatataattagtgcatatttacctgcacatttatcttcatgcaccgaaatctatgtatagtttatataaaattagtcaatcatgcatatgtacctgcacaatatacttagattatatcttgtgttgactttaggcacaaaaagcaccaactaactttaccaaatagcaactaataatatgttacaagagattttgatacagtactttttttttatcagttcttaatatcattatgtacggctgcaatcattcattgacaggctgccgtagatttttcctataaaaaaacaaagtgtttatacgtaatccgatctcaagtttcttacgttattgtatagtttcacttggttggaactatcgttaactagaaagtaataatggggttcctttattttttgtttttctttgttctatttagagcaacttttgccatagttgagattgagaatctcagaccactgcagataatgagagatggcacaactatggtttcaactgaaggaactttcgaactgggatttttcactccaagtagttcaaagaatcgttatctaggaatctggtttagaaaaataccagttccaacagtggtttgggttgcaaacaggtgtaaaccgatcaacgattcctctggaattttgacaataaacgagacaggaaatcttgagttattgggacagaataaacgtgtagtttggtctacaaactcatcgaaacgagcccgggaaccattggttcaactcttggataatggtaacttggttgtgagagatgaacacgatgaaagtactgagaataactatttatggcaaagctctgattatcctactgatacgttcttatcgggaatgaaaatgggatgggatttgaagagaggtcttacttggaaattttcatcatggaagagttttgatgatccctgtaatggagattttacttacggaattgagtttaatgaacaactcaatacataccctgaatcagctatgcgaaaagggtctacaaaattttgccgaagtgggccatggaatggcctaagtttcagtggctcacctgatatgtgggcaaaccaactaatcgattttggttttgtttacaatgatgatgaagtttactacacttactctctcaagaataagtcagtgatctcaataatagtggtcaaccaaacagcaaatgttcgtcaaagattgatatggattgaaacagagaaaatttggaagccttattattcagtccctaaagaccagtgtgaccactatggccaatgtggtgcaaatgggaattgtataacaacagggaatccaatctgccaatgtttaaaaggttttaagcctaaatctccagagggttggaacacaatgtactggtctcaagggtgtgagagaaatagtccactgagttgccatggtgaagagacagatgggtttttgaaattttctgacttgaaattgcctgatgctcaacatacatgggtgaataagagtatgaatttaagggagtgtagggctaaatgcttgagcaattgttcttgtatggcttatactaactcagatatcagaggagaaggcagtggctgtgtagtttggtttggtgatctgtttgatattcgacagttttcttctggtggacaagacatatatattcgactttcggcttcagaaataggtacaaagctgcagattttgagggttagatccttatcaagatcaaacactataaatatgatgttgtaattagtgtaatattgtgcattgctcactttcttgtctataatttttaccaaaatgaaggagaaactttaaccttatatggttaacattttgctttatagtttctatggaagacttaaaagaaagtcttaaaaaagaatattaataatagatgcaaaaatccatgaactgatatgattagagattctaactgaaattgtttaaactatgtcacaacagctcatgtggaaaagattgatcaagatcacaaaaggagtttattgctattaatcatacttccaattgtttcaatcataattttcctagccaccataatctactacttacgccgactcaaagaactaaaattgagaggtataagtctggataagtgattcttgacatgaataattttatagaattttatctaatcttttattttcttcttgttcttattacaggtttggcaggattaggctattggaatactaatgctatagaagctgaaaatgtagatagtgatgctccaaatctgcaagtgtttagttttaataaaatcgaaaaagccacaaataacttctcaaatgaaaacaagcttggtgaagggggttttggcattgtttacaaggtaacaattttcaggattaaaagctgagataggatgatagaaaaagaatataagtgttttttcgtttttgttttttcattaggggctactatcaagagggcagaaaattgcagtgaagagattatcgaagacgtcgaatcaaggagttgaggaatttgaaaatgaagttacacttactgcaagactacaacatgttaatctaacaagagtattgggatattgtattcagagagaagaaaagatgttgatctatgagtatatgccaaaacatagcttagacttctacatatttggtatgcatatacagttttttctttttattgttctaacagatttgacattttctttcaaggaatttgcttgcttatgaatgtagctatcatacagatcctattagaagacaccaactagattgggagaagagatttcacattattgaagggataactcaagggcttctatacctccaagagtactcaaacttcaccattatacaccgtgatttgaaagctagcaacgttttgttggataatgacatgaatcctaagatatcagattttggaatggctaagctcttcaaaaaagatgagattgaagcaaacacagacagaattgtgggaacatagtaagtatgaagatagatacttcttgagtgaaaaatctcacaagcttttgtttgtgttaaattctttttgtatgcatattgcagtggctatgttcctcctgaatatgtaaaaacaggaacatactccatgaagtatgatgtctacagctttggagtattacttttgcaaatcataagtggaaagaggagctcgcgttactatggaacaagcgaaaatttgcatcttttagactatgtaagcaaactgaagacctattgactactatactatgatccaaatatgatcaatttaataagaacatataatttctataggcttatcaaacgtgggaagttggcaaaggagtgg

SEQ ID NO: 186962 - DNA, 6917 bp, Cannabis indica
aacaaaagatagattgtagaataaaagacccgcctagagtctgctttctcattaatgcacaacacagagctgaagccactttaaccccaaaaatttatgtacaaactatacaaaaaggttgatacaacaataatttacaagaggaactaccaatttaatatacagctgcaattttttcttttttaatatatagatggaacaacaaaaggaatagcagacataagtgatttaagactacataaaatccctagattcaatgcctgcttcagcatcagttaagctttcatcattctcattcagaatgtagtcacaaagctccaaaagctgatctgccaatggaggtatacctggattacgcccatcgttgtattgatgagcattgaaagctatttgccacacatcatgcctgaattgttccctgcttttatactccaacttcctaaccttttcctttatggtagaaagatccatcggccgctctattatgtcaaggtagtcaggagcctcttttttcgatacaggttttaagaaaagataagacacttcaattcggtctttaagtgtctccacaatctgctccaagatgtttgccaaaccaacctgtacagtaattaattgtgatgaaatgaatgccatatcaagatatgcaaaccctaaacagtgacccggtagataaaaaaatattcaaggagcaagttggatattttgttactagtgttactactactaagctactactattggttgcaagttaatttccgaaataatttcatcattgtctaacaaccactctatggataaggagggacacacatgaatacagcacacatatcctataccaacagcgatcgacattagatctaatacatgcagttgcttgttatcttactatgacatcactttcaaagaaaaacatgcattgagagaggaagcaagcatggtagattacctctcctcctcttcttcgctttgttgttgcagcagattcagcaccataccttcccaactcagcaacagatcttcgttttgtactccgttccctatctggcaatctcttgtcaaatcttcttgctctggagtcttctatataatcatcttctatctcaggcattttcctctttttcttcttcttggctttctggcgctcttcttcttccctctctcttctgatggatacttcatatcttctaatctcagcaactctttcttgttcttccagcatcttcatttcctcttcacgaatccttctagccctctcttctcgaagcatctcttcatttctacgcctctcctgctcttcccaccgtttccttttgtctctagctttctttttagctgcctcagccaaataaacattctcctgatttctatgcatttcaaaactggacaattccacaattcttttagtcttcctgtgatcaatactactgccaccatcctgagcgatctgatccacatcaataatttcttttggcctcctaattataattttcttgtgagagtgttctctatctttttctgttcgtggccgttttgatattttatgagatgcaaacctgtccctctctatgttagctggtggcctaataacaatagttggtttctgtggttcaacttggcctctgtccatgtcagttggtggccgaatcacaatggggggcttatgagattcaacttgcacatcttcaggtttcgctttatttgaaattattattttgttaactttaactgcagacctcccagtttcagtatcagatgtcattggttgatcaatgctctgagtcactccaacagaaaatctatcaggaaccttgtctgctgaactacatttaaacttcactggtacttttgttcctggagtaatgttctctccctcagaagcctcaaccagcgctattttggttgcacttttaggtataagcttctttgttgtagtttttgtctgaggaggagcagattgactcaacgtagcagattttccaactgctttctcttgttccggagtatcaacatttgtgtcaacctctctatattttgggcagtttttgtttgtcctcatgtgtccaagctagtacaccgaaagaattaaccgtcacaaccaataaaattatttaccagaacatgacaaataataacttagctgtttcagttttaaggactaaaatatattaagaagaatatacacctgaccgcatgctccacagacgaaactttcccttgcgttctttttttcctttgaacatctggttgagagaagtaaattacaaatatataaatcgcataatcgaaagccagaaactggtcttaaaacatttatctataattctatatatcaaccacctaatgcagacttttctttacaataaactaaagggaaaggaaattgcaatgccaatctatgcctaaaacattacacaaagcaaaacacaacccaatcctttcaaacctactagtatcaaaatacaaatcaaaataatactaccctataagaaaacagaacatttagaaaaaaaaaaaaaaaagtaccaaaaaagaatctaagaagaatgagctcaattaccttgacagtagtatctcctgctattttgatttttttattggttaaatttatgtttacagtatcatcattctttttcttttgttttagttttccaattttgttccttttcagaagaagattctccacctgcaaccacaacatgaagaactaccctcagttctaccttcctataatagtggaagaataatgtacatgtctacatgataagtcttcaattccatttgaaatctcagaaaaagaggtggaactaagagaataaaaaaaaattatgcacatgaaaagaaaaaaatttaaagagactcattcctagatcctaccactttggcctctgcaatagtattttcttttgatgagtatggtccatcatgttggtttgtgctagtacttagcttgacacgatctgcattctcaacaccataatttattcggggggctggagtcaatccagcttcctctcccatcaatctcaccttcttcttcttcttacccgcagcttcatcatctgcagcatagttaccatggtcaattgtggagggttccttaagaaacggaaaaagaaaggaatctactaggctgctagaatatcatagggtccaatatgtctgtaagtctagctattttagatatttgcagacagtaaatccttaaatcaggcaagatatcagtccactaaccacaagatttattgaaagtttgtacttttctttttttctcttaccgatttgaattcagacaaaagtaagatccacaatattcttatgtattcaacagctttgttaaagccaagaataataataaaattcctagggcaatgtataataagatccacagtggttaaatgaaaaagggttgaagccaaaaagaatatgtctaagaagattcacaatgttgaaaaaaaaagaggagggcgatgaagggatatgcttttgtaaacaaatactacttaccgtccataagcaacctgcataattcagctgcttcagctgcttcatcttcaatttcttcttctgcctgagctaatgaaggacgtcctctcattttgaggcctttaacaccatctgccttatcattcttggactcctctaccccttcttcacactcttccgcatcaagcagattctctaaatccccagcaaatgaatccagatcactattattttcttcagagtcgctttcattttcatcaccgtcaaaggctgaaagactctgaacttgccgatcccaaatttcctgacacttctctctggtctgttgctgcaactgaagaaaggacattctctgcccacgtgcatatttactaattgtagtggggtcaacttttacccctaatgcagcttgttcacttgacagcttgcgtatcatggcaatcctatgccaccttgtttgctttgcaatcacttcatcaggaacatcaaatttgagaagaacctgtaaatagaaacatagtgaagagaacaaagaatatgtgaaataaaattcatgagttatagtcagtggtgttgtttcagtagtggacaatttgtccttctagctacagactagagtattatatatataagatgtgtgcgggcatatagctcttgaggttgtgcatgagtacaatgcttcactagttcttctaagatatggagcacaaataatttaattcacagggtaaaaaagcaaactcgcatgccattaatagctaacgaacctcacgtgcagcctccatgctcaatctacgtagatcagcatctgttccagtaacagtggtacctcctcgaccagcagcagattttttcttcaccacagcacttggcactggtgttttttgagcagcacggacatagctaaatcctagaccacgaccagatggatcgccaacaccagtaatctccatacgctcaatattttcttttccctgccaagagaacaaatatgatgaaataaaacatataagaggaaaactgaactccgatgatttaatattgcctctccagtcattgcaatttaaaaaatggtgaatctttggaaatgagagaaacatgaaagttaaaaaattcatagtggccaataagattgaggattatgtaaatgagcatgatttaaattggagaaaccaacccttaaaatcaactagatactttacctgtgtagaagcgacaaaattgctactcaagttccaaggagtaatttgcaattccctttcaatgtgtgatgccgcagccagagctatagcttcatcaggcagacgactcatagcagatgatatggcatttggatgggtttcagtaatccctaaatgtttaagccgatataaaccggcttgcatgctttcataggcacagacctacacctccaagggaaaaaaaagattaacccaagaagaattacataaaacattaagcaatagcaatatctctttggtcaaagttattatctacaaatcaatcaaacgacagacttcagagtattaacccatgagatattcatctacatcgtcaaggaaaaagattctttattttaccagatcatgttgaaatacaattgcagaattatgtcagcaccaaatctgtcactgggccaatttaaacagatttccggtgtggggcacaataaagatgtctcttcaatgaacacacaaaatgcaatacaaattttattaatgttaaaccttttggccattccttcacttcagtataaattcagatcaaacgtaatattccttcattatttaaagatatagttatggtctgaattctttaaacaattattgaaacaccacttttaaaactaattaaataaatatttttagctcttcaatttatcaaactgagcttgtacaaggatttagatatgtgaaaaaagtgaaggtagactcacctcctcaggcttcaccatatttctcagttcatcctccgagaaaatgcgaaagttgtttttcttaacccaaattgattgtgcaattgaccctctctggaatgtgacacagtaacaaatgagtggatttcaaataaataaataagaatattgaaattaaaagaaaaacatgcacatatcacgaaacaatcaagtaaaagccatgtactcaataagaaaatgtacaaaatctatcacattcctaagagtaaatcaattttatatgactacctgcacatgcatatttgcatattccttgagcttctttttaataaaaacttcagaaagataaggaaactgtgattgcaatccatcagcacggatgcaaggagtcatatggcgtttttcagcagctcggaattcacggcacatgtgaaccaagagcctattaatcatataattttgaaggttcttagttccaggagacattacctccatgagaggctcctacaaagagcattcaattaaaatgttagtttcagcaaaaaatctttgtatgggtttcccaaagtaaattgatttcccaaaaatgtactactgtgacagagtatacaattcaaacgctgtaaattaaatgataaaaattttaagtttcaacattaaagatatttattgtgcataaatacacatgcaattgcccaattatagaaatgaaaaacaaaaaatgtgcaaacacaatttcattacacattataaatatcatgttgaaagcatttgaaaatattttgcaacacaaaaaaattcaaggaaatgaaaaggatatacatatatataattacaaagtacaccgtaattatatatataattatgaagacttacacggtacactttttgtttagaataatagggagtagggacaatagttcctaaccaattatatttttcttttaaaaaacaatgtaggggagaataaaaaaattgcattagtgacaactaaagccagaaaacactactagttgcagcacagaatttcaacctctgatcaagtcagagaacaaaaaaacactttggaataccatatattcaaattgctgaacaatctatctgtaactcttgtggtacgtacctgttgtccaacagcattaaccctgtcaatgcgtcttaaagagagttttccctttgcagaacgaactaacaaataatcagttgcaggaaccttatgggaaaataagggtgctctatacatattggtttctagagatgactgattgcaaccagattttatatctccaaggaaaggtgatttatcagcaggatttaaggagacaacatgtccaaagttgttgtttgcactgcgcattgaaatggctgtttgatcatctggagctgatttctgataataagtgcagagtcttgcacccattccaatgttactcaaaagtaaaggtctttcctcacaatacctgcaaagacgacaaggagagcaaggttttatttcttgatagaaagaactaaacaa

SEQ ID NO: 186963 - DNA, 1124 bp, Cannabis indica
tttttatgaaaatctctttaatttgtaacgttgacaatactacgaaattatgttcctgtgcttgaaaatatcatgtttgctgaattttaagcgatgattttgtcaatgaattggaagaagccattggaccaataaatgaattaattacgcttctgctagtcacagatgaatatatttctatgttttataattgcagaaaaggaagcatgatggagatgaagatgttaatgatattcacagacacaaaaaaagtaaggtaatgaaatatcttatctttctttcgatcttattcggtgttccatttaagtttaggtcttttcttttctatgtgatcttttacgactttgagtacaagtactctaccgtttcaattcctttcctaactagtctctgttgactcttgcacagcataagagctcaaaaattgatgaagtcggtgcaattaaggtagcaggctgaaaatgaggcatccaatacatattttcgttttcttcagatgcttgtcgtttagagttgggaggggtctattattttcgttatgaaatttcttgaggtacaagcctatgtcttcaccatattctttcgtttccattaatgttgtggtgtgcgtataaaagaaatgggctcttgaggacaaatgttgtcattttggttgagccgatgaaccaagcatgtcaatctcatcattatggctcatgaagaatcaatccataatgacattacacctcttgtatttcatgcagagtagctttgaaactgactaaagattgtgaaggtgaattcacctcttgagaggtatgtggagtcaaggtaaaagttgacccaaaaaaaaacaaaaaaaaaaaaaagaaacttctttgtaaaataacattgtctcatatgattgcttgtattggaaggaactctaatttcacattatgttaatgtacacaaatgacttaaaaggcttttgttagaattggagtcattaacttatgcttagaagttgcagcagctttgagttgtagagagataaggtgataaagggatggtattatgatctttttatccactttatattttgtattaatgactaagattattggtagtttgtccaaaagggatttttgatggcttggtttttt

SEQ ID NO: 186964 - DNA, 2820 bp, Cannabis indica
aatagttatctcagcaagcatcttgatgcgctaatgtcagttatgtaatactgctgattgcctaacaaccccgttatcagaagttctggtttgtggcgtctacttttctacccagcagttgtaaaattaaacatctcaatacacaaggataataagaactcacacagggtggaatgcaatggcatttacaggatagacaatgtcccttccagcctctgactttctgtggcacttgaatgcatacctgtaagaaaaagaaaaaaatacacaccattaacactgataaaggaaaaagtaggtctgctagtaccacataaaagttattatatttttatatagaagcttccttaagaaagcctgcaaatcctaattaactgactattgacatcatagagcattctaccatcattacgtggatatttcagtttgcatgataggcaagggaaaaaagtgagaaacaaaattgtaaaacaaatcatttaatccaaatttacaggggtattctccaaaataacacatcaatccctcatttataaattgaggatcaagcaaatagaaaaacagtcaaatggataaacagcacttattcctaataaaactgcaaaaaaaaaaatcatttaataaaaagcaaaacgttaacagctttaagcttcttgttgtatatactactatgtctattactacagaaagacatactttttggcttgactaccctctgatagatcaaaaaattccatcgcaacccgtccttcaacagaactgagggcatatcctgcaaaatgtagagaaatcagtaagcatacccaatactaggtagaagaaaacatgagtaaatgacacaaatcagagcccaaaaaccatcatatacatacatacatacataaatacaacgatacaagcacatacaaaggtcatgaaattatcttgaatcctcttgaggaacattttgagaaattcaaatcaactctgaacaaagtaaagtccgtgacacatcatccatatttcacacctaacaaataaatacctgttccattcggataacagcgcacacatctagtttgatatttcaatgaggattcccttcgttgctcaggttgggacatatttcttagatcatagacattcacatgtcttcctgcagttgctacaactaaacgatttccaactaatgaaagagagtatacacgctctggttgagcatatgtcccaacaagggtgcgctcctgcccacttgctcctctagggtcccaacacttcagtgttttgtcccaacttcctgtaatcaactgacctgcaaccataaacagatcaggacagcagaaagtttataatatattatatcttattctgatcttcaattgtgaaaatgtaaactaagttatgaattaaaaggtttagctcactacaaatgtagtaatgagtaaataccatagcatattagctacttaaaaatagatagaagcaattaatgcactataaaacttaaacaagacaagaatggcagggttgtactatttgaaaggcctagaaaactgatcttgcccgggtaaccatttctgactattggtttaaaaatgcaatgtgataagctaaaacataaatgaagtgactaattatttcaatggctggactatccaaacaaatatcttattgtttcaaccaaaagtagtaagattgctacagattagttattagcatattatctcaaagatacactctaagaaaagcattacatgctccaatgcccaaatcgtcatagaatacgaaaagacaaaatgtaaagtaaatctgaaatggaaacaaagttaaaatacaaaaaaccgaacctgctgcataagagtactcaacacaccgtacaggtgcatcatgccgacctagaatgtcctccttattgtagttaaaaacaagcctaaaataccaaaactagtcaaattataataatcgatagaacaaccctaatcttcaaaaatgttacaaatttgaatcaccaaaccaaacagaaaactaaagcatatgaaaaaagaaaaacgaactaaccgtctcactgtattgtcggcgccggcactaaacccggaagaatcatcgtggaagcaacagtcgagaacggcaccgccgtgcatgaactcacctcgaagcacattggcgctggcgtcatacaatcggacactctggtgaataagaagaggaaaagaataaggaacagaggagaaaattgagagagagaggggaagaaagaggtgaaggcgtaccttatcccatgaggagacgagtaggtgatcgctatgattggagaagcgaaggtttgagattccgtcggacggtggattgatgagctctcggccggggagcggcgaggggacagctgtcatgacgcgattggagtttggccgtagtgaggaattttgttagggtttttgtttggattgagaaagagagagtgtagcagaagagggttgtgggtttgagtagagagagagagaaagagagggagagggaatttggatttgaaaatgaaaatagaaagatttaaaaataaataaaaattaataataatgaaaatgcaagatagagaggaatatgggatttgatttgaattcgccaaatgctctcaacggatggaaatggagtattcaaatagttgtgtcatttcaaaaaaaaaaaaaaaaaaccaaattcaaatagttgctttgaatattcaaattctcggataataacaagaaaaaaaaatcaaaaacataaataattgtaacaacaagagaaaaaaaaaattatatcaaacaaaaagaagtacaataatataaaataaaatgattttttttt

SEQ ID NO: 186965 - DNA, 4485 bp, Cannabis indica
attaaatattaattggatgaccattatatacactcgtgaatacgtgaaagtaaaatttcaaatttaatacagtattaatctagctgacatttcaaatttgcaaagaaaagttaacataagattgtttcgaaaaaaaaaatcaataaatgagttaaatgtataaaattatttcataagaaaatttcactgtaaataaatataaataagtggaaataagtgttgtaccaatattcttcctgtgacagccacttagctcacactcgaggtttctttgaagtaaagcaatagtggtaagtttccaagcaacacatggtacattagccctctatttctccaccgctttgcggatgatacattatgctatgctttagttctgtctcttggagtcaaaacagttcaccaaaatgattggggaacacatggtagatcatacaaaactaacctgcctttacataacaacttcccctgcttaaaagtgaaccccataacacgatcacctcgcttcaaatcagtgagaatgcaatttcaaaaaatttcttgactgatttctttggcgctaacatcctaatcttgccatgatgttgtagtaagcacagtacactccaccgaaggcatctaagatagaatatttgcaggcctattacctttgctgggtcgatgatgaatctgaaaatcataaccaagcagcttgatatcacccatttttgagtgtttggagttaagactccctgctcaagagggtattttagattcttttagtctgtcttgaccacaaatttgggccccaaaaagtagagtaaatatgttagagataaacagaatgaataatactcaatttaacatttgttgagatatcatattcattatatagccaaaggcgcaaggtacataattcttaagccaatcaactcattacacgatagggtaggaggaatatcaatactataattctaacaaaattacaacttacagaatcgttacacttttgggaccactccaattccttgtgttgtgctgaggtgatagagcaagtgcctgattgaaatgattgggtcatgtagactatgctgactcttacaaagtgatcatccaaatctatgtgtttcatcctaacatgatacactgggtcacatgctaacaccatcgcaatgacattatcacatcaggaaattcgtttgagaaataaaggaaatttcaactagagtatctcttaggtaaacacagtaaccaacaatcgatcgtttatcatattgacaacacacccaatctgcatcagattggcccactatggtgagtttgtcacttgggattatgtaaagaccatggttaagagtgcctttgaattatatctgttaacctatcttgctacaatctagttggtttttgatggagcttgaagaatttgtctcaacttgctgactgcatatgcaatattgggtcgtgtgtgacagatattgtagtgctctaagtaagcttttgtaaatacatggattagtaagctcttctccatcattaatagatgttggtttcccagcaactatcggcgtagcgcatggctaaaagacgagcattttgtacttgtgtagtagctcttcgacatacttggagttagtgatgtagagcactacaatatctgtcacatctttagtaaagttttctccaacctttcaaacaacgcttctagtgcttatttcactccatactacgacttatgcaacttgcacacataacctagtttgttctttacctcaaatccctcacattgtgacatgtaaacatcctcttggagatatccactgaagaaggcatttttgatgtccaatcgtttcattggccagtatttctgactatggaggcttatttcacacgattaaaagtttctctaaaggcgatacccagaatttgatggaaccctttggataaaatacttttgtaccattgaaattgtttattgagattttccaaaaaacaatttttttaatataagaactaaagaaaaacaatttgaagaatcaaataagaagagaatgctcagagttttaacgtaggttggggcgttaatgagccttagtccaccagttagtgttattacctgttaggctagaaaagccaaagggattacaatgagaatatttgctctattatcttctcaagcttgtgagttaagaatttctaaccctttgtatgaaggattcagtgcatatttatagagtatagaggtcatacttagttaccattttttttctaatggggtgtttacaaatattacagtgcttagggcttattgagtgaagcccgacccatgcggcagtgactgtatgctaactaggcaggtttgatcagggtcatagttgctcatgtcgtgtcctttgattgtggataattaattgtgcattaattatttgatcttcaattatgtagtttcttgttttaacttgatattattccctgtccgagatttggagagaataactgccttattttgcacgaattattagataggaaactacaactatcttccaagtatacactgatagaaccttccggctacacgaagccaagggtcctccggatacgggctacacttggcggagactttcatgggtgagtaatgcgagtgtcttcccgaaaggctaggttgatattgggcttagctcaatccttatcgtttaaggcctactgatgggctttacataatcatattgtgtccacgtgtcccttgtcagaaacacgaataacatttttcctcaaggttctggaatgttgtggattgtggaagcttgcttcaatctacataagttgacatgtggaggctaaaggtgaaacctttatagttttccaaatgaaactgaatatggagacaacgttcatttatttggttttaggatctgatgtgtcattgtttctttggcttgcgaggtgtccgttcaattgatgatgcgtgcgtggcaacccaagcattttgacgtctacttatttttacacgatcaacatataatcgtgtgattttgtctcagttcagaacaatgcattaaatgttggacaagggttttcttaatcgttgaatctgctttgtgtttttggaggatcaatttcaacagtggatctcatatctacacggttcgcttcatgaaagtataaatacttcttaatttgacaatttaaaaccttaaatcaaattttgaatttttctatttcaaaaccataaccttcgatagtgaaaacccaaaacttatatcattcacaaatcaaaccatactggtgtgtgacatcgacttctgtattttccttcttctaagaataaaagctcaagaatttccaagtgctacacccctagtgattttggctgtagcactggaagaagtcaccaatctggatattagttctaaaatttactcgcttatggaccaggacaatgccattgttgagagacttgattgacttgaagatccgttgattaagagagtttccctacaatcgtcttatgacgttagcgtgtgctctctcagtccgcatctctatttgatttcagagtcatcacctaattcatcactaggtaaatttcctctttgttaatttcttgaactgtgttgcatgttgagatatgagaattacatgtgatttattttcgatttgaaaactatagctttaggcttttggccgggattctgtctttgatacgcgtaggatgttttgaataacttcttgagtaatttttagactaaataagaattaaacttttttttggaaaaccctattttgctgctgaaatgctggcaagattttatttccttgtctggaacccttatggtgctagatattgcttgaattatgtttgtttccatttattcttgtgttcctgattcagctaccttgaacacatactctttgaggattttgtttcaagatagtgaatcaggtggggatctcttccaagtagttattaggtaggacttccccttgcccttactatcttagttggtacgggtaactaactgcttggtacttttttcagcttccatgatgtgtacgagacatcaacaaagattagttgatgaagatattttgaaggtggagcaagctcttgctcccaaattggtattaaattcatctccatgggatattgatcaatacaaaaataagttctggacatatgacaacctttagaagtacgagacacagagagggctcaaaagtattccaggactgatttggaaccaattttttgtattaggagaaaaactgaaccaatgctttgaagaaggttttggtgtttagagttggcattatgcttcaaaaagaaggaggctgctccaactccaagagagatcttgtatttcacattatcaaagcacaaaatatgagaaaccattgagaaaaggttggtttctataggctggagagccactacaaggacttggtgtgttttgttagttccatgaagtatacatatgatatccaggacttacgtttatgctaggagaa

SEQ ID NO: 186966 - DNA, 2738 bp, Cannabis indica
gcacatagaatctatgtgataaagctccatcagtcatcaccatatgctctgaaactataacgttcttggtaaggaccattgaagtagagatcagcctcaaaccacttgggataacgcactaaatctccagcaacaaattgcataaactgcttacttccttcaggcacaactctcacttccccttcttcaatgtaaaccagctgatccacttgccagtcccatggcaacttggccttgcccgtcttccacatcgaccattttgaaacaccgagctccgctaatcgctccgtcgacactttccgttccactctcactttgtacaactcttccaaaggtttctccatacgcatggcctttatagcaccaagctgtagaccacttgtagtgcttgactttctgcaatttatgatgcttttgttaacaatgagggagctaaaggtagcgcccaagaagacactagccatatcaaaattgcttgtttgtatatgttttccccttttgcgagcttacctgataaaaaaagagatgaattaggttgattatcatagagaagtacccacaactcagactaatgatttatgaagattaatagcataaaaactcaatctttgaaatctgtcaaacaggcatgaaaagaagatatttttctagatgagctgaaatcaattttcacaaagcttttgtctgttgtattgtatgtatggcctttgcatttgagtaagacttggcagagctgtgaaggatctagttggaatttgttttattatttttcaaaacaagaaaaagaaacaatttcataatcttggaaagtggaaacaagaatatacactttccaacatccaaggattaaaaatatttttttaaggtaattgttttagagaaaagaagaaaaaacagtccttacaaagaagccgtacggctacttcagcaggcaaggtgcaacaaaacaaacagaaagactaaaccagcaggaaaccgaaacaaagaactaactaactagaaaattgtctattcccctgctatagaatcagtgagaatggatgcatcaatatcagtgactatcacttctccaatagtctcacaaaatttgtcccattgagcaacattatgagccacatcattgcagcgccgaggaatccattggatttcccagaggttcagtttggccaccgcttcaaagaaccatagagccggctctcggatgttaacgcaagaaattgcacatccttcggttgaatagctggtatagccttcaaaaaaatcactttggaaaatgatattggacagattatatgtagcagctgccatagcagcagaagaagcaagagtcaccatttcaccaaccaaagggtccgtgcgacaagaattattgattgagtcataatagataatcttatcaattactattgcgaatcaactgtgccaaaaagactgacttcaattttcctatagataatgctaggtatgaaggatttcatttttcattacaagaatctacactggctactacatttctaaaaattcttatcataaaatgaatagaaaggaaaaataatgagtaactaacatgagatacctgtagcgatggagtaagaggccggtggctggagacccaactggagtggcagaagatagaggttttagggttttagtgagaatttgagaaagaaacaataccttcgtcggaggaagcactgtcgctgagtttaaccgatgatagagtgtgagagtgagtaatataaatataatacaagaagataacatggagatttctaagcggagtaacaatataaataaatagtttaaaataaaataaaataaataagtgtagttacataattattaaaaatagagtaacatatatgtaaatatgtatttttttttttcttttttaaataaaagatgatttgttgtaattttttgttttcaaatattttatttatcattgttcaaaaaaaaaaaaaatttaatttatcagtttaatgttattttttcctcttgaattgatatagagtaaaatattatttgttaagtaatttgtggtcaaattatctgatttttaaaatttggcacgattaattctttagactaaaatttgagggttgaactcctcaatttataaaattattttgttctatactccttctgattactttagtctgtaaagtgcaaaagtgaactactattttgtacacatgacgaaatttcattagtccacctaatattgattatataaatatttaaaaaataatttaaaattttaaaagttaggaaaaaataattatttttttctcattttttttccttttcttttttcttttttctttttctacttctttcttctaaaaccaaattcactcatattctctctctctcttcccctcccaacgacaaccctctgccatggctaaattggtcacttatggtcgtttcttggtgaagctaacttcgaaaatcgaagccccagcctagaaagctccttgacccaaagaacccgacccctctctcccgttctatctctctggccaacctcgaccggcgatgatgggccactcctaactgtcgtacgcctaaatagagatggcgatcgacctcgctagtctcgaaatgccaaaccccgaaggttccttccttcccctcgtgaaccctctcgatgttcttgactcaacgccagtgtcttagatcatctttcttatccctaaattttgtccacctgatgtggcatgtccatgtaagtt

SEQ ID NO: 186967 - DNA, 2389 bp, Cannabis indica
aaggggttcaggaaatcccccttcctacgaaggcatccgtgaagccttccggttcccaagctcctgttgggatagagaaaacttcacttgcaactggggaggtctctcgggaactaattgtgttcgggagtggcacgacttaagcaatccatcctaaacataaagccttggcagaggcttcacctactttggtcgtggaggggactaccctgacgaatccatagactaccatcgtctcggatgagaacttggaaggacctatctttcataagaaaggtgtttccatgacatgaagtgcaaaactcctcctccccaatccgaaagggatgctaagaaggctaagtcaacttcactcatgcagcattctccaggagaagaggaagacctttgcgaatccactactcctctgccaccaaatctagagacttcaataccatcatcatcaacaccactccaacaacaacaacaataatagcaacaataacaacaataaccacgagaataacaacaacaacaacaacaacaacaacaacaacacttataataacaattgccaagaacatcactccctaacccacctacgataactccgtcccaaacaagggccatccagtcttcgaaagggaaacaatccacctccaattagccacaagggcagtaaattatcactgcattgcctaggattttccatctgaatttcaggctgcctataaagcctaccattcttagccacaaaattttgaaaaaaatgggagaggcagagcacgccttgaggcgatgccctgagaaggagaagatattgctccaaaaaagggctaacaccctttcttccatgaagagggcagatatcactgagggaatccaaacttctaccccagtaccagtgattgacactgaagctcttggcaagaggatgatgcccaaggtggggaaaaatcttttgcccttctttgtagagcatctagaccatgtggcgagtagcgtgtgtgagctgactttggagaagtgggcagttagcaatagcactgatgctttcactttggctcaagctacaaaggaacaggttgcaggggtaagctttaacatcttttgtctttatttttgttgttgtgtattatcatcttatggtgttttttatgccagatgaccttaattgcataaaggacttccaaggaagtaggggccttggtcatagactttgagtagtttcaaattaagaaccagtctttgcacggggagaacaaagctctactcgatgaacttgaaaaagtcaagactcaggccattactgaagtgaacaagatcaaattagaagcagaggcttggttaaattaggttaaagtttgggaaaagttgaggttgatcgtgcgaacaaggaggccagtgaaaagtatcttaagaagtaccatgaatataaagcgaacattgattaaggccataaggtagagcaggaccagcttaaatccaaagtaacttccctcactaacgagcttcaccaggtgaaggaggagaaagataaaatggatgctcgcttatcgatccaaaatactgccttgaatgtcaaactccatgaggtcaacacagtgcagagaaagatctagtgatccaaggcgtactggataatgctgaagacctaaaaaaggagatcacttcactgaaaattaagcttaaacttagaacatagttttgcaaagtgtctgcgtgactaccaattcatgcttcgacaccatagaaaagttgcagaaggaagtttctcattaactagccaatggcacgaaagcctttataaccttgacatctatgcagaggatcaaggagactactggacaatctatccgggacgctgctgcacgtattaccaaaatagaggctcgagctaagaggttttgtcttcaatcattgaagatgtcttatttgatacttcttcatatgttgtggcagaaaatctcactatgctcaagcatctgggaccagatgaagaagattacacctggagggtaaagactatcaacttcgataattatcttgaggaatttagcctacatgacgaagatgatgaatctgttgaggaattagctgaagatcttgaaccgaagcattcagccgaggttgtagtttcttcagggaatactactcaagctctttaggacattcatcaagataagactgaaaacctttcggattttgcccaagacctaccccaggaccttttagatctcgcttaagataatcctcatgatgtgcctctagttcaagcttaagaccaagttcaagagacttcctcagttctagaccaagtccaggatcaaccccaaggcataactttatcttctagcgtttctttttattactttgtaaccttctttttttttttttttttttagtctag

SEQ ID NO: 186968 - DNA, 2195 bp, Cannabis indica
aaaaaaaaattagaatatataaaaataaacctaaccaaaataaaaaagaatatcagggcatagcacaaaatattaacctattataaatcatgtgtgtatattagttacttcattgtgttttgagactatttttacataagccatattgggagtactttaatgataaaagatattttatgaacatgatttgacttctaataacaatcaacgaaattttacgctcataaatcgatgattcagaacagcttctgcaattggtcgtcttcgaaaatcaggattcaacatatcctacataaaacaataagacatgataattcagaataaatatacagaagaatgatgatatcagtgttaattaatgaaatagtcatcaggatctaaaatgtaaatcaacctggagtaactcccaaccagcaccatctccaagatccagaaacttcacagcttctaataatcgatcatccgctaaacagtatctgattaaacaagaaagaaaaaaatttgactccagcaaagctttcttacaatctatttgaagagatgaaccaaaaactacaattttgaccaatataccaaattcatattaaatatacacatatatatttatgtacgtatgtatgtatatcttactctcggattgcttcaatatcaagttggaaagtgttctctataagcctctgtaagcagatgggatatcaatagaaaaaacaaaaaaaaaatcaggattagctaatggcactcttatacggaaagaagattaactgaagaagatgatagagtaacatttattatacctgcaaagagagactatccattatgccaggttcacaaaatggaaggaaagctaagtatgcaaagagaagacctgcttcatatctgcatggaaaaacaaaaatgtaaaaacaaagtgttatacttagacaatatgcttaatctaagtaaatatgtaaagaaattacatgtcatctgctatcccgaatgctcttttatccataggtgtgaaggcaccagcagcagatgctcgtctccatagtccttctgagagggatgatccagtaccctcttcgagatatgaatacctggtcatccagagtcaacggatttacaactgttcaaaagtatattgaacctgagtaagaggtaggacgaacattttgcaatacttagaaaatgttttgttatttgaaggtgcttagctgtagtactgtgggattgggattttatgcagtcaatgtaataggattggtttatgatttgctcatggaaaataaaccagcataggtagcccttgacatgacaactaagcaaccaaaacatggccttgcagggaattatttagtatgttccaagttttcatataaaaaaaaatgtagaaatcatagttggtttggggcaaatctgaatgaattaatttggtagagaattgatattcaaactgaaaaatgaaatacagttctttcaaacgaagaaaattaatcattatgaaaatggtagtcatatatgataatagaaaatatgagaactgagtttaaggacaataagacgtgtgattaacgaaatgcacaatcagcttttctcatgttaaaaggaatgaaaccaagattatatgagaaagacaaaattagtgaccaaaactttacctaacatcaacagaaaaggctagatctctaagtcgagggatcaagtaaacagcttctctttctgcgatcgtgctgttataaatcacacaaacttttagcaaaatcaagagaataaataaaatgtagagttttgaaaatttaatctgaaggaacacaacatactataaattttttcaaacacatactttagagaaatagaagacggtccaagactctggtgcaatctatcatgatcgtgcatataagcaaggcctttcatagctccttgaaacagcttgattacaaaattccttctgcgtttgattttttcctcttcttcgaaacgattccaagatgttgattccaaagcagctttgcttaacactctttcacttgcatatttggtatagtctgctgcactatatttcccatcattacgaaaagcaagccactgcagagatgaaatacttaattctctcaacaaaaatacagctcacacatagatatgctcaaatactttatttcatccaacaaacctgctctccagttgttgtctcaaaaccacctaagagtatc

SEQ ID NO: 186969 - DNA, 1551 bp, Cannabis indica
atcactaattggttggggcacttaacaaataacttccattgatgtgatttgcattcaatctaatctaggagataaaaaatagaatccaattgatttattcattcattctaaaatcaaaagtggctaccaatctcgcttaaaggaaataacatagtaaagtaagtgaatcatagagtagttattgtacaccataactagacacaacattaaacaatataaatatttattgcctagaaagtaaaatggggtggccaaaaaggctctcaaatattaaataacatgctacctgaaactacacaaaagatacatcacccactagcattctcggctgagacatcaatttcctcgtcatcatcactttgttgtatcttttcaatctcagcctgtgctctctcaatgatttgccttctctgcagctccaaatctctttggaaatccattctcatcttctctagctcaaccatctgctgtcttttactgtcttctatcttctcatatatctccccaaatttatggatagtattagcaagcaacctaaatgaagatccttcatcatggtcgttgtcccttccagattttctctttttcggtggaagcccatctgagtcatcgcttccttctagttctgagttcccaggactatccctcatttcatctaaaccattagcgcagttcaaataaactctgggattcatgaaaacatactctcctgaatccatcccacaagaaagtccaggctgttgattagcagtcgataataaaagatccatctttctgaaataaccccatttgctagttacacccatggtcgagttagccttctcttttttgtatttcttcttcaaggtatccagacgattgcgacattgtgtatctgtcctatcaatctttgatacctcagatactttctcagcaacctcttgccattcctcagaccgaagactcttctttccacgttgaagaaagcgttcaccccaagcatctagcagaactaatgtttccctctcagtccaatctgtaagtgaactccgaccaccgaaagatactctcggggcagaggttgttgcaactgatcgtggtgctgatggcacatgaggagcaaactcaaaactcgaaaccaagctcatcaactttcgctttttggggtgtctctgcaagtcttcatcatcattctgtctatcataatcttttcgtttatcatgatcttcatcttcagcctcatcattctcatcgtccatctcatcctcctcctcctcctcatcatcatcttcatcatcaccaacatttttgtccacgggtggatacccattattttgaccattctcattgtcattgtcattgtaatcctcctcctctcctaattcatcatcttcctcatcctcttcatcatcctcatcgacataatgatcgccaaccgatttagaatatggaccactctgaacagagagcttttggcgacgggaagaaccatagtcctgatggtggtttaccccataaggatttggtgggtaccttgcatcatcttcggtgtcatccatgtaaagctcaaaa

SEQ ID NO: 186970 - DNA, 9040 bp, Cannabis indica
cacagacataagtaatgtgaagggaaaatcaatcttgctgtttgtagtttattcatgattttacagcaagtgcataatgtttataacatatgtcaactaaattagagcttctttgtgtctgttataaatctatcccaacaattttcaccaaaagaaggaaattaattcaacaaatctaacacaatctaataacgttggtccaatcaatcttcatgagtaaacaaacctgacatttcaagctagaatacaaactagctagtctttttttagccaaattaagaaaaagttctccaatacaaagcagcttcatcaatattaattgaatagcatatcaggtgccaagatctagctgatggcaaaacatcaattctagaattaaaaatcacaaataaacaatcaaaaatccagaatccttaaacaaaacggtaacatgaatatatatatacaaacaaaccactatgcggttaaatttcaaaatcagacttcatacggtataaagacaagcatctctactctaacgacccagttcataaaatggaaagcctgcgatttctcaacaatcaaattcttacggaatacaacgaaacagacatgccgttttgatcgcgcacatacaatatatatatatagataattaggaataggatgatacctttcctgaccagcggtgtcccaaatctgggccttgacgaccttatcgtcgacctgaatactgcgagtagcgaactcgacaccaatggtggacttggattcgaggctgaactcgtttcgggtgaagcgagacaacagattcgattttccgacgccggagtctcctatcaaaaccaccttgaaaagatagtcatagtcgtcgtccgttctgtaagcccccattttattgaattctctattcttctctttcttagattccaaattatttttagggaagaaagcagatcttgggaaggtgaagagagagaaattgagaatgtgtgtgtgtggtttgagaaagaaagagttgggtacagcgcaggggagggagagacattcaaacctggtatgttatttaataataataataataataataattaattattacaaatatgtacttttttaactaaatccctttccttttcttttcaattactattttattttccttctttaaaataaaagatccctgatatggtcattggcactgcctgggcggtaaatgttaggaccgccaaaaaaaaaaaaaaattgtaaaaatgatcattcaatacatattcaatacaagtttttggtaatattatcttaattagttttttattttttaaaattaaaataattttagaaaattatttttttacttttaaatttttccctaaagaatttaaaattttaaaaataaaaacaaattattttccaaaaaaaaattaaacgttttttttaatcaatattttaaattccgactctaacttagatccggtcccaaacttggacttgcccccggtgttgacctcgaacccaacttaaataaaatcaacaaatgaaaataaaaataaaatttacagaatatatttttattttttattttttaaaaacaaaaattttatttttatttttgtgattaaaaaatttaaaaataaaagtattactaattgccacctaaatatgtgagaataaaaataaaaataattttttttacagaataaacagaaaatatatgaaataaaaatgaaaatcacaaatttacaatgatagaaatataaatatatgattgcaaaaaaaaaaaaaaaactatatattgattgagcaaatatgaaaataaatataaaaaaaattatgcaaaaaactaatttaaaatatttcataaaaaaaaatagttatgtgtattttggcaactttaggagttatttatctttggagtatttttgtgaaaaaaattgtcaaattttataaaaatacatcattagagatgctttacacattgatttaaacgacccactagttgttattattattatttgtctttcaataaaatctagtaaaactaatacaatttcaacctttaataagtcaaggtataaaagttgtgttaaactaagaatttggcggaatattataatatatttgtactttcgcggtagaaggcttaaaaagaaactcaagtaaagtttctggaaaatacaatataaaatgaaattctcaagttaagcaaagcgcaaattttttccattccatgttctgattaccaagtcctacaattgtcttagttgggacttgggaatgtggtttatttaaattaagtcctttatttattttatttataacgtgctatgcacatattaggaccaatgtactttataattcaaatcaattaaatttggtcatttttttttttcaaaaaaagaaaaatataaatgcaaagagaggagctgaaaaagaaacctacattaatttcaaaatatatatacttttcttattataatagaaaaataacttaatattgtatggaagttaaaaatgtaaatagcgagtttcctcctaatttaatatcttcgtccttctagagagaattaagatcactttccctcctcttcttaacatcatttataaatgtatattatcacttccacatatccaatctactagactagactactagcattcaacgtgtttgttccaataattctttttttttccccctttaattgcttaaatatctaatcatttctttcaaatcagatattctgatgcaacaaaaaagtaccaattagtattgttagcttatacaatcattgagttatatactttattcaatagacacctgtaagttatcgttggcttatacaatcattagtcctgttcatccttaaatttaaaatcaaatgctataaataggacaaatataacaaaaatgaggaaatgaataaattgaaatgtcaataaaatggtgatatatgatttgtgaggtcggaggtcgatccttagaaaacgataagaataagaaaagtaaaagttccatacaaaataataaacagaaacgaggaaagaaatggttgccttcttaccctctcgccacttgccctctcctatcacaattgtcaacctcaaaagcatagcaattctaccaaaatagcctattacaaataatatggttgataattttatacatttttattactataaaatacaaaagacatgtatgagcacatctcatgtttaatacaataagaaaatacatagtttactgcttttattgtttctcatcatatagatgtgtgaaagaatgtcaactcttctaagtatctccaaaattgaggtgtaactaaataatgaactaagtatagaagccctatattggtacataggtgtaatctagcgaaaaaaatagagcacttcatggaaaagcttttcattcctttggccttttactcatggttttacgcttgttaacatcaaggtacttcttcctcaaacggatggccttaggtgtaacctacacacacataatacaaggttatgttaaataacagtctacctaacacacacacacaagtgagtatatgcaaggttaaagatattgaaatttatttaaatctaatatttacatgtccatgttaaagccaaggatgcatttacttcatcaaaaagataaaaaaatcaaaatggtaaagtttaatgaatttacctcaataagttcatcagaagcaacatatcctatggcttcttcaagagttatctgcaccgaaatgaaaatataaataaaaaaaaaaaaaaaaaaaaaaaaaaaattgatattgttctctaaattcctgtttgtgttgtttacgaagtacagtacttatttgattgttgccaacctaaaaaagaaagtggcagaggtttgtgagcaggacaactagtcccattattctctattagtcaaaaaatgcttacttatgagttatgattgcattgcatgtgtagttttgcattcaagtctataaaagaattccaaacctaaaagcgggctaatgattcattcaactatgccataattgcaacagaaaaaccagcaaagtacaatgaataacaaataacatactaggcgaggcggcgacagtttcacattctcatccttggaagctgcacgtatattattaagttccttggcccttactgggttgacctaccaaagcattaattccaaggtcagtcaaatgaataaacataatacacaacatcaaaggcaacaaatctttgctccttacatctagatctgtatccctagaatgttcaccgataatcatgccatcgtatgtctgcacaaacaagcaaaaatgcaacgttgacaaaggagagaacattaaagattgtgcatcatatcatgggtgtgagtcagcattacccaaataaattagccattttacaaactacagaagagtagtggatcaaaaatatccagattttcttatctgaattccttttattattcttttccttttctagttaccaatttttcattgataacctaatttgtgtcaaacacgcacaaaaatgtacagatcaatagagaaatattcaatagttcgctgctatactgaaaggtgggaaactcaaaagggtccaatctgtaataactataaacaagtagaaaaggttatatgtttaaaacctccaatccatgggtcacaaaaagtgttccacgagcttctaaattcatcagtgcatgcgctgtggttgtgccaaagcccattgatacctgtgcattaatgtcaaaaaaagtgaatataaggctggaatcttgtagagtgatattataaccctttcaagatacaaatcagagcaacactgtaattgtatatatacacaataatgtaggcttttaaggtacaagaatttatgctataattttcagagtttcagcaaattgaagtatttatgatgaaaaactacttgaatgaaattttacaagtcaaacagtggtaaatcagaaggaaacgaaatgacgtaccagaactcctttcctgacatttccaaggggacctctatatttttcataatctgagaaatagataacaagacatgtcagcacatggctagatatagaaagtgaaaataagcttggtgagcagaaattatgtcggctaatgatgctagaaaaaaggaagaaaaaatggtgaaaaaaacaaatcatacttaagaatgcacgatgcataaatccagttccacgggtgtcactgctaaacacactcctataacccactaggcccctgatgcaaacagcaaataaaaagtttcagaaaataaaaatgtcaaaataaaaaactgcacttcacaaatttggaagaaatacgcaaaaataaggattccaaagaatgctcgacaatgttatcttgcattagcactacaactcttcaccttttactttaagctagtaccaagcatcaattacaacgtttagctgctgtaccataactaaactgacatatttacagaagatttcaacaactacaatatagcttaccaaaagaatacaagtaggttgcgttatttggtattgaaacaatacacccatatcactcaccaaaagaaaattataagatgagattttaggaaaggccatcaaataagtttatgttaaaacaaaaatacaaaaagataagagaacaaataacaaaaaatatacacattttactttgtgcgataaaaatcatatgccatccatttatcataactgtgactctaagtgaaacataaactcaatttgctaagaaagtaaccttgatggacatgtcaaagtcaatctagtcctgccatcattgccaggaacagggcccatgtcagtaacctcagctcgtctatgagataaggcttccataattaatccaacatgttcctcatttatctgcaatagcaaattaaaatacatttacatacaggtccacaaaattatacatgaagcattagtatagttttgcatctgcaattcttacctcaatagtaacttcttcaattggctccagcttttgacccttttcagttttgtacctgatataatataaaaattatcacttcagaagttgatacgaatgaatatatatacatccataaaaatatttaaaagtaatgtttaaaaactcttaattcttttacagcaatccaaccctatttaacccaaaaggaaagaataacaaacagacatagcattttacaaatatgctagttaacacattcattagaggaatactacttcctgaatatttttttctccaggataaatatttttacttcaagaaacaaaaattaattaacaggctcaagtctatagaaagtaaatctattatgtgaatagtctcttctacaaagaaagaaaaatggcgaaagaaaaatctacaattttagtagctttacacagaagtcagaacaagagatctataaggcataaagactaaatgttgtactaaaaatgcccataattttgcgaaagctatttccttttagtatactttaaaaaggtggacaaaacaaaataacaggaaaaaatgccacttgaaaaaattgcaacaaaataaatcaatatcatattttagtaaaattgaaatacacaatgcattgctgaccactttcgtatgttaaaacacatttagtggagatccatgttttgcacattgacataactaaatctatgtacgtttgatatctaaatctgctcttataaaactgaaagtcaactgctgtatttgttgaatagactaacagaaccataggatttgcataagcattccaaaactcacatgactttgggtggggagacagacagttcaaaaccttcccgccgcatattctcaattaagatacctgtttacacaatgaaaactacaatcagcaaatatatgaactaaataaccaattcagcagatcagcatgtgcgtacaatctgcaaatatataaactaaataaccaattcagcggattagcatgtgcaagtgcaataagcaaatatacaaactaaataaccaattaagcagatcagcatgtgcaactagagacagatatatatactatccattcctctggaattaatattttggaagtaaaacatttaattgcaagtttaagagggccatacctagttgaagttctcccctaccctgcacttcaaaagactctgataaccctggaataacattaatggcaagatttgtttctgcttcagccattaaccgctcaccaatttttcctccagtcaactataaatacaaggtttccattagcttgtgaaagattatatagatttatacaagaaataagacaagctttttatgtcatgttgaagattgtttaagcaaaaaactggattttaaatgcatagcacatcattgttatatccaaatgatctgcaaatgatttattactatgaaacccaagataaatttggccacattgaatcggaatgtcttacatgttaacttaactaaggagagttatccttgcataaataataaaaataaaaaactaaggagggctaatgggaagctatacatgtaacactctgataataaaaagtaaataagtaaacatgaaggctcctcatgaaaaagttaaaaagtcctcttttaaaacaacattttgggatatagaagactgaaagaaataagaaaaacagcattaatacatcctcctcatccttcctattttctaaacagtactttagtagtttttataacccttatttggacgcatgcaatttcacaaatttattaattatttcttaatttttattgattccttttgacaagaatcactttgacaattaaatgagatctacaactgtattaaaagtttgcttaccaatgaaaaaaaaatggtaatcaagcactctttctaatacaaaactatgtaaaaggcataacctgagttttccttttatcttttactttcttttttcattctgaaatcaagaataataaaagcatattctgcaactggaaggctaaaagagaagtgatcatttgcccattatttcgatcaactgaaacagagcccgaataagcctacaaaagaatatataatatgtagttaaaaagcaaaatttcagatcttacatgtgaaccatcacgaccagccaatggtgagtcattgactccaaaggtcatggaaatagttggggggtccaattcaatggttggcaaagcagttgtgacctggaagatgcacactaatgtcagcttaaaacagaaaaaaagatgccattggttacaatatttcattagaataataacaaaaacgatttgagcaatgattgataaggggctatcgtacaaatagaaaataagtgggagctaggatcaagaatgctacaaatcagtgcagcaaatttaagttcaattaatacctctacatttgcaactgtgtggcctatagatggacttgctaacccagtcattgatattatgtcgccagctccagcactttcaattagaaccatactagtaccttttttcttcatcaattttgtaacctggaataacaaaatagaacattagtaaattgtggcattcatataataattgaacaaactcaaaattctaaacaacagcaagatttcttgtctatctgagtcagttccagtaagaaagctattagccgtgatagataagtggtggttttgaaagctaaatagaaaattcatttaattttcattttcatttgacaaataacataaccttacctaagataaaaacagtacaaatataagaaaacaggttactgcatcattttgatatacttaaaatttactaagaaaataatatataaaaaaaaaaaaaaaaatcaatgtagtttcacatatatacttcttcacatttatctaaaatcagaaagacctccaaacctttccttcttcaattttttgaaccccagaatctttgttgcaaagtccatggaccctatcaccaacacggataattccagaagaaactcgtccagttaatatccgtccaagataaaagtccttttccatcatagagacctaatatgaaattttatgagcaccgtcaaattcaatgatgccaactgactagaatat

SEQ ID NO: 186971 - DNA, 1351 bp, Cannabis indica
tggtgttaggagtatatggggaaagatcaacatcaaacaatacaaagaaaaacaaatatcctctccattcttcctactccccatcctttctgcattctctatctatcctactctctctcatttctaccaaacatagcctaaattttgaaggtttgaaggcagtatgtcaccctcaatctctcctttccctccttttctccctcttaccaaacaagtaatttagtcactcctatcactctctctccacacctcttcatccatccatctttccttcctaccaaacatagtgttaatttaaaaaggacctcgaagatagatgtgccgagaattgtcccaataaggtttgggagcgcgtgtgttccactcacgcccaccatggctgctgctgctgctgcaacagctgcaaagccctcgagcttccttatcctccgtccacgacttaaccattatttgaagcccttgtgcgtctctcttgccaatccatcttcgtcttcgtcttcgtcttcttcctttccattcaaccgagcttgcgtgctcccaatcctaaagccgctcctctcttcgaaccccagacatcactcttccgtggccttcgcacgcgacaatggaggcggcgccggaggtaggtcgggagctcttggtccggctccggttgcggaagtcatacagaagatcgacgttaatcctcccaagggaaccagggatttctcgcctgacgaaatgcgccttcgcaactggctattccataatttcagagaggtttgtttcaatttgtgtgcaataatttcataggttatggtttttttttttttttaggttccgtacatatgtatgtatatatctttccaggtcacggctgtttgggttcgaagaagttgattttccggtgcttgagtcggaggctttgtttgttagaaaagcaggagaagagattaaagatcaggttcgtataatattttcaaattataggcatttgacatccaatatgatatcatatatatatgcatgcacgtgtgtgtatatatatgaatagtgtgcatatgtttttcatgttttcatggacgaaattgaaacctttttatgttgtttttaattatgcattgaaacagcgttcttatcattaaatcataggaaaatttgataatttgaatgagtttctgatctctcctcaatcgaaatgcagctgtattgttttgaagataggggaaatcgtcgggttgcgctgaggcctgagcttactccttctttagcaagattggtgattcagaaagggtaatgtatttcttgttctgtaatttggctcttctgttttgttgaaaacaaggcaaagtgtttgttgttgttgttgttg

SEQ ID NO: 186972 - DNA, 1786 bp, Cannabis indica
agagagagagaaggaaattgaagcttagcttagcaaggtaagaagaatccaagcaattggcttggctgcaagtgcatgtataaaatattgaactgaaaaatttgtagtgaaatttgaaggaaacttattctccttcccaacccatttggcgagcacgccgttcccatgttgaagttacctttctctccttggtgagcaatgcttcggaacgctctctggccccctcgcaggtttcagttgcagtattgcatttttctgcttccttttggtattgagaagctatccttttcgcttcagcaaatgtgacgttcatgtgccggttgtgttcctcggcaacagcctcttgcagtttcaactcctcagtcagaaggtccacaaattgcttctccatttcctgctttagttccgggtcattactaccgcaatctgctaaagcataatgagtatgaaacttgagttaacagttgaaagctcaggagctttacactaagaaatattcaactagtttttcaaatccacaaggaatcataacaagtactctacctgagattgagagattagctaaacctgcaaaacaaccaaggtgacattagtcagtagagtactaagaaatctcttaatacaaaatgaacgcactgctaactaaaataatttctaatgaccaatcacagaaagtcaatgaaaaggataactaatccaaatgttctagcacataatttaggagccaatatatactatacaattatttttttcactacaagccaaccaggaatttcttgtgcagttaaagaatatgttgaacatatatgagtacatatgcataattgaggggttagagaaacttgataaaaaaaattctaggatagcttgaaaagaagaagaatcttgaagttgtaagatccaatggaagtacatgaatgcatgtatgccagtggaatcttgaaggagtaaaatccaattaaaatcttggtctaaacgaggaataataactttacaactgagttcatatgggtaaacaagttcacaagcctcaaggattcatacacttataagggaaagcaaacaagatccaactacaagttaaaaggtcatttcatatcaaacaaagcatgaacattttgttatccatgcacacaaaaacaaaaagtaagagaactttcaaaacaagggaagggaccctaaaaccagagtggaattcctcataaatgagctaaattcatcttgaatttatgtcaattggtttcatatatccaaaaattcagaatcaacaatacccagagaaagataaaatgtctcaatcagaaaaaaggtatccttaatttcacttcatttagctcttaacaagataaaatagaatgattcagcgaaaccccaagtaggtttttgttttcttttatataaacatccgtacataaacaaaaaaactctgaatccaactgatcaaaacctcaaatcgatgaaatgggcaccattcattctgattcaaaagcacataaaagtacaaaaaccaatgcgatctaaagcaatcaagacaaaagaattgaagaaaaagctgaataaaacaaaattaccaggagcaatcttgagaagcgacaatggaggagggcagtcacagacgcaaggagcacaagaggctttttgatcctcaacgcttatacccttcttgaacctccaatacagagccggaccacacacggcaagagccgaaaccacagcaaaaaccactagacaacacctcaagcaggtcccagatcgcctcgacatctctctctctctctttcactct

SEQ ID NO: 186973 - DNA, 2308 bp, Cannabis indica
caaattttttttttttttttttctaatgatcttaacaccaaatattaatgacattctatgtatacaaaagatactaatgaaatattataccaaaaagaactggtatacaacatttacaacatttactcgtatacctcctctagttcagcaacaacatcatcccgagtgttcttctttaatgatacaaacctttctcgtgcctgacaacagataaaaaaactacttagctttgaaaaacaattgaaagcaatcatacaagatatcaggaagaaatatgcattcaactgtatatgagcataaagagcaatatcgaccatataacacttcaaaagagctatatcctctttttttttttcatatttttaatgaaataacataggtttcgccatgagagcgagagtgggaagcagggtgaagaaagaacaatcatacaagatatcaatcaggaagaaacatacattcaactgtatgagcataaagagcaatatcgaccatataacactttaaaagagctatatcctcctctctttttttccatttttaatgaaataacataggtttttccatgagagagagaatgggaagaagggagaagaaagaacatcaagaggcctataagtaccaagtacattaattggtcagaagccaaaaactatatctgaactgcctgactcaacactttgcccttcttatttttgcaaatggtaaatgtcctgcccctttctaattactaaacgggtgttgatattgccagtagctgaatctaatagatgttttcatcacaagttattgactaaatattagattttacaagatggtttctgtcatttttaaaaatagaaaataacaccaaagaagtgctgatgtaacccgctggtacacactcagaaaatatagagaaaaagcagtagaaagaacaaacagagagacaaaagaaataggttctgaattgatattgcagataaaagagaattacagtgacaaggaccttaggcatttgagaggcctagattctccatgatgcagagagagaaatactcttataccctcctctactaatcctggggtctaacatgtgcaggggtaactaacagtgacatatctcaacatgcaaatgacacaataaattcccatgtactcatattttacagtcattgtcattatactttacagacattgtcatcatacttccctgcgtattacaatctaagagcaagttaactagtggggaaagttttattaccatataagttcaagtacctggtcataaacatgtatagatttatcaaagcgtcgtcgggattcctacaaaattaagcaatgagcgcatgaggagataaaaatcaaaagaagagaaagcaaaatatccttctaagaaacaggactgaagaaagtaggatcatttaacagtaagccttccaaaaataaacttcaaataatataataaattgtgaataacaagcttaagctattggctattttaaataacttgtctaatactaagaaaagaacaaaaagaactcgccattattcttcttccagcttcataaaaaccatgcttaaatgttaagagtattcaccaaacattcatttactttattctaaaaaaaattcaacaattccaaacgaaaactcaagtagcaaaagttgttttgaaatcctacaaagtgcatctgaagattgaaaaccaattacttttataaacattttttcacaaaatatttctttgtctagcagaaaacattacaacgaaaactgtaaagataatcgctaatttcttagtagcaaaaatcattgtcgagagaagaaataataaatatacctttgcttcttgcagatctactgtcataaaattcgtcaaacggtcgattaaaacatgctcaacctgtaacacaacatttttgacagaacaatttaaatatttcaatcgaaattcagataattaggagagttccactctcttctgtggcacacaatgacttccattttactttaaggatgtggagaaatgcatttgaatccacaaatgattattgtgttggcttagcattcaaatttccattgacttgctcaataaattaaaaggataaagcaagccattatgcacatcaacaaaagaaaaataaaattcctcaccaaatgagagaaaaatggtaaaataaagaaatgaaaggtctccaactaaactaaataaaagccatattaaaatatacatatatatatatatattaatatctttgaaattcttgtcaaaaaataaaagaagattactgcacttgaaagatgaaagtcaatttgcttaatttaa

SEQ ID NO: 186974 - DNA, 1700 bp, Cannabis indica
agaaaaaagaaaaaaaaaaaacagcacaggcatcaaaagcatataccgattagaagaagaaaacgctcgagcaatctcagcttcttcctccttcgtaagaggaataaatggttcactcgggactttctaaaacagaaataacataacttgtcattacaaaaccattgcaaattcaagtaaaaccaggaaattgaaaaaaggaaagagaatgttacctcaactgcttgtgttttccttgtagaacgctgagcttgatatctagaccggctcttctcagccaattcaatatccaaacttaaccgtgacaatttggaagtctgctcatattcctcgagtaatttcttgtatagtggaacgtaatcagaatcagaatgaagagacaatgaatccaaagccagccccgcatcctctagtttcgaaggggtgtctgaaaagtttgaaactttcgaaggagttgtctgaaaaccacttcccggggcttttgtttccaattcttcaacaatgatcacattgggttctactattttgacgtcatcgtcatcgtcatcatcatcatcttctataagctcaatttcttctatactcgaatcttcttcaacatctctatctaactcaacaacttccttttccttgggtaaataacgaaacgtctccaatgcaaagttcttaatcctataacatttttcatacaaacgatcgaaaagagtattaccgtactcatttcctcgactcgaaagggaaccgaacttgagtgttctacaaggggcatgaactctaggcaatggaggcttggcttcggggtacctagagaccctagcgatcgcacttttggatgacaacacaggtgctgcgttatcctggctcgactgcatggatgagaatctaggtctctttgcaatttgaaaattgggcgaattcagagatgggtgtccgtggttcaagcttgaatactcatctccgcgtttacggttgctggttagggcacccattgatagacccagaactccaaaaccctaaaaccgcgcatcgcctctaacaaaaaccatgccggcccggaatcattaactcgaaaattcgaccaaatcggcaatttttcaatttttattttccaccggcaaaaaaaaaaagtctgacaaaaccaatcggattcgaaactcttctagggtttatggttaaacaataagagagacagaatatttaattagggaaaatttgaacctttgaaaaacgattgttcaaaattgaagagaaggaatagtaaagtcacaagcttttcacggattggctgaaaaaaacaattgagcgatgagagagagagagagggagagaggaagggacagtatgaatgaaagttagttcgaggaatttgaggagggagagagagagtatagtagagatagtacgtttaagtgagtgaggaaaagggcttctttctttctaaatctgtgaagtgtgtgtaattttgtgaagaaggattattttgttattataaggaagatacacttgccagttgccaccctaggtttcccatattgtttttattaacactagatcagatcttccattccaccattttgttttttttttttttctcttttactgccttatactttgatgtttagtttattttggaaatgatgatggaattgaatacagtattgctttaatttttttttgggttaaaaaagtataaaataaaa

SEQ ID NO: 186975 - DNA, 928 bp, Cannabis indica
aaaagaagaagaagaagaatattcataataataatattattaagaagaggaagctaaagctgaagttgatgaaaccatattgctgctgtgaaattcagagcagaacaagacaaacacaagttgttgtttcttctgaaccaaaacaaacaattaagccaaaacattattcatctaaactagcttattctactattactaagattactactactactactaactcctactactaccaacctttctcattagttcccatgcttcttgttcttttcctctttgtttctttcctttctttccctgcattttctcacccccataatcattttccggccaaccaaacactccggcctgatcaagagttacataagctcaaaagggtcaatgcttatttgaagaaactcaacaagcctgctgtcaagacaattcaggcattttcttctttactatatgaaaaaaagcttttttcttttctgttttttgagctttaaatgatctggggtgttttttgttttggggttttgagtactacagagctcagatggtgatgtcatagattgtgtgcttgctcatcttcaaccagcttttgatcatcctctgcttaaaggccagaagccattggtaatgttttcctcattcataattataatcaaattttagtactcttttctttggttatatatatatatggtaattcttatatgcaggatccaccagagaggcctaaaggccatgaaaacaaaacaattcaagagagttatcaacagtggactgactcaggtgaatcatgccctgaaggaactattccaattagaagaaccactgataaagatatattaagagcaagttccattagaagatatggtagaaaaccaagaagacatgttaggagagactcaactggtagtggtcatgaggtaattgctatttt

SEQ ID NO: 186976 - DNA, 2648 bp, Cannabis indica
atttaataataattgatgccatagggttcttttatggcgtcgtttgtgtttgatcctacaacgttatttggatcagcgtcggtaataaattttatcaaaactgaaacgctaaaaaggattaaaaaaactatctcttaaagcctataattatagtagtgaaatgtgtaatattcacttaaagtatatataggaatgaaactagacatacgatatagagaaataaatataaatgcatatatatgtgattgtgacaaaaaaaaaacacattgtatataaattatatatataacacctagctaggtagtgtttgtaattataattacattgaaaggtacacataaaaataaataacttaagacgatggcaatccctctaatataattataaatttgacaaaagagtagtgggtctagatgatatgagctaattaattaaattaaaaaacattgtaatataatagaatattacaatgaattctttaatttttcttcttcttcttcttgtaattttaattaataattagaaagaggtaaagcattcatgttctgatgaatttgaatcatcagaaggagtgtggttgtgtctaccttcatacgtcgttatcaccatacgacaatcctctgagagtcgttcaaccctcttcttcactcgacagttgttatgagtacaacggtaataacttctgccattattattatcaaaacaaacaactcttctgttaattaattaattaactaattatatatactttagctttaccaatatatatattacaaaaatatatgtaatatagttgtgtgaaacctaaggatctttagatactaacaaacagattctcatgagtagtatatatatatatataaaatcatcaaaagataaaatttcatattaaattttgggattggatcgattttgtcccatttgtaggaaaaaaattgtggtatgtgctgccagttgtttggttttatacatttagattatgagatttgatcaactagcactactaagaaaaatagctctatatcgacataaccgacctgaaattgacctaatttttttaaggaaattgacctaattattaagtgtattgatttattaaaatgtatcttcaatcctaaaaatatttactaagatcaagagtaaaaaccagacataaacaattaatatagaaattcatgcaacaatgtttgtatatatatatataatacaacgagtgtttagagtggggtgggttcgccaaaattcaactggtgaggcatgtgtactcactactatataatatggacctttagaagctgttttttcaacttattttataaaaaagaaagttaagggatgtgaaaaaaccgtctagcttgaaattgacatttagaggccggcggttttttgataaatttttacgttttgtgcctgttttgttttcgagcacctttctaaaaggatttatattaatagggtacatgaaatatttatattctaggtaattcttgtttatctttggtgtgtgacttagattaatgataccccaacaaaaacaaactatttgaaaccctaatttaagtattataagttattcaaaaaaatttaaaaatttacatcctaataacaccattataagagaaaattagagaaaattacaatatttaagtgtcttttcttgtataatttttgctagcccataatagaactcatatcattatatctataggattgaaagaatgtctaactctaaggaagaaagctaatctatatactctaatatatactatagtagtgtagaaaaggaaaaatataaaatgtgtgatatacaaattaattgggcaaaaggaaatggatcagttagtagtgaaggtaactgtgcttttttttttttttttctttaattagttaatgaaaagtaggtatggtacctctatcaataccgataaaagatctaatcgagaactataatattcgtaacactatgtatggaaatgaggaaattaataataggattttaacataatgaaaagattgccgaccaataaaaaaaaataatattaccatgaatcatgatcatattattcattgtttttttttcaacaagttaaagaaaatgaacagtgagttcatgtatctaagtcatgacgtaacaaaatcactcaataatgtatttagaaaaccaaacatatgtaatatatataaataatatataaaaccaaaagaaaaaaaaagacggaaatatatcaacattttgtttcccaaatttagttttggagttgaacttataaatatgtgcaatatttatataataataacaataggagttgtaaatattcttgttaaaactatctccaatagttacatcattttagtatatttttttacattaatttagcgtaaaactttttatttttggtgctacaaactacgtacggtactaaaatttaaatgtcacaccaaataaatatattttacttaaaaaatttcacattttacattatttacaataataatacataataggtaatttatgatctaacatgaatactgtttacaaattaaataattaatatatgtgaatttaaaatattaaaataatttaagttatattatttaatattagttattgttattttatatttaaatatattatagtgtgttaagtt

SEQ ID NO: 186977 - DNA, 5569 bp, Cannabis indica
tttttttgttgtgtgtgtgtgttgtttgagttaatttttctaaatgtgagtcactttaaaagtaagtagatagcatggtttgaaaatttcatttagtttttgaaaaaatccgtatacttggtgagattacattcttgactaattttaattttgcgatttaaaaagaacaggaaatcataataagtaaatgtacattttggtgtcaaatcaggtaagtttttgggcttcatcttagccaacaagggatagaggccaatcctaaaaagatacatgccttattagacatgtcatctccaaagaagcacaaagatgtgcaaagtctaactgagaaagtagcagttttgagtcgcttcatctctagatcaacgaataagtgcatccctttcttcaacattttgagaaaaaagtcaaaaatttgaatggactaacgagtgtgaagtagcattccagagcctaaaggaacatatgtccaagaccccaatcttgtccaaacctataaaaggggaagatctatacctttacttggcagtttcagaaaacaccatcagtgcgacactgatttgggaggaagacaagccacaaatcctatttactatgttagtaagagaatgataggtgtcgagatccaatacccactaattgaaaagttggccttttattttcttgtctcgtctcgaaaactacacccttacttttatgctcataaagtaaaagtcttcactaaccacctgcttcgccaagtggtccaaaaacccaaatcttctggacaattgctcaaatgggccatggggttgagccaatttgacatccaatatgtccctcgtatttcaatcaaggggcatgctctaacagacttcatcgttgaatgtaacaaaattgagataaacaccgatgctacaaaaatgattgtacccacttggaaggtgtatgtagacggagcagggaatgaaatgggtgggaatagtgttaatatcacttgaaggactaaggctccaaagcacgttgcgtttcaagtttataacgcctcttaaaacaattgccaaccttaattgtgtccttcgtaacatttttttataggttttgtgtatatgccattttatattatttgataatataatttatagattaaaatgtgataaatatattattaggagaataatatgtattggagtgtttggtaaattaattgcataacatatggtttatttaacctacacattgtaatggaaatgagttaaaattctccttaatgtttaatggagcgttacatggcttttttgcatcacgaaggggattaaggcaaggagatcccatgtctcttttaatttttgttttgggaatggaatatatgtctagaattatgaaaaagattggacagaaagctggcttcaagtatcatgacatgtgagaaaataaaattgaatcatcttagttttgctgatgatgtgctcttattctgttatggagactatagcagcgtgatgtatcttcttcagggaattaagcttttctcaatgacatctggcttgttcccaaatgcaaccaaaactgctatatattgcagtaatatgcctaatggggagttaaaaagaattattacagcttctggcttttccaaacaggtactgccttttacatacttaggcattcctattggggctcagaagatctcgagcaaagattgtgcaatcctagctgaaaagatgacagggagaatcagaacatggagtactagacatctttcttttgcgggaagaatagtattgatcaactcagttttaatgtctattcatttttattggagtcaagtgatgctattacctagtaaagtgatcagggaaatagaagctatatgcaaggctttcctatgaaaaaggcaacacatgtttcaaggggctggtgccattgcttgggacacaatgtgccaaagcaagacagttggaggtattggcttcaaaagagtgaaagagtggaacatggctgccatggtgaagtatatttgggctgtagctaaaaaggaagagagcttatgggttaaatgggtgcacacagtgtacatcaaagaaacacaatggtggtgctactcaattcccatacatgggagctggtactggaagaaattagtggcactgaagaaccaacttagctccttggtggatactcaccaattcgaggcaggtcttataacatagcaactggttatgcattattttgccctgttcaggggagattgaggtggagtgagcttgtttggggtaggtttaatctacctaaacatagtgttatactatggattgctatgcatggaaaattgagaacaaaagaacgattgcataggtttggcatcgttgataatgctgattgtgttttttgctgcaatcaagtggaaacaaaagagcatttatttttcaattgtagctggacattacagtgttgtacaggtgtggcacactggcttcaatggaggagttcgaatcttgacttagcaggtataactaggtggattcagagggtgcgaatgagtagattcaaaaggagagtgatggcagctgcccttgctagcctagtttacaatgtttggagaagcagaaatgaattgatatagcaaaacaaaatccccaatgctgaacaggtggtgaatcagattaaaagaaatgtcaaacaaaggctacttcttatttggccaaagaaagtaagcaaggaagatgtaatgtgatttaataatttgtaaatttgtatagatacgcaccgaggcctcccttattgggtgtggtgctcttagtttgtatagaaaatggttttgtgcaatgaatggctgatttccccccaaaaaaaaatttgattactcacttgtaactctttggttgatcataaatttagtgtaacaaaagagatattacacaaaattgattatcggattcaaagctatgataatcagggctggccctgaaatttagtgggctatagggaaaaaattatttttggcccttatttagaaaaaaaatggtatttttcaaaattagcaaaaaaattgtatatttttaaaagggaattttttttttgggcccttggactaggtgggccctaggcacaggcctagcccgcctatgtccagggccaaccctgatgataatatatttgttaggaattagattaatactcatttataggagaagaatgagttagaagacgtttgggattgatttggttcgaaggagattacaaaacttataaattggtatgatgaaaaactgtagcagctgcaacatgtcgcctaaaggtacaaaattgagaaacgttctttgaatgttggggaacgattccaactcttgtataaccatcaaatctttattattaattaatccaatttacacctattaataaccattaaattgttaatgtaaagagttgttatacatttgataaatagtcttagtaataaatattagtttattatttttatttatatacattaaattatttgttatttaaaatttatatgatccttaattttttaataaaaataaattaataaagtttctaaataacattaagcaaatgtacattgcatgcatattgcttgctattatatatttatcaaacactcctatatgtatacaactatacctcatcactattttctttagttaataattctagcttttctttacacaacctcaactcatcttctaacaaactcttctcggagtcgtgtttcgtcacgatccgttgcaaataattaatcatttgatcatcatattctagtttatactccaccataagacgaaattgattagcttccatttctatggtgttcttctccctctgcagcctcaaaattaccgccattgcctccattgctgccgatgcagccgccattctctctttatcaagctcgtttcgagcttttttcgcccgttttctttcaatttttactaattttctcaatgaaattacccgaaattcttcactaagctcacaacacgaattaacttcccgttcttttacatctttatcttcgtactcagcttcattgttgttcaaatcatcacgagtatcattacacaagcaagatacggtgatgttctcatcacgacccttaaaacgacaccgtttatcctttaaattcattgcttcaccgaaaaaacgactcaaaatttgtgtcaagttaagcaagtaacccattcttagaaactttaggcccaacaaaaacattaaaagcagcccaaaaaatccaagaacttgcgaggaaagtccaaacacaaaaaacccacattccaaatctttgttttgggtcagaaattttaagtactccatcaccacacccagaagcctctgcaacaaaattcttcaatacgacacaagaatggaccaaacgacaatcaataaacaaaacacgaccccaaatctgtactgggcatgtaatagtttctttaatttttctttccacactacttataggaaccaaaatattatatagtatagtaatttgtatacaaaaatatagaaaataaaatgtagcatgagatagattcttactcctaaaataaaaacaaaagaagatagatttattagattcttacatggttgagattgagaatggagcttactgataaaattgatataatagggcgatgaaattgagagtgtgtgagaatcagtaatgagtcttggtaatatataaagaagaatattattgtccggaaaagaagtacatatatatatatatggccaatggggaatttggagttaatatattataagtgacaaagaagattttgttgttgtaacttgtgttttctagggtgtaatgttgtttgactaaaaatggactgggagtaggaagataagatatgattggttgtggtgtcaaaagcaaaaatatgatgatgatttggtgttggaaaaaaaatctaataaatttatttggaatatcaaatttccaaaagtttttcctttttctttttagaaaaaaaaatgttaagggaagatttttttttttgtctaattaattttaaaaatagcgtgacctaattaatatatttagatatctacaaattcttccaattattaatttcttaaatatctattctatctatataaagtgtggatactaacggaatttttgatttcatggtattttttaattttttacgttaattttaacagaatatattattatttaacagaatattttttttattaattttataatattattatatatatttgaaaataaaattatgtaaatattttttctttaattttcttcattcatttaaattttttattagttttacacatatatatatatatatataatttttaacaaatatcaaaaaataataaataaatcaaattacctaaactatcatttttttttaattttttttaaaatatacaaaatattcctaaactatacatatatcataagttattcttattaatttcataatttaattctatttaacttttcttaattttatttccctcattgcagagtattcttactacaagaaatgtcacttttaccagcacagttcgctactgcgctggtaaaagtaacttt

SEQ ID NO: 186978 - DNA, 1743 bp, Cannabis indica
aaaaaaagagaaagcttttacaaaaatcgagttaattatgagtaaataccttccaagagccttcccaaaatcggcacatagagacctaatgtaggtccctttggagcatgtaacccgaaaaattagattttgtctgcagagatgtacaccaggaaataaaaattagattgttgaatataatgacattgattattggaaatttgaatagcacattcagctacatgactggtcaagtgattttgcatgatatagtgttgcactaataaacaaaatcacctattttttagcataaatgaaggtgggttgttccacattagatcttgctaaaattattatgtataattaagatcaaggaatcattgtgtgttcgtgtgaaagcacctgtcatctaaactacgttcaatgtcaaatttgaagattgaaatgagtcgtggcgaaagctcaatgctttctcctcttctagctttctcatacaatttctcacctccaacctgtcaaaaaagtaggcaaagtggtaaggaaataagtatgcctataataaaagaggccatttgtgcaaactatctcactgtgaagaggcaaacacaaactccttttttgttctctctcaaaatgcactaatataggtcttcagctataaaagtaaatacataaaataaaaccaataattataagtcccatgctatgaaaatgaaaggccaacgatatatcaacaccgttgcatatcatctgttactgaacagataaatagcacagacacttttaccttaatggcggaaaacattggaggtacttgccagatctcgccacgaaaggttgctgctgctttttttatgtcctcatctttgatgtgctcccaaggttcacgctgaatgacctatataggaaaacaatgctcgagtgaaatctaagaccatgcaaaatcacgagtacaaattgttgttatttaaaagcaaacataccggtgaatcagcatcccaagtagaagtagcttcacctaaacggaaaactccactgtaacccttaaccatagcttgatagctgtagtaaaaaaaaatcaaatataaccctcaatcatagcataatagctgcagtcacaagttttcaatgttacattacaattgatatatgtcaacaaaaattttaactagttgctagataagatgtaatttgctacacttgtttcaaaattccctaaaattcaacttaaacacacaagacaagattcaagattacctatctgccaacttagttgctttaccaacacaaacaattaataaaccagttgccataggatcaagagtcccagcgtgccctacctgtaacaccaccaagcaattaagttagaggagaatatagtgggagttatataaaatcgggcgcaataggcaaaaaagaaacctttttcactttgacaaggcgacgcagctttccacaaaccgtaaatgaagtccatcctgtgttgcaaattcataatttagggtacttcttacttccaggaaatgtgaataacaagcatgcaaaaatcatgaagacatttaaccatgtcatggaatgcagagtatttgaccatgaaagtcacaacaactaaactacttccatttgccagctaaagctgattctgatcaaacactataataagttgaatttgatcaaaaccaatatttatacattgtgtatgttctaatccatttgcccacatggttcaatgacagagaaggcttaaaaattggaatcatatct

SEQ ID NO: 186979 - DNA, 780 bp, Cannabis indica
ggcagattggaatggatagcattgatagagctttctaaagcatgaattctacgagaaagactgttaaatctagcattccagttttttgatgtcatccacgcaagttttctgcttaaggagaaaagtattaagagttaagggaatttgtccagaatgggaatgattccaactacccctaacagtctcataaaaagacggtttcgtgagccagaagttttcaaacatgaaccttttatgtctcggacgaaccatactaacatcattaagggttatcttaagaactctatattccgaaccataaaatcctagatgatagagagtggtatgaggaaaagtatgttgccaaatatgattaacaactccccattcaagcctttcgcacacactgccatgtttccaagtatatttcgagccaatcgggtttagaggcaaaagggaaaatttactaaaaaaactttaaaaatgagtcattgcataagaagggggattagaactactcgatcggtcacttatggataagtaatcattaaagtctcctagaataagccaaggaagtaaaggagcattgtcaaaatgtctttctaatagcaaccaagaatgcattttatctatactataaggagaaccatagtaacacgaaacatgagtacttatattgtcattagaagttataatacaatcaacatgattagaagaggaattcaaaatattaacagatacatctgaagtccacaaaatcaaaacacccccttaatcctattctaggaacttcaaacacat

SEQ ID NO: 186980 - DNA, 6302 bp, Cannabis indica
gtgataagcaataaaatagttcctacgaagagtacctctgtaagaagagagttaatttggtcatctgatgccaagaaacctgaagccaccattactgatggacagggactaacatcatcaaaagccccagctaaattcagattgcactccttaagtttactctgaagaatcctgcacttatgcagtaacttttgcctagcattttcacgctgctcactccgttgtctttcctgtttaagaagtttctgaacaaaagaaaccaccccgaagtgagttgcaggccttactttctaccttatatttctttctttcactaaggatactagttattgacacaacaaagccttcaaattaccacacaagaaagaaagaagaaatatgctgcaataccaaatatcaagaaacttgaatgggaaattttacttttaatagaacataaattacctcagcttctgccttctccttgagggagttactgagctcatcctccaattgtgattgtgaatttcgaagagatttgacttctttaacaaggactttgcggtcagctttggattttgcttccaagtcttcatatcgcttcgacaaaatctcaagctgctccttagaagaatccaattcctgcagcaaaatgtctttatctagatcgattgaacttcttgctgacttcacacatgatttctcatcctgatattatattttgattcatcaagattatttcaaaccattataatgattccacacatagatgaaaaagatcataaaaatgaaacaagataggtagggaaaccttttcagacttcgaactcaattttaactccatttcaaaggacttctgccgaagttcctccatatcccactgcattttggtgaacctttctctctcaatcaatatagcttgctccaggttttctttacccttttgtcgagcagtttcaagttccacttccaaatccttaacctgcacatgtccggttgtgttacgaaaacacaaccaccagcattatgtaagattaaacaatctggtagcatcaagcacaacttcaatatctctcaatacatcattaaatggcaacatcatggatccaaatatttcacacacactcaagagaaaagtaacttgatgtcttgtagaaactagaaagtgacaaattcctgataagaagctaagtgcagccagattcattataaaatttatcaatatcaagacttcaaagacaaattatacgatctccaaggaaaaaaatcatacaacatttcaacaccattagaatctagcaccattttatcaacaagcagtaggtatgtacttaacaacctaaacaaaattggtccaactgcttgaaatcacaaatttagaagtacctttgttgtaaggtagtctttgccagccatttcttgatatagtcttgctataagatcctccatatcagtttttgctgtgactagccttcgctgcattgtcagaaggatcctattcaatttatggcgctgatctaatggaagaactaaccgagcaccacctcctgaagcatgcatttctgagttgccaagagtctccatgctgcttgaaacttcagcacctccaagaaggtcaagagaaccttctccagatgaatttggaatcccggatatagacatttcactacctctaagagaacttgcatcacttcccacactgtcatttgatagcttgcgagcatgagcaattactttattaatctcttgctcagagaaaagatctgttccgttactagataagaatgaagttttagaagcgtttccattatatacattcttccctacaacattgttgaaatgtctggcttgcactttactccgaggaaggccttccaattggtctaaaatagtctgccccataaacaaaccctcgtcgatattagacatgccatactttacaagattttctatcgggcttgtcaaaacctcatccaatgccagatcctccatacccatgtcataactgtcatcccttcctagcctaggagttcccatctcggatacctcataagcagtatcacttccataatctgatgttattgatgaactaccaacaatggcaggcaagcttgactgggtaggcaaatcatgagaattgccttctgaagtctgcggatgtacatcttggaatgctgagaaacatgtaatagaagaacatagatcaagacatttataaggcttttatttctctaagacctagatatatactatttcactgaaagtaaacaatgtgggtataaaagaaaaaggcttagaagtgcacttcatgcaatagaaaatcacatacacgacctagcagcagcttcaagttcaagaaaagatgccacaataacgcttcttgacacatcaatatcagacagaagcttcgtcatccattcctctaaggagcatcttctctgtaacaaaacaaaatatgattaaaatatatatacatacatatatttgtcacgtacatgcatttatctgcatcagcattggtaaagattgctgatcaaagtttgcttgacgatacgcacttcagttatatttcaaagaaaggccaatgaagctaggagaaatggtagtctctcttctaatatcactagttagaacaacaaaattgtccataattttttatttattttttaaactaggatacccacctaagaggaaactatagtaattcctatgtaagtatcccaggaaggactcgaaactcaggccatgtggaacagtgggagcaaaccacatggctgaccatttgagttacccctcttgggtacaagattgtccataattatgtttatgtataaagaccaatatcatcatactctacataataagtttagaaaatacaatgaaacagactccaaattactcctgcttgaataagttaaaaaggcattacctacctcttccaactgagcccgacttctcattcgcagtagccccttgggtggggtcaatgggaaatttttctttggaaacacttttttaagctggccaaaaataaaaaagtaattccctcattaaaagagcaacttcaagaaggaaccaagaaataggaatgtttttttcttcatataactcaagaaagaaagaagtaattcatcacaaccaacaaatttgcgaaccagtatacataaataactaaaccaaaaggcagacttacatcactgaataacttcaagaaatcattgaatcttcgcagaactccacgagttgtagtacttccttctggtgattgcacaccaacatgaactctgtagaactgtcccttggaaatgttagaaaggactttgcaaaagctgacacattggaacttgaatattaacaggttggtttgacgtaaatcacagtgtgctttttctatcaaatccacttacgtttgataaaaattagcaaatttataaaaatccaaaactctatacagaacgggttacacattatgtaaccatagtttgacaataacacacacagcataatctggtaaaactagcaagtagaagttaatcacaaaatatgaacatgaaataatattaacacaaactccacaagataattatgtaagtaccgaaaagcaatgcgaacaatgacaaccaataatcatatatggtgtagtgtttacggacagctctaatgactatactatacttgttagactgactctagtatcagtgttatgcagcctatctccactatcttggaaaggatcatatttgaatcccaaacgatgacataaacaacatctaaccctgatatagaaaaacactggagggtcattcaaatttgagtaccactacaggatctgaatctcttgattttggaaggacaacccaagaaggtatagtaacacagtaactccagccagtgcgagaatcatgaggccaaaccgtgtctcggccattctgcagagagaagtgaagtttaagataaaagataatattaaaaagcaaaaagcaagaagcacgaaacacatatacacactaagtattccaataactcaagcagtgtatgaactgatgagaagccttgcctacaatcccaaaaacattaaatcaaaattggcattaaatgatgccataagaatcacaataaaataggaaaaagaaatacaaatggaaagtgaaaaaccaattaaaactccttcgtaccaatcaaaccattaccgaaatttaatgatcaaatgacgtgttgatcaacgtgtcacttttaaattggttaaacaaacttgtgcacgtacggtaaagacaaatgaacatgactgtcgcttggaatggaaatctagtaaataagtaaaatgctaagtagtaatcaatattctctattcatagagttatacattatacattgttttggagaatatagtaatgaagatatgtgctactacctcccctgtatctgctgccaaactattatctttgctgcaagtaaataaggatgtgaactatttgttctaaaaaatgagcaatcaacataatgagtgaaactagcatcccaagaagtcatatttggtgaacaacagtatgaagcaatataagtcaacgagtgatcagcatcacacttcgaaaatttgagagtaaaaaaatagaacacaaagtagatgatcgatcatacaggaaaggaacaattttattacacacactgaacagtaattgagaacaaaggtgatcaattagcagtgattagaaagtaaaaaaaaaaaaagaaataatttcctagagaaaaatgtacccattttctagggggaggactccaatccatcccaagtggcagtggcgaagtcccatcgtgcctgtgcttcgggggactccgtccctgcattttgtgacctttatccctaaaaattcagactttctatctctaaaattcaagagtaataatcaaatttcgattgcctcgcctcttctctccaagtttcaaattaactattcgatcagtgaaatctgtatgtgtgtagtctgaatcggaagaaaattgggggtgatgaaatctagggttttggtgatcggatcagaaaaactatgtgttgaaacgactgcgtattaattacttttatttattataggcaggcattgcgtgtcatctgcttcgtttggggttccatctcttctctatatatcttattagctaggcttccactctcaccaatgtaaagtagggaccattttcaatcccaacaaagaaacaaaaaacaattgttcaaaactatgtaaataaatatataaggggattcaagttttattgtaagaaggaaagttactatgttaatcttttttctttatataggttgatatttactatactactaactctaaatttttaagaaattttaaataacttattacgttaaaaataacgtttaaataaatcaatataatcaatataataaagaaaaaaaataaaacgttaatatatcacactctaaaatcttttctaaatttatttttctcttcgttatttaattctcctatttttaatattttatcacggtataaattcactaattaatattttactattattttaataaattttccataaaatatctaatataaatcaattaattttttataaaaaaaatacaatacatataatacgtacacgttttattattattttcttattttcattcaaaattaaagaaaagtattagaaccaaaaaagtatctatcccttcctctatatatatacatatatacatatacggatgcactcttaatggatattacccatgaataggtaatattataaaattttgattttttatgaataatttttctatttaattataaaaatttctcatttttacattatatgggctgagattggtccatcagctgaaaaaaaaaataataaaaaaaaggtttttcggcaaaaaaagtgataaaaaagttgaatttgacttaaatatttttgtatataaacatattattgatatagtaaaaaagagtattttttgatatttttctttatttaattagctaaattaagcatacaaattcaaaattttcttttattatccgctaggaccaaaatctgatggtttaatatttttaaaattaatatttattgttaaatttgtttattacctattaataaataatacccattaaaaagtattacatacatatatatcatagtaaaaactaaaaaatatatatcaataagaatagactacgtggtagtaagaattttttaagtttcattctcatattaacttaactcaaattttaatattaacttaatttttttctcattctgataatattaacttaatttttttctcattctgataatat

SEQ ID NO: 186981 - DNA, 3105 bp, Cannabis indica
tatagatgcttgcaccccactggtaggatttatgtagcaagaagtgacacctttaatgaggaagaattcacatacaacaatctctttccttccaattctctgtctacttctcaacccactactgtcattgatcttaatacctattcttttccatagtctcttcctattggtacctcaccctcttcactgcctccaagtcctccaactagtgctcatgatatcagtcttagtattgcttcttcctcacaaagtcctgttccctctattccttcatcactcctcctatttctcatcattctgtcatcacccctatttccccttcatctggtcgttcgttattgattcatgtccctgactcctcctgccttgactcaacccctagctattcagaataatcaccctatggtcacaaggtccaaaacaggtatttacaaaaccaagacctatattgctcaatctgttactgagttagaaccatctacaatcaaataagctcttgctatcctgaatggaaaagagctatggatactcagtttgatgctcttaaaaaaaataagacatggtctttggttccttacatggatggcatgtgtgttatcataaacaaatgagtttatcgaatcaagtacaactcagatgggactatgaacaaatttaaggatcgattagttgcaaaaggctttcaacaaactctagggttggactattttgaaacctttagtccagttgttaaaccatttaccatcaggcttatctttactcttggtaccacatataattaggatatacaacagattgatatcaatgatgcattttaaatggggaccttaatgaaactgtctacatgactcaaccaccatggacactcatcctatttttcctatcatgtatgtaaactaaacaatgcaatttatgggcataaacaagcccctcgtgcttggtttgacaaactaaaatatgctcttgattagtggggatttcataattctaaggcaaatacaagtctatttttcacaaagaaaagtggcaaactaattctacttttcgtgtatgtcgatgatattcttatcacaggtgaagataaaactcagatttccaaagttatctcagatcttcatcattaatttctttgcaacagcggggttctgtacattatttttagggtttgaagtgtttcgaaactcaactggtatttatttaacacaaagcaaatacatcaaagatttattgattaaaactgatctcattgatgttaagccttaacttacacctatgtgttccaatgccagattgactcttgccgcaagaacccctcttgaaaatccaacactatacaaatgtgtcattggtgcctacaatatcttacacttacaagacctgatattaccttctctgtaaatcgactcactaagtttgtcaaagctcccatatcacaccattgggctgaatgtaaaagggtgttgcgttacttagttggcacaatgaatcttggtcttcatttcactccaattactcagattgcgcttcatggtttcactgatgctaactgggctggctgtttaaatgatcaaaagtctacatcaggttattgtatttatcttggcagtaatcttcttagctggtattccaagaagcaaagccttgtagctcgctcaagcacagaatctgagcatcgatctttagctttgtaacaacagagatcatttggctacattccttacttagtgaattacaagttcttcttgcctgttgttctataatttggtgtgataatcttggtgcaagttctttggcctcaaatctagtttatcatgctcacactaaacacattgagattgatcttcatttccttaaagatcaagttattgctcagcagcttgatattcggtatgtagactccagcaatcaaattgcagacattttaaccaaaacattcattaactatttctcaatttgtatttttagcagatgagttgacacttcagttccccaatgtcactagagggggatgttagatatatagaaaaacagttagatagttaaaatttgttttttgtttttgtaactattttctctaaccaattctgatttgattcagctttatctagttgtctttttcaattgtaaaacaaccacaatcgattgctatatataaaagttttcaaggctttcaacaattagttgagccattatatttcatcatcatcttctctcttttttcttttttcttttatcaaaagatcaagttctcttaactctttcacttccaattattggaattatgcgatagaatacaactaagttaatggagatttgaggtggaggatgtcaggacatttcataaaatgatctatgaccatgagagtatctagttttggacaaagttactactaagtcggccagtcttatccacgccaaagagcatgtgctgaaggcgaattcattgcagaacaagcagtggaagaacctttggcgtactaaaattcatgaacggcacaagatcttttgatgttttatcatcaatgaggtcctcccaactagaggaatactagtagtgaggattttcaacagtcattttgatgtgaattccttctgtgtacaactgagccaacatagcatatcttcctttcatgtgctgctgcaaaggctttatggttctccacttcttgggggattgtttctgatctgctgaaccttcaaagtgcaaggagtggctaaatttatttggcaactggacagatcacatctatgtcaaatacaagaatgtcctcttggggaagaaactgcagatgtaggaatatctttgctggaccaatcccccaacaagaaaggtgaatgccaatttcgatgcaggctccaactctatttatgcttagctcagtgggacaggcagaggatggctactgcagccactgtacaaggtggttgctattccctttacggggagaagcttgtgcagccactgctcccaagaaccaccctatgtccttattgaaagagaccttaagacatttcagctttcaagagattgtccacctgggagatcagtagaatctatgctccccacaattctgctatatgggcttcgttgtgtaatatttcttg

SEQ ID NO: 186982 - DNA, 5274 bp, Cannabis indica
atatttaatatattttagatgatcattgttatttgctcttgttattgttacagtactcaaactaaacctaagaggaaaggtggcccagggggactaaacaaactttgtggtgtttcaccagaacttcagactattgttggccagcctgctcttccaaggactgaggttcagattcatagatcgtatttttttgttagtttttggtttctacttcaagttatatgattttgattgtgttccattatctttttctttagatagttaagcaactgtgggcttacataaggaggaataatctccaagatcctagtaacaaaaggaaaataatatgcaatgatgagctgcgattggtatttgagacggactgtactgatatgttcaaaatgaacaaattacttgctaaacatattatacctctcgaaccttcaagtacgtatgttttatagttgctcaatgctcattgatttctgtgtgtttcaaatatgtatgaaacaccatatacttagactaatgaatttgcttgttttttacgctcttagaaactcctaagaaggctaaggtggaggttgagtctggtgcaaagggcacagattctggtccttctgtgattgtatctgaagaacttgcaaagttttttggtgttggtggaagggaaatgctccagtcagaggttttaagacgtatctgggaatacattaaggtcaacaatcttgaggtatgcaccatactttctcaccactctaaaaagaaggaaaacaagggatatagaatggccctgcttgcagagtttgaatatccctctaaatttccatggaaatctcttattgagctctctttttgtttgattgttttatatttttaccacttcctttcacgtagttgaccttaatatagcacttcatcagtgaaactttcagttgtcaattgactcctgatttagtgtgaagatgttgccgtttggaacagctgtgctgactatttttctgtttttgctgggacatatgtaggatcctttaaaccccatggctataatatgtgattcaaagcttcaagagctctttggttgtgatagcatctccacactggggatgccagaggctttggcacgcagccatatatgccaaaaaccttgattggctgttttctggtaagaactgtatctaattcgtttattttatttttgagttgagaaaaggaaaattaccatttagctactgcatgccaagactttgttgtcttatatgatggttttccagcctatcatttaaccaggtggtttctgtaaaagttctcaactttttgtccaaaaaaaattgatgggatgtctgttttgtttgcagttgcagatcagttggtatttgctcgttgatatcgatgatagggaagctatagttatctatataatgtatgaggtcgtggccaatatttgttagtggcgccatggatctagggttatggattgactgactagttaggttagaatgacccgtggaaatttctaacacctgtaaaaaagggcagaagtagaaggaatggttgaagaaaaaaacacaaagtatcatgtatttagttgttattagctcattttcagtgttgaatgatgtttatttatttattttgtttcaatggtctgcagcttacaagttctgtacgtattttcatggttttttatttatgtataggccttgttcttacaataccccatgtaaggatataattccccttgttaaatacgttcattatttttttatacaaaatggggatcggatgtcttcccccaagttcgcataccccccctcataccatcttgagttaacctgagttggttgatcattatgcattatatgcaatactattttttttttttcgaaaccttgtactgtattgaaaacagtatatattatttataaaatatattttttttataagacatgaaacaaaaagatgaatttacaaaggcttattcaagtttctgtattaattatatgtcaaatcgccatatgtatgtaaattaacaaagacaattaacacttgtatttgtgaggtttgataatttgtgatctagtgcgacacaactttagaataatgtgccaattcattagtggacatgtgctgttcagaaccacgacttttctattatgtggttcttttgtcccgtgacctctcccacaaggctaggttcacatgacaaactaaacataataacaaaacatttaaaaatcctatgaagctctcctataaataatattgtcgaatgtaagcccctcagagtcttagtttaggcagatagttatacaataaaatggccaagagcggttctaaagtagtggtctattggatacttctggctattttcagcatgatatcattgttggggagtaccagtgctgtagttttgtgcaacattgaatccagcaagcttgcagtatgcctacctgcattgcaaggtaaatcaccggatgagcaatgttgtgctctaattcaccaggtcaacttgtcgtgtctttgtaagtacaagtctgcacttcctgcattcggtgtcgaccctgcacgagctgttgaactgcctcagaaatgtggcctgaaagcaccacgggaatgccaaggtaatgttactaaatgctcataattgttgcatttgaaagattatcttatttcttattgttacatacatacatgagcatggtatgagctagtatggactttggctttatgtcgtgtctctaatcattagttttttttttatatccagtggcttgaagcatcagagagaaacagctgaaaggaatttgcccgttggaataattcagtgtcgcacgattgtgatctcttgcattttatcttatttaataaaagtgattccttgtcaagattaaattttgcgaaatcaacttttaaagacgatgtttgtctaatgtaatattttcttcatgagcgaccttgtaatgttatgcgatctggttgtggatgccattcaggtccatactagtatttttggtacatggcgtagacacgacactagtactatgcttaagcgtagtgccttgaacatattctcttattaacgcaagagattaaaatatacatctctctcaatttacaaaaactttcaacataaggagcgttcataatagcaaaatgataaaaagttcaaccccatctaagaaaatacccaagtcactttctgggctcatagtcggaaacaaaaggaactaaaaatttggtaccacttcgcatacataactgcttcagtgtttacctcagtacttttctgttatgcccttgaatcagtcatcttttgtttggacttaaactagatgctcatgatactcaagtcattcacttatgttggcagttgatgttcccgagggccaccaaagatgggtctcatgtaagcatcatcaaaccttctccagtaggagtgaatagtgtatacaggcctttccattaacatggtaagactattcttagctcgaaggatgttggttgtggcagattcttcaaaggagagcaaaggaggggtcatgtcctctataaggtcttttgacctttgtccattaatgacgttagtcatgtgatggggaagaagacagtttattagtggcttagttagaagaccaaatacctgtgattagcaattttgaggtaaatataattcatgcccaaggaaatttcagttcataaggaacaaagtaaaattgctcacttaccactgtactgaaaagaacaacaattatggtgattgtgatcattgaagcattgatggggtccgaagtaacaccataaaatgtgaacttcacaagccaaaagcatcaaaatgatcagaattatagtaatcaaatgaattagaagatagttcatgtacaagttttgtttaatgtaagcaaagcacacaccttttcaaatgctaaagctatagaaacagctcccctcataagtccagcccaccatatgacgatctgaagaggtagcattacattagtacgatcatttaattttggtacctaattgtaatcaaacttgtgattaacaagtgactgaccatgtgtttgaatgtgagattagatactccatcagaatgcgatttgttcatgtaattggaaagaacagagagagggaaaacgaatgcagcacggccaagcgacaccagtaagataagtgtactccaaatgcttatggaagtactaaaactgcaaccaaagagaagtttatttaaaataaaatacaattgaactacaatagtgtaactaataggtactaactgtgacttgaaaaaagtactttaacttagacatcttccacttctccatgtcaagagcatccattcccacataaagaaatatgaatgtctctgcaacaaatgacatcatagcaaatacattcctgagtagacaaaaaccaaaaatcagattggtgtgtgaaataattgttaggtagaaatagaaggaaaacccagcaacataatctgctcaaccatacctggttgtgattctagaagtttctgctacgttatgccatgcatagtgagacatgagaataccgcaaaagaaaactgtaagtattccactcagattgaacagctacaaaagagaaataattgagatggtaaaaactgtacaagtattgataagataataagataatataaatcttatcataggcatattcaataatgttttcacctcagccaacatgtacgatagataagccattaacaccatcaaggcaatttcacgaatactcgaatgtctgtaagcaaaacaaatacaaaagctgatttatatatacacaatcatgtatgaattaatactaactgaaaactaccagacactaaaacatttgaagaaatgccaaattctggccatttccttttgctaatctttaacagaggtagtcaacttgccttccaaagcagagggccttaaggacatatgacgtcaaaagtccagactggaagcaaataaacactatcagacagcagaaaatgctgagccaagtatttacaaactactagtaataataaggaactaatcaatggaaaagtacgtatgtacacttaccatgattccgagaactgtgcttgtgaaaaacaaatagagaaaatcacccaagacacggaaaacagtcttgctactaaaccgagtaatatcaatcttttgtactgcattgaatagaacaactgatgttgcatcattcaccactccttccccaaatactaagctgtatagtaatggggtttcatcttgatgaagcacctattacatatatatttat

SEQ ID NO: 186983 - DNA, 2918 bp, Cannabis indica
ttgtgtgacaattgacataaattgcaggggtttggtttatgcattgtcactttgaagtccatttgagttggggtctaagattagcgtggatagtccaagatgggaagctccctaatcagaagctgcttcctccaccgtcggatctacaaatgttgacctttatttggatggtgactcatggaggacctgttaactgatttataatacatattatatatgatgagagcgcggcagtccttttcccacttcctagtttttttttttttttttttttgagtttaaaaatcttttttatttttctatgattttgttttcctatatattctcttttttggtaacagagtgcttgtgaaattttctactgcgaaatccttttccagagtcctccaatattaaattgaataataataataaaaataataaaagggaataatattaaggagagcttgtgctctacccggcatgaatatcagagctagttgtttgttgttgtaattgctaaagtaagtataataaacatattcatgaagcaatgcttctgatttatttctagctcttcctctagctatctcatattttctttttcacctcataaaatatatgtatacataatcatacaaatttaattgagtgtaaaaaatatatatacacattaaagttaaacctataaaaatgagagaacaagataaattacaacatatggctccccattcatgttactaccagtaccaattactctagctagaattggtcgaagaaaagtatacctgtcagtggatcatgcatgatctctgaacaatctagttcatggatgatgtttgatgacataaaacgtgatataaatatgttataatgtggtattatatatattatatatatatgataataataatttaaagaaggtaatagggcaggggtttaattggctttatttgaagaagatgcgtttttgtggaaatgggtagagaaaacatggcagagaagccacgttaacgttgaagtccagctctttttctcaaatgggaaaaggtggcttccatttccaatgcagatccatatttctgccccaatgtcttattatattgtcactttccccaacagcttaattacacgaatctctctcctcctcttctttcactctctcattaattaaaccaatatcaaagtaaaaaataaaaacccaattatttctactatatactacgcacccatcaaatttataacgaaaaatttatattccatagaagaaaattaattcaaatatcaagaaaaatacatacatgataacatgaatgatcgtgatcttaacacattgatacaatttaaattagtctttttatttttacactttaaattagttttttttatggaaatctacaaaataactaatgaaacaatttaaattgtaattaaaatagcaacttaaataaaaataatatatgaattaattcttttgtgtaacaaagttaaatagaaaaaaagctctctcgttctcatttgaaaaatcctacttacaaattacaactaactaatattttctcatgatactgatcatatatattcaaaaaaatacaaaaagaaacaaactaaaaccaccaaaaaagaaaaaagaaaagaaaaagcgaaatgagatcaacccaccaggactaagataagatgatatatataatatcaagaatcattcccatgtttgtgccagcaaacgagcatagcaacacaccgtctcattatgtaaaatctggccttttgctcctttgcaaggctactacacttgcgccctattgaagatgaagatgaagatgatgaagtagaactactaccgctactactactactattgttactgtttggcttctgagaataacttcgagaaagtgagctcttttgtgaaaaacttcgaagaagaggtgactttgaagaagtgcttcttgtggagctacttctaccaaacccaattgaagaactcccttctcttttagatggcttccatttctcatccatttatatttttttatatattatttgtttctcctttgtaggaagtaatggctaattaagatagatagtactacttctctggacctctgtgtgtaatttctgcctctccaatgtgtttaatttaagagtgaaagagatagaacggagtaatgaggtatagtgctagaggaaagatatgattgagaatgggacattagtaagaggtggggtattgctatatatattaatatataatcctggtagaataatagtgcttgctatttagagagagtactgtgtggccaaatcttctatatataacacttttttttttacctcacctttttttctttcctatttattttattttttaaactttgagtgaagagatttgaacaatgcagtaatcttttaagtttaaaagagaattgggagatatgatatgcttacatcatcattgatattaatcatgatggtaatgatgtgtggaaaaaatgataaattccaaatgcatcaaaataataaaaacaaagtaaggaaattatactgtattttacttttaatttcaatttgcttatattctctatttcaatctctccacttaaatttgaataaactttttgctttttctatcactttctcagactcacttctccttcagagactcacttctccttcacaactaactctctttcccaaacacacacacctctctcttacacatatttataaagaaaaaataaacttaagctccaagacactttaaatttggtcactaagactcattttttaaacaattaataattactaaaatgaaaaaaatacaacttcataaaatataaaacaaatttcatttgagtcaaactctaacaatctccactttgactcaaattctctaaactcacaactccaactacctataaaaatttatttatatatat

SEQ ID NO: 186984 - DNA, 5845 bp, Cannabis indica
tttgtcacaatttgcgagcattgttatagggcactaaggtgtctagtactactatgagataatattttataattagttagcaactttttataatttttattaaagtaaaataagagggagccagtattgaatcttaccaacagtgatattacaactcgcaaggcactaatgtgacaactcctaagcagtcatgtcattattttatttttcacttgaaatagtttagggactatattcaactgggtaaaacattcaaggaggacaataatacataatttatagttggggagaatagaattcctaaataaccattaattattattccaattttagagtattagtaataggagggcaaatttggcaaaaaagttttcaaaatgccacgtaagcacaataataaaggcttaaagaagaagaagatgaaagtgttgtgtgaagccaaaaagaagatatggattgggtgtgaagtgtgtgaagctgtaaaaggattaggctatttggaaaattgagtgagtgaatgagtcattggcttaactctctcttccatggcttcattcctttctttatctctacccaaactcaccaccaccaacaacaacaacttcataataaaagctacaacatccacaactactactcctacagacacccttaatgagaaattcagcagaaaaggcatcaagttcacagaaaacgacaacaaaatccctgtcgttgagttaacagtcagaaatggtagctcagtgagtcttcaaatacctgaagctcatgtcacttcatacaagcctaaggtgtattggaaagatgatggttttgaagaggttttgtacactcataccactcctactaaaaaaaccaaaggaggcattgctttaattcttaatgaagtctctaatcctcctcttaataagcccactaatgtctctactagattctctactactcctaaggccgcgcccgccacatcatcactcctcgctaactcccaatggagtgtcaaaaacgtcgattcagatgctatcgacgctcttcaggtacataactagatgatgttagagtgtctcacgttgaactaaacttacttatatgactttattaatttacttagttttgagttataatgatcataatcaaagtttcttaaattatagcctcgaataaatatttgggtaaaaataacaaattgtaaaatgcatgaactagcaaatctataatcttctaaattcaacatatttatcaaacctttcttaacaaataaaccatatatcaattttttttgtgtgattattattaaattctaacatatttaaatattcacaatgtattctaaatcgggataatcacacaaaatagtgaaatactattttttgttaaaaaaattacaattttacattcaatttttttttatatatatttttacagtattttataaaaataacatgaaaacaacaagaactacataaaagtaatatgaaaataacatccaaacaacaataaaaaaataaaaaaataaaatacaaataacaacaaatttacaagagtacaacataaaaatattgtactttctgtaaataaaattataaaaatcgtaaaaatatttaaaattccatacaaccatatttttgtaattttattgttgtttttgtgtatttacaaaataatcccttctaaatttaacatatttatcaaaccatttttcttaacaaataaattctaaaaatcattttttttgtgtgtggttattattatgtatataggtggaattgagcagcagtagtggaagtttggacataacatatgtggtgacactatatccactaagcctagccacagcagtgatagtgaaaaacaatggtccaaagccaattacaatgactaatgccatacttagtcattttaagttcaaaaaaagaaacaaggctgccattcaaggcttaagaacatgttcttactccactcatcctcctttgtcttcccctttcgagctcttgtctcctgccgaggccatgaagcccgacgactcttctgattggttttctgagcctgaccctaaacccggagtttggactcaacaagatgttccttttaccattttgaaaaatagacttagtagagtctatgctgctcatcctgaagagaggaagaaagttttttataacactcctccttcgaagtatgaaatacttgatcaggtaaaatattagagttttatcaacatgtacaaaagtgtggttatacctatgagacattaattgcccttgtttaaaaatgtttggcaaagttaatgatatatgcaccaaaatattacagtcagtctgatatgatagtatttttcagctattgtcataattattgtgttgatattttttttgtagggaaaagagttgttttatagaatcataaggatgggatttgaggacatatacgtgtcaagccccggttcgttccatgaaaaatatgggaaagagtattttgcatgcactggacctgcttctattctagtacctgtaattgttaaacctggtgaagattggagaggagctcaggtcattgagcatgataatttgtaattacatttcaaatttttacatataataagttttgtttatatgaaaatattgattgttcatatgatgacctcttcaacttttgcaactcttcttgcacattgtccataatcactagtataaaactctacatagcactctaataataagataaattgtctcaaattttcatatttaacagtgagaagagaacaaaaaagattgtttatcttgctagcaatcttcaagactgattctcttgattgctctagatacaactataagatttaaagccatgctgactaaggttattttcaatactgattttgatagattgttgatgagtcttaccttcatttatgccaccattttgagtttaatgaattgtataaaaaaaagtctctcatctgaccgaatgaggaagagttctttatgcgagaaccttcgattggtgggaggcaatctatgaagattctcactttttcatacgagcgattcccctctttcggtaagaatccagtatcttagcaaataatggggtgtttgttatgcagggttgggttcattttagtcaaggatttatgtttgtgtcacttttgtttttgggataatctcaaactctttaaacactaatggaactgcaaagaatgaatataacagtaaaatgagaatcaaatccatcatagcaaagatagctaccaataaactttctgattaataatttaaatagaagtgtcttaaagatacaaagacctttttcttaatcctaaactaaaaatcttgagagagatttttgttatctggaacttaataatctgctgctcctaagtcctaattaaaaaaagttttactaagttggaacaagataatgtgaatcaaattcattctgctgctctctaatccaaacaagcagaacaaatagtgccagtaacacaattggtagagccaaaaccagctttaatgataacttcgggcgagttttctgaacacagaactgagactgagtttgaatttgatcttcagcttgaggttgagtttgagttccagctacagcttcaacttgaggttgagttccagctagagctggagcttgattttcggtcttgtaatcctgagataacttatcagattcttgctctgcaacattagcagcaatgtaatcagttgatgacactgattcagtgtctccttgtaagtcctcaccatttgctatatggccatagtttacatcctgtgaatgtgaagaagtatgattttggtcaaatcttgaagctggactccaatcgaaatcactcagagatatacttctgtttctgagccttcttatggcttgtctatcacaacaatctgagttcatgtgatcaggatcttgaagagattgaacaagcttccttggagtttgtaagatcatgctgtcaacattaatcgaattgtgtgacctctgaagccaaaagaaagaacacaaaaatgccaactttgttagcgataccttgaaaaagctagaactgaaactgaagattgaaaaagcaatgcaagtgaaacttactaggggactgtttgttgtgcttcttgatattccaattcgcgaatttctctgcaagaaaccagcaaactcctctgaatctccattgttaccacaaccatgatcggtacaatgctcagacaatgtgtttgagattgagctttcccttgcaatctgtgaaaaaagaccatctttaagagacacatcaactcctccattttctaaactccacaactttcggttcacactcctacgatcataatcagacatctgagatgattggattgttgaattcggtgactcagcccacgattcgacaaaggaatcaagggtctgtgattctggagactctgatgcaggagattgatcatcagaggttgacaagctcctttgttctcttctactatttgaacctgtgactgaagcaggacttttctcgaatttcgaagctttatcagctgaaattctcctcgcagtttgcaaagcttcaaatgctgctcctctaacaaaagccatctgatcagactgacacttctccatctcttcgattatcaatccaagctctgaacagatactccatggatctaaccacctcattaaaaaagtttaatcatttgaatcgctgacaaacgcttttgggaattggcctcatcaactcctgcttttcaatatctgtaatccagcatgtattaatagtctagcataaggttcaacacagcagcattgcgtttcgctaaagcataaccaaacccatgtgagcatttgtctgagtagacttgtcctccaaagcccccgaaacaacctgacaaaccttgttaaccatctcattagaagcaaaccgccaattatcagaatccacaagagctttcaagcaaagggcagctccagaagtgagactctctcgagctcccaaaagggcatccgaaagaggcttgcaaagcgaatgaataatgcgcctcttcttgtcctcaggagtggttggatcaattccatatcgagcaatagctggaaccaccttagaacatgcttgttggagaggaaaagaccctgcacttgaagtcaaggtcttgataatggtagccataatgctgtcaatcaaaggaactattttgacaccatgaacccgagcaagaacttcatacaatgaaatcgtgcattcaccagacaaaccgatttctttagtttgagaaacttgtgcaaggaacaatggaattgcctttgaatccaaatctttcacataagttttgagggctttcattgctgatctacgactatcagcatctttatcaagatttgccaactctctctttagaattggacttaaactccttcccattgttaacctgaacaaccccaagaaaatggtttagtcaaaaaacttgagatctaattcatttacaaataaaagcaatttctttgtcatcttcaaaagctgaaacaaacttttaatagagctattcaacattttgaaaagaaaaaaaaaatcaaacatagaacacattttgaatcattatgcttagaaagtaccaaaaaaaaatttaaaaatcagattttggacaaaaaatacattatcccacaaatgttataaactgtaaagcccaatgcattttcccaaaaaagaaaaaaaacattgttgcataaaccaagattgcttatatcgttaaccacatcatcaatccaatagattcggattaaaaaaggcagaaaaaaaaattaaaaattcaatcttttcatgaaaatctcaagcgaaatttatagcatttcaacaaaaattagc

SEQ ID NO: 186985 - DNA, 3992 bp, Cannabis indica
ttttaaaaaaaaaaagagaataaggcaaataatattgtgtgttgttacttgttgcagatacaaagagaacatgcatttgttttgttgtgttgtgttgtgttgtaatacaaaaagagaacatgtattattgttattttattatatattttcaaatcctactttagtttaacaattattagtataaaacaaccacaatttttctcacttaaacaaatgataaacaaattcactccttattttattctctctcaactctctctttctttatgcaattaagcttgtatatctctctcttttacagtaatcaaattaagtttatctagttattatttctttataattataactcacaaaaaattggaattttggaccaaaaacaagctcatcttcactagtaataatcaaatgctaggacagctagtaagaataaccaaaagaagatttggtatgtatgtatttataaagaaaaggaaacaattgaggatagagatataaatagtgccttggacaaaaggttgccgtcccaattcacaaaaaataaagtgtttgacttcaactttgtattaaatgcagtacctaacttttagtaaataattgggcattgaatttatgacaattcattaattaaagtaaatgaattgacttgaccaatccaagaaggaagattaattagtacttgactctgttactgagagtgaaacgagttgaagtgatttgaagggtaagtaagtttaattagggagatgttgtttgtttgtttgttagtagaaagaggtatatggtggggttttgtttgtttgtgtttattttggccggcaatcacaactcatgcaagctaatttatatgccatttggtacgtattatacatattattatggagtcatcaaactttgaccaaaattccatttggagtgtaaacttactaagcacaattaatctctaaatagtaaataaatacccttttgttttgttttgattgattctttaaccaacaaagaaaaaaggtggttaacctctaaatgacttgtttgttatactccatttcggttttaaggtgaaatgaaatagcattatattccaactgatgatttggacaacataactaatctgctcattattacataaggatagactttttttttttttttttttcttgaataataatgcatatgtggtggatgtcgtagacatacaaaagtatattagaacattttagaaaatttaacacaaatgatatcacttgatttatgtcatcatctttttccaattcataagtacaaaataacataaccatcaactttttaaagcaaaattaaataataaaattggggtgcttatctataatgtagcagacttttgatttatttaattggatgaaaagcacaaaaatgagtatcaactttcacctttgcagtgattggaaatattttaaaatcatttgccagagtaagatgctcttatattctttaaaaaacaaaaatgctcccattcgagtaatatatctcaaaagttaaactagaaatttattcttagtgatgcgacattatctccaatcaatttatatgaaaattatgtagctgagaaagatgctataacatcttatggcatccaacgaaaatgacatctttgctgttccaattttgaattgatggcagctacaaagaaaatgagctttcaatatcacaaacatcaatctatcccagaagtgtaaggcttatgaaataaaaaaaaaaaacacaaccatacagaaaaccaatcagtataaagtgacacaaaaaaaagtgttttcttttattattatggtattgaaccaatgaatttaaggtaaaattttcatttcttatttaacatatgacatatgaactttcagcaacagcctcatttggtgagaagttatagtcaatctataccatcatctagaaaactaaaatagaagtatagaactgagacacaattgaccttacaaccaagcaattttcacaggcagattttatgtcggactctgcaaacgcaacgaacctctcttgctctgttactggctttagcagcttcactacccttgtagacagggatagaacccacatcagatattcgtatattgtcccacaagaggatgcaagatctaattcatctattcccactcaaaggtaatggtaacttccctgatagcacacttcaaagacgctatcggaacatgaagaaaactgaacaacagtcacgcagtaacttgtctaactcttccaaccaagagccattagatcaccttgttttagttcaatatgcatcccgagcctgaatttaaaataaatggaaacagttagatattgatgtaaaactggaatgaaagtaagagcaatcatgatataagttattatgaaaacattaatcacccaagatctgttggaagccggtaaccaccaatacgtacacgctttaatgcatgaatctggattgagtaaagacataagaagtcagcataaataggattgaaaataactaaacataaaaataaaactgttccagtgacagatatgacaagtcaataatgatatgcataaaaacaagtccaggaacaaacatacaggaaagtaaagattggagcatggaagactaaatatcttttatatttttgcaaaaaaagaaaagaaaggtcacatgtccatgactgacctcctcccaaatttattcggaaccctcctttgtggcggaggaaatccttggtaacaaacatgaaacttggggaaacagaaaaataaagaaacacatactctaatataatacagtataaggcagacgactagatatcattgaacatggagtaaatatgtccaagcaaggaacaacaaagatgatggttgtttcaacataatcttcactcactatttgtaatttcattcttttaatggcagtccgttcttgttatttaataaggctccttggttcaaaaaattgaattaaaaaaaaaaatgatccccttcatgttaaagaggttcattataaaatgatgttttttcactcgaacgcatagttcttctcaattcttctttcataaattaaaactgacctcaagtccagcatttttcacaagttctcgtacttcatggttccttccatcatgaacctgcagaaatttagagagtcaatgagaattttgaatgtagacatgggagtttaatgggttcatggttctgttcatcatgaatccattaaactcccaaattctatagatggaatccaagccaaacaaaggtcttttgtatgacacgagtccagcttgcacattcttattctctatttctattttacagttcataagcatcctttaacttataaagaaaatcttggcagattcaaaattaatttattgtagcactaatttggagtgatactagtccgatattatcagaaaggaccagaccagtagcattgaaaatattataacacatgatgaagaatttagtttaaaaattgagaccacaagaagaaaaatcccttaaatcacccacattcagcaaaataaaaaagtgatttgagaaagtaaaactacctacagcaagcaaatattgtttttgtataaggggaaacatacattacctggaactggattagactagaagcaagtgctagaaaacatatcatcaaaacagttttgaaaaacttagtaaaatgtcataccactacacgtagacgagatcttggtctatctggctgatcaggtagtagctcaactgaatctgggatacaacgaacaccatcgatgactgttccctcactgatagctatcaagtgcttcttgccaactttgccttcaattgttgcaatatacctaagatagcaaacacaagaagttaataattatacacatgcaactaaaaattacttatacccagaaacatattgttgacatgtacaagtaaagataaaagaacaaatcagcattgaaatctgcaacaaaatatgcagcttcgtactttctgacttctgtatatac

SEQ ID NO: 186986 - DNA, 5174 bp, Cannabis indica
tgatgaacatcccagttttgatcatcatcacccttttctactccaacttccttatcttctcagtcactacagcttactcttctacccatccatatacaccacttgaaaatattgttctgaattgtggatcctcaaacgaccaaacctcagaagatggccgagagtggattggagatgaacactctaagtttgcccaaatacaagaacaacctcatagcactaccaaatcaaattacgcctccacagccgaatctcaaccaaaatccggcccaaatgtccccttcatcaacgctcgtatatttagctccccatttacatacagctttccagtcactcctggtccaaaatttgtccgtttatacttctacccaattctgtacaaggatttcgactcctccaaggcctacttcgacgtcaaaaccgattccatcacttttcttaaaaacttcagtgcatatctcgttgccaaaagtttgaaccaagattctttcgttagagagttctgcttcaacgtcgtggagtcaaatcaaccactgaacttgacctttgttcctcaatcatcggataattattcatatgcttttatcaatggaattgagatcgtttcaatgccaaccgacctctactacggagtggaagatagtatagaagcgccgaaattcgttggccaaaataaaaatccatttataatctatgatagccttgcacttgaaactattgcgagaatgaatatgggagggagatccatacctggaaatgatgacactggcatgtataggaaatggtctgatggtaattcaatcgtggtagccgataataatcatcgccctataaatcctcgtgatttctctaaatcaatagaatacaccaaaataagaaactacactgcccctgctgaggtctaccagagtgctctgtcaacgggaaatgatactacattcaaaagtctcactaatttgacttgtcgcttacgtgttgatagaggatttagctatctggttaggctccatttttgtgagtttcaagatttcatcactacaatcaaagacaggtcatttaatatctatctcgataatctggctgctgtgttaaattttaatataattgaaagaagcgaaggtaatggtgttccgatttaccgagactacgtggtgaatattttcgatggagatgatcttttcattgttctacaaccaagtgtaaagtattctcaatatcctttcactatcttgaatggggttgaagtgtttaaaataagcaagagtggaaatctagctggacctaaccctgaatcaatccaaacagagccaccatcaaatgttacaagaaaattgaacaagaagaagaaatcgaccttatttatagcacttgggtgtggcatgggccttatcgtaattttgttatgtataatttgcttggtagttttgaggagagtaaagaagacaaaatcccgtaaaaacttcaacaaaggaaaatccaacatatcgaaagcttcatcactacctgaagaaatttgtcgtcgtttcacgctctccgagattaaaacagcaaccacgactttgacgatgcctttgtgataggtaagggtgggtttgggaatggttttccgaggagttatcgacggaggtttagaagttgcggtaaaacgtctcaatcaaggttcaagccaaggggcacgcgagttcgtcacggagattaagatgctctctcagcttcgctacgtccatttggtttctttgatcggttactgcgacgaagagggtgagatgatccttgtctatgagtatgtagcaaatgggacgctccgggatcacatttacggatcggacaatgacccgcttacgtggaagcagaggcttgagatatgtgtaggagcggctcgtgggctcaactaccttcattcgggagtgaaagatacgattatccatcgtgatgtgaagacagcaaatattctgctggatgataattgggttgctaaggttgcagatttcggattatccaaacttggtaggagtgatagtactgcggtgagtactttagttaaaggaacattcgggtatttggatccggaatatgcccggaatcaaaagttgacagacaaatccgatgtgttttcttttggagtagtactgtttgaagtattatgcgctaggaaacctgtagatgtgaagttggatgacgctcaaagaaacttggcgtattgggcaaaaacgtgtataagtgaagggacaattcaaaacataatcgatccgtttttgatgggtaagattgcaccagaatgtttcaaaaaatttgtagagatcgcacagagttgtgtgcgtgatcagagaatcgaacggcctacaatgcgtgatgtgatggaaaatttggagtttactttgatgctacaagaacaagctgacactgctaatcaggggataaatcccgatggtgtatattcttatcctgaggtgtcattccgtgcttccgattatattcttccaaggtacgatgcaacagttttagactcgacgtcgttgggttcaaacactactggattaagctttcttactatggaaactgaacttaattcggcgaatatgttctctgagtccgtttctagtcactaaaatatgtaagatttgattagtatatggatattaatacaatatattgtggctcgtacgagatcgtactgttggtcctagatatatagtttgacgttgttctacttcgagtatgagtttgtcaatttgcatctgtttgataatattctcctccattttcacatatttatatgcgcatcctattgcggaatgaaaagaaagacgaattgaattttattgaattaaaaattgaagattacaggaaggaacagagtacatatatatactacaggccgaggagtctaaccaacacaatcccaactaacttccctagatattagtaactaacttaactaaacagtatcaagaattagttacggtagtttagagaaaatagggaaacaaatctagttgtaagaaactgaagctagagaatgagctacaatatagactaagcttagctaaagcctttaatacatcctaatctgaagttgcaaaatataactatttataatctgtatctatatgacatgatatatttatggggaaccattcaatgtacggatggggaatgactttctcccatgatcatggccattgattccgtttaatattcatctaacgggtgggaagattttggctattgaaattattgaactgatacaattacgtgctaagttgtagggcaccctatcaaacatctctcagtttctctgtccttacaaccgataaccattctttaaggttattagacccattcaagaaaaaaactgtgtttagtcaattttttttttgaaaattgatatgcaatttcattgattaacaataagtttgattacaagatcagaagatacaattgttggaactaaaaccattccaaacgttctctttatctgttcctaatgtcttttttgcaaggttatgagctaatgtatttttatcccttggaatataatcaagctttacatcaggaaaaggtaataaagaggataccatattttgaactaaatcagaaagagaagatctatctctccacttatgcttgattttgttaacaagaacttgatagtctgaccaaactgaagccacagggaactttactgcatcagaccatagtaaagccttaagaagtgcacgagcttcagcatgaatgggagatagagcaccgggtatagatgagtaacaaccagcaacaacatcacccctgctattttgaatgactgcaccaaagccaagcctcatagaatccttgttgacagctgcatcaatacttagagcatattttccaagtggaggcaaagaagacaactctgaaactaatgcaaaggtgtcatgagtagcaatattagaactctctgagcacttaataatgctactggaaaagaaacaaatccagactttctacatcttcaataggagcttttgttagtattgaatagtgcattgttcctcccattccagatagtccaaataataccaaaaaatacagggagatcctccttacttaaactgtcaaaaactgctaaaaaaaagtctttaatatcaaaacgtatattattattataaaaatgagaaaatctggtatgattccaaataggaaccgctctggaacactctaggagtgcatgagtgacggtgtcaatgtgattagagcaaagagagcaatacgggttgttaagtatatttcttttggaaaggttaaaggaggtaggaagaatatgcttgaaggccttccaaatgaaatgcttgatcttaggggggatgttaagagtccaggattggatgaggaaggagaagaaatgtgagaacaagcaagagagctagcaagatgataggcagaattgacagttaggacactaggagaatggtaaccccaaataagagaatcatctcgagagtggtcaacaggaatctttaggatagcatggacagtgtcatctatgaagtatgtgtgcattttatcaagatcccagactccaagatcattgataaagaaggggacggtattcttaggaggatggatattatctttaaaagtgataactctatgaccaggagtccagttaccatgaagggtggaaattgatttgccattccccactttccaaacaagcccatgtttaaggagatcccttccccataagagactattccatgagtaagaagggaaatggcctttagaagcattaaggaaattattttctttaaaatacctagccttaagaagtgtaacgccctgatccacaaggacgccacatgcgtgtgtttttattaattagtttataataataacaattaaactaacggtttaagaaaagtgtgatttaattaaaaaaattaagaaaataatttaaattataacttaaacttttcttacaaaataccactagattcggggatccccttggttacaaacttttactaagtagtacaaaatcagcttgttacaaaatgttgttacatattcaaaacataacaaaaagaaggtcatgtccactgaaaaccaaagcatagcgggttgatatgtacattgtcgggagacctctgactcatgactggtccagtttcccctttcccttacctgcacca

SEQ ID NO: 186987 - DNA, 1702 bp, Cannabis indica
ctctctctctctctctctctctctctctctctctctctctctctctctcgcttcggttcaaagaaaaataaaggaaaaaccaaaattttcttcttccaaattcatatcagaacttaaaaattctcagcagaattcttcaagtgttagcgctaatcaaaggtaagctcttctctcttagtctctttgatttctctaggttaaagctaggttaagtttatagttttgcagtgttggttctgttcaaattgtttgatgttaaattaagtttcccaactttaatttgagttatatagggttgttagttgagtttttttgcagcttttggttgagggattattgagttcatgagaactcaagcttgagctctaatgtcagattttgttgggtggtgttttgtgctgtttgagttgtgttattgtgtatacgctaatatgctattctgtaaagtttggttgtatttggataagatttatttgggttgtgatgtttaaaactcgatgttttggatggcagattgttttctcaaaaacagtctactatttttcgtgacagtgttcaagaaaaacggcctaccgtttttcaaaggacttccccccaaaatcttatttctatgtgttttctcgatatttaaggtattgccacgctatttattaataagaaaactttcagttttgagtttaagacctagtacgtgtgtaacgtcctactagaataagcgtgttattatgcttttctttagtgttgtgcacgcctttgctaattaaagagtttaatgaaaaatgtgaatatttaaaactttcttaaataatataacttttgaaataaacataatttttataaatctgagatccctttaaaatacgcataagtctacaaaatacttccgttacaaaagttgtatttatatgactattaaaaaggtgagcctaaattgtcctgaagaccctgaacgctccaggtctaaccgtcttgatatgtaaaatcttcaccattaactttacactcgtcccagtttgatcctagatcatacctacacatacacgtaataaatgtgagtcaacaaactcagtaagaaaagcataatcattaacataaatatatatccagatcgtaactaggcgcccatacacctactcacaatttggtaactgggtcaagaacatccacgacaagtatgactaactgcgaatccagcctatactcagtactctagtcgtactgatgttgtagcaaatagttcatactatctggaagactagcatatatctgttcgcatctcggtgtaactctacatacacatcactgatatactgatatgatattttgatggctactgacatgcacattaaacatgtatacatatatgcaaataattctactaatcttggcttaattttgaatgcaagcgtgccggtaactcggagtagaaactgctactcgacgatttatggccctaagtcacaatttacatgaaactggtaagtgatccgctaaatcactatcatggatttaaacttgaaactaaaggtttctctatcgataaatggcatgactaaaccttacatatcaagaaactcgctaaaaatgagatttcgagaaaagaaccccaaaaaatggcatgtcgtttctgtgaaaatggtaggcttctgggttgttctgcctggaaaaagggtaggtcgtcaagatgattttctcgaaattc

SEQ ID NO: 186988 - DNA, 2181 bp, Cannabis indica
aaaaggaggttacgtaacatacaattatctagtaaaattcctcatcagttaatttttcttgacatgagcggtgtagtagttagacaagaggtatttgtttttcgcctattttacacaagaaagatagtaaacttagttgcccactacccctccttatctgaacacccccaccccacactttcatatgctctcttaactacttgaaagttgtctgttctgggagtaatttttttcattcttatgctttgtaacatcttagctcctatattgttgttacttcattcaatactgattaatgatttttgcttgtttaagctaataatattttttccttgaattatctagattgaagatcaaggtcttggcaacagcttctttccttttctagttgcggaggaggatgtttgttcagaaatccgcgtgcttgagagtgtactggaatatactgaaagccatgcagttgtaggcggaattggaaaaccagaatcttacaatcaagcaatggattttattcacgaaatgggctggcttctacatagaagtcagttgagatctcgattgggtgaattggatcctaatgcagaacccttctctttaaagcgtttcaagtggattatggaattttctgtggaccatgattggtgtgctgtggtaagaaaactactggacattctaattgatggaagtataggtgaaggagaggatcgttcccttgaccttgcattatctgaaataggtcttcttcacagggctgtgagaagaaatagtaaggctttagtagaagccctcttgaaatatgcccctaaggatttatcaaagttagaatctgaagaaaaatcggctactcatggtcccagctccaacttcttatttagacccgatgtcgcaggcccgggaggtttaactccgcttcacattgcagctggaaaagatggttcagaggatgtactagatgcattaaccagtgatcctggaatggtaaaatttatcgacttaatccatgtatacaattattctaaaaaaagaaataaatccacatataaacttactggtcttcaattatcacccacacaatatacttttggcactttgtgggatcaccatattattctatatggatcttcagatgctatcactacacgagaaaccatactctatttttccttttgtttttaaaagtgaaattgatgatgggatatttccaaacatcatcttgaggacatttcactatttttctcattttgaattttattagtctgaatgcttaagttttgcctatgattgtgaaactcaagtatgctagttcacttgtaggtttgttgtacttatgttatgatcatcttcttcatatcatttcaacatttagtttgctaataatggtaacctggttggtattacaggtgggaattgaagcctggaagagtgctcgtgacagcacaggctctacacccgaagattatgcgcgcttgcgaggccattacacctacatccgccttatccaaaggaaaattaacaagaattctggaagtgggcacgtagtggttgacattcctggtgatcaaaagcactgtggcgcaaaccagaagcaaaatgagttggccaacaccaccacggccaccaccacctttgagataggaaggtctgagcagagacgtattcagcgtccgtgcggactttgtgatcgaaaactggcatacggtacaagccgtagatccgtggtgtataggcctgcaatgctctcaatggttgcaatcgctgcagtctgtgtctgcgtagcccttctttttaagagctctcctgaagtgttgtatgtattccagccattcaggtgggaaatgttggagtttggaacaagctgaggaatggttctcctcctcgcctcccttatataatatatgttatatttatatatatcgtagaaagctgttgtttgtttgttgtacgcgttgtagactgtcataaaaaaaaaaaaaaaaaaaaaggaaatcgaggtttggtttggtgtagaacgaagctatgatttggatacaataatgttaattaatgacatattttaataatactaatttattatttgtgcaactttcgatatgttctctttgttgtttctttgcttttcacttttatctttctaaatttgagattttgatcaatatttatattaggagtgttcgcggtgcg

SEQ ID NO: 186989 - DNA, 1380 bp, Cannabis indica
caagtaaactaactataagaaaccatcgtaagataagcaaagcaaaataaaaaaacttatctcatgtaagaaactccaaaagtgaccttgaaaacctccataaatagtcaccaagtaaaacaaataaaacaaaacaaaaaaataccatactataacgtaacatacacaaacataaaaaaaccaaataaacttaaattactattaattaataaatttaaataattaaccaacatatactataaataattaatttcacagtaatactaacttttataaaatttaaaattcatattaacaccgtataaaaataactaactttaagatttgaaaaaagattctcaaaaatcaaaataagttaaaaggaaaaagaaaaaaaaaaaccaataaaaataatagttattgtaattacaatctagtttcttacttgattatttttaagaaaatataaaaagttaaaataaactactaaatgataaattagattaaaaactttactatgaaaaactagagaaaacttagctaataatttttttttaaaaaaaatactaataattgactacaaataattgagaggatgagaataatcaaataaaaatattctttgcaaatgtgttattcaatgttcgttttgcacatttattggctggtcttataagtgggtctctgtgacttattaggggcactttacacacatagttctatagtatatgtatgtttgtctacaattgaattaaaatgaaaatttgaatttatatacaaatatttagtgcatattaaattttttgagcacaagcgtcgattggaaaaatagtcaactaactctgaatcaaataatcactgattaataaccaataaagagatagaaataataaataaatagaaaaaaattaggatttatagaggttagacccccttgtatataagtaatgatttattccccttttagttgtattgattgtgagataataccgtccaaatcactaaggaagacagattgaatccaaatcatggattggcctattcctacaaaagtagcggagctgcgttcatttttgggattggctaattattatcggaagttcattaaggggtactcaaagaaggtgagtgctctcactgatctccttaaaaggatcagaaatgacactggtctgaaaaatgcaatgaagcgtttgagaagctcaagatagcagtgtcttcggaactgatattaaagttgcctgactttaatcttccattcaaagttcaaacagatgcatccgaccgtgcattgggtggagtactggtacaggacggtcatctgatagcttttgagactcgaaagttaaaagatgctgaataaagatattctgcccacgagaaggagatggctgcggtagt

SEQ ID NO: 186990 - DNA, 3197 bp, Cannabis indica
aattataaaaatatgttaatacgaaattttttctatttttagagattgaatttttttatttacaaaaatacgaacttcaataaactgttcaatattatttttttagatattttataatttatttagagtcattaatttctcgctgttttttagttattttcttattttatgctaaaaaaactgtattctagtaaatttaaaactttaaaatcgtattttgtaaaaataaaaacttgagacggtaaaattgtaaataaagcataagaaataaacatttttggaaaacccctataatatagggaaatttacaaaatactagaattttggttaatatttacaaaaatactgtcacacgaaaatattttcaaaaatactgtatttttataaaacaccagtaaaacacaaagcagaataactcaaaacaatagtagaacatcagtaaaacaccaatagaacaccagtgaaaacttaacacagtatactgcagtatgaaacttataaaaaaaacacagtaaaaaagtaaaaaaatgacaaaagttagtataccatgtaaatttcccaaaatatataccaaatttgtaacacccttttaaattggtaacttttcacatgaatatcataacaaaatgcgatcatttcttctacagcttttcacatttgctgatagatttagaggcttatatgacgattctatccctaatgccaagaatttctatacctcctcaggctattctgtaagtaaattttctttgaacaaacaaacataataacatttttgttcaatgttttctaacttagttaccactttttctttttcttcttgttttggtttaggatgagttgttatgggctgcagcatggctttatagagcaacaaatgaagaaaactacttgaaatatgtagtggacaatgctgtgtatatgggtggaacagggtggtcagtgaaagagttctcttgggataacaagtatgctggtgtacaaatccttctcactaaggtaaaaattcacaacattaacaaatatgtattggcttgatttgattatggtcttttcatgttttgaaaatactaatgttgataggaataatttgattcactaatttaacagattttgttggagggaaaagttggtagtgcctacacttctacactaaagcaatatcaagccaaagctgactactttgcttgtgctatgctccaaaagaatggtggctacaatgcccacttaactcctggttagagtccaaatctcgacacaaaatgctctctagatgtcattttagagtcctagttagttgggtttttaaaaactgtttttaggcttctgaagctccaaaagcactttaaattaccaataaattttaacttttagctctataaaattcttttaacaaacaccaactttagtaattttatcaaaaccttacataaatttatcaaaagattttaatttggcctgtattttttatggtgttaaggtggattgttgtatgtgcgtgaatggaacaacatgcaatatgccacttcagctgcatttcttctagcagtgtactcagacactctagacgcaaaaaatgctaagctcacttgcccagatggccaagctcaacctaaagagcttctcaactttgctaaatcacaggtacaatatccaatagttttaacatttggttacactaatcaaatataactatttagattgacccttttcatgtttttgacacaggctgattatattcttggtaaaaatccaaaatccataagctacttagtagggtatggatcaaaatatcctatccatgtacaccacaggggttcctccataccttctgtgtacaattaccactctatggttggatgtgttcaaggatttgattcatggtaccgaagatcggaggctaatccaaatatcatctatggagcccttgtaggaggtccagacaagaacgatggcttttcggatgacagatctaactatgaacaaaccgagccaacactctctgccggtggccctcttttaggccttttctctaagttgcaaattgcctttaatggaatcccaagtgagtatacttatattatattaatgactaatgcaaatgaatttcaaagatttacatgttgaaaatcatatctaataatactttaccatatttcaggttctaaatatagagacacaccaagttcctacaaaccaacaccaaccccaaaaccaaaaccaacaccaagtaagaatctttacaaaagcttcatcaaattgattggattataaaccagtttctaactataagtattcaaatgatttttcagctacatattctcagagtgagacaacagaaacaaaccaaaacaacagtaagtactaactaaaagtctaaaacaagtgacaagcagttttgaacaatttatacatactaaacttttgtgtatatattcttacagatgcaactcccatcaagttagttcactcaataaccaacacatggaatgttggacataaaacatattacagacacaatgtaatgataaaaaacatatcaaagaagaagataacaagtctcaagcttgagattcaaaaccttacagggtcattgtggggtctttctcaaagtaaagaaaagaacatttattacttccctcaatggatcaaagtactcaaaccaggagaacagtgcaattttgtctatgtacaaggtggtcctcaagccaaagttaccattataagttaccattagccaatttaccaaccaactaaaggaagaaaaataaaaacaagcatagaaatgattttgctttctattttcacctttggttggaattatatagtataaaatttaattttctttgagtaacattacttatgtctacaacagttgaaaaactgataggaaggacaaaaccgatgtagattttgtagaaaaaattacccttaaattctcagaccttaatttttcttcatcttaatatttcgttttgttatataataaaaaaaaatgtactgtgaaatataaacgagtaacaaaaaatttgccaaaatatgatctctgcattatagattatactagctccacttgacaatttcatacataaaacatataaataaattaatactcaaaatatttggatgaaactccaaaaactaacaacattttgtgacataggtgtaccaagtccagaaaggaaaaaaaaaaaaaa

SEQ ID NO: 186991 - DNA, 3581 bp, Cannabis indica
ttaggttacatgaatttataatatatattaatacatttttataataataattgctctttagtcatcttatttactatactatgggaaaagttggtgtccttttcttgaaaatcatagaaaaagaaaggaagaggagttcataagggtgggttggttggctttcttattgccgttttagttaataaggccatgagacttaagtgggcatgattcctggctggaattaagaatcaaaatcccattaaaatgtaatgattatggctaaaaagaacagctaaataatagaaacaacataaataaaataaagtaaatagtactccaaaaagaaattaagcttccatgaaagtggaactgtttttgtacatggactaattcaaagtctctatgcataatattaaacaaacagaaaaaataaaataaaaaagaagtaaacataaaattaaacataatgttaacctaaaataagttgacaattaacttttagttgtccctagaaagagaaagatcacaaaaacagttcttgtacatctccatgaaaggaccaagcgattgaattgctgctacatgaagagcctatatagcattggtttctggccctcaaagttttcattgttcaagattattgcaccattgtttgtgtcctgccacccattttgggcacttggggctaaaatattgggataggaccctggagttcaagagttcaacaatgggtgtaaacttaacgcaacggggtgtcttgtactgattaatggaagcccctaaacttatggcataatccatgagcttatcaaaagtaccaggctcaacgatttttatctcaagaggaccaattgacttgtccgagacacgaccttggcggtaaacactattgagagactcctcagtagtcaaacaacagtcttcaaacaccgaaggtggaataggtgttgagccttttagactaagttcccagaagagcacgtagtgacctggaattgttgtcgtgtcagcatagctagtgtactcagacacagttgcgtcaaacggcaccaaatggctcaccgcattcttaaccgcgttttgaagctcaacctcatcggtcttgtccgagtcaatgctcaaaaccacattttttctacatatgaagttaaattgaggtgccttgttcttaaaaccagcaacttttagcacatcaccaactctgtatcggtaaagtcctgtaaaaataacattaacccagatgagattatgaaaatgattcaatgcaaaactaaattaagaaaatgttactggatttagttttacctgcatatgtggtgacaacgagttcatattcttggccaagtttgacgtcaataagatccacgagttcaagctgttctttctcagtgagctgggatttggccacagggagggagttagtggtgaccccattaagattgttcctgtggaccggcaggaattcaaagtaggccatggttggaattaaggtgtaggagacatcgctgggcttgcagagcgggttaagattgacaccaaagtagcactctgaagaagcgtacatagtgcagaccagagggagcccattgctgtagtaatcaagcgttgggatgtactgtgacatggtcccagtcacaataacatccacatacttggtgttgggccacagcctagttataatcccttgccatgactccttacgacactccgtttcaatgaaatccgcaagttttgggtctggctggttcagaattcttcccacggcttcacggacagtggggtctgtgatttgtgggttaagtgtccctgttcggatgtcctcacagacagccggccaatgcttctccaagaaccgtatggccctgatgaagcctgaggcgaacactgccccaactcgaaccacttccttgttttggcagagaccacagaggagttgggagtacatgctttggtaagagtcagagcagagaatggtttcgtttgggcttgtgtagttggtgtaagggtcgtatggtctatcagtgaaatggctacttttgtagtagctggttaggaccggtctagccaccaagcctccgggtgtcttcgattcagattttatgaacaagaagtacattcctttgcctttttctaagttagggatgtattggctgagtacaggcatcaacaggctataaagtagtgaccttcttcccatttcttcatcaattgttggcatcaattttctctccccacctgaggtgccagagctgtttatatcaccaaaaaaatgaggacccattagcaaaaacaacattaagaacagcttcatatgattcaaaacataattaaaaatctagtccgtatgattaagtgtagttttgtgtttcactagtatgtctgacaaagacaattcaaaaagcaatcttataatacaaagctcaaaaatctggtggctttatatattttatgttatgtgtacgtatgaataaggaccttgtcaagaactctgaaatgggcttggaacagaggataggtgaggtatcaccattggctatacgattgatatcaggttggatgtcctcataggtgatgaccggggtgacctttttgaaggtctcacggtcagtgcggccattaaggccatggcgcctcaagtactcgacttgggcattgcgagagagaatttcagctaggacacgtttttgtacttcatcagcgtgtgaagtgacatcttcgataaactcaagggccttggagttcttctcctcgaggttgtagctctcgccggtatgttttggcaagttgtttggagcttcaggcatggttcttttttttgggtggggttgttctctcttcctttgttttttcttaggagagggagagagggagaggtgtgtttatagtttgtgtgggagaaagagaaagattttacaaatataagagagaagatgattttaggtgtgggggaaaaagaaagagagaagtgggtttatatagagccgaaggttgcctatcctgagcttaacctcacagggattaggaagtaaaccaacagtgtcataaaggggcattattggaaatatacagaaattttctcacctttttttttctgctgaaataaaattttctcacttggtatatcattctgtttgcccttacagaacatgcttatatgacacagaagcatatggacttaaactttccatacattcatggtcaaattagcaactcttctttcaatattagaatttacatcttcttatttaggttatagaaaagagaaaagaaaaactaattaatactagatattataacataaaagaccaacttatttattcttacacgtatacttattatttgccaactaactcttacaaacctaaatcgtggacttatcacattataagttttttctatctgtgatcaattatattgaacattagtagtttcaagttagctatgatacagtcccctccccattttaagaaaaaagtgaactatgttctacaatagaaaatgttatcggtaaggaagcttcatgttagattattaatttattgacactatttgcttttgtaaactataaaataggaacgaaaataataataaataaaaaa

SEQ ID NO: 186992 - DNA, 2588 bp, Cannabis indica
tccatggatggtttttagttttcttaagtagttgaaagagaaatgttgaggggttggcatactgttattggtgcatttcaatatcaggtctcacatatttatattaataaatgatatagagaatcgctaacaaattataaagcgcctcatcggtatggtgttgggctgctctagttgaaatgatgtatttttcacttgccgtacatggcaaaaggttgatgcatagaatttggatgatttcttagtgcagatttgcttaaagagatcagtagatgctataaatttgcttggctaattctatggtgatacacatggagatgtatatgtttaattggctttatttctctcttattgtttgtgcagagttttgataaaaagaagaatggaagattcagattagatgattttatatctctttgtatattcttgcaatcagctcggtaagtttctctcacagatacatactttttatggtaaaaaagaacaaaacttgcttgtgcataaaatgaattttataaccacaatagtctgggcagttggcattgtctttctctttaattaaaatacatacgttgttccacaatctcgatcatataaatgcgtttggcttcaagtgaaactcttgaacatgtacaattttatcaaatagaccagttgaaaatgtttcacaaactcagtttctcttgttgttttgttcgttgcagtaatatgtttgattcatttgatactgctaagcagggtcgggttactcttgatcttaaccaatttgtatattgcagtgagtatttcttttaatcttttttaacagcataaacacatggattttgttgattatttatgttatataaatatataaatcatcgtgttgatatcattgttttatattcagctgcgaattgtaggatatgaaatcattgcacatttattggtgtcttccattctctacagtatcgaaggaaattattgtagtatgcatatgtttgcagttaagttatttttaacattgttttcaaaagattatatattgttttatgtaattattcaatttacaaaaagaaaattatagtatcctattatattatatgttaagacattcaaaatttatagaaagattttccaagaattggtatgatatacttattttttggtcgagaatttaactaaacaaaaaataattgtattgctataagcgattattatttttaaagtggggattttctcaatgtggaaagtaagaataggatgtcttttgtttagaaaagtatgttgtgggatagagaagttatcaatgtgggaactaggagaattggtgatggttgtatgatcaacctgctaattttattttttttggagaatggccagtgaaatgagagatttgttagacataccttttgagatgttgagttgagacatgagaagtttcaaccaaagaagataagttattccctttgctttatttgtagatgttacgatatctactttcctaatatagtaaaagtttgagtaatgacaagcaactttgtcaaaacctcttgaggtatgttcttgtacttcagattggttcaatcctattctcaacaaattggacttttaagtgtgtttagtatgagagttagacttaatatgaatgagaatatcaacttaagaatctatgtttccaaatccttcattttagctttatttgatggttaaattattctagtacttgatttttatgtactcttaatctaaacaccctttaacattagtacactactgcttccaagtccaaataacataacaaattttagggttggatattcgatccaatctaatatttttctccttatagatttagaaaattatcatctgatctgatctaattagatatcaaaatctaatccaattattaattggattgaattggttttttaattggatatttaattacatacctaattttaattattaatataaaaatatgaagaaaaaaatacgtaaaaactaaatatcaccatttatttatttatgtttaatactccataaaaatattattgctactagtgtaatgcaaataaaagtttaaaataagtaaaacaacaacattatcaagtaataaaataaaataaaataaaataaaacaaaaaaaatcaaatattacaaattcaacacacaagaaatctactaaaattaaaattaaaatatatatttttattatacataataaatataaataatttttttgaatatatatcaatgtaatagtattggactggtttttaattagattttgagaatgacattcaataaccgattcaatccaactagaatctaacttttaacattaaattcaatccaaatgtaattgaatatctaattttttgtaattggattggattggatattgtccaccttaacaaacaccctttaatgggtagaatttaatattaaccctaattaaatctttaacttgtatttgttggtttgtgctacaggtattatattggatttttaagtaaaaatacttggtacttttagaggtaggaatagaataattatgggtgctaaaaatgcactggctcatgaatgaacatgatttcttatttatt

SEQ ID NO: 186993 - DNA, 1628 bp, Cannabis indica
aaaaaaaaaataaataataatcagactcccaaaataaaattaagaataatcaaacaaacatatgagaaaaactgaaaccaaaaacataaagaaagaaaatctcgacaacccattacaagaatcagtccaatgcttggtgtgatttccttttccgggaaaatattagtttgtttttgctgcaaatataaaactaccccttcaatccttatatgaccaaataaaatatatattatataaatatataaaaaatggtgtttagtttgggggtgtttgtgtgtgtatctgttatctctcttatttttaagttggttaaaagattcaggcttttcaaataaaatcacgggagaaagggatctcctcccttctcatttatgactaatcctatttttttcactttaatttaatttaattataattgttttgtttatctactttgtacataatgaatgactctattgacaatgactctatactttggtgaacataacatatctttgtttctgtcttaataattgctctttatatattgtcaaagaaataaaatttcccatacagaagcaggaaaaaaacaaaattaaattatgcagtttttctgtttcctttcacacaaattttaaaaaaattatgtaaggacatgcatccatttctttatcagtatcatcagtttctaattataatttttttttgtaccttaaccattaatatcataataaaaataaaaatgcagtcaaacatatctcatttcacattccataatattgatgtatatttatggcaaagttttgattggttctacatttttagagttcatatttcactaaaaaaaatgatttattgtcgaaagagaaaaggtgatttttgataagtatttaataaacatttgcaaagcaatatttgttgattatacttaacgacaaactagagtatgatcaacattacttacaaagtaaacggattattttataaaagtaactttaaatataacaattttacaaattaaaattgccagcatataatttttttattatatagtcatttgttcatctatcgtttgtggtttgacaatttgccacaacaaaaaaaataggaatgacctttcggcaagaaaaaaaaatcaaacgaataggaatgaaataaaacaaacatagaatcctttatttatttatttttgcaaatatgaaaataataatggtagctagacaaatttctcattgttagtaaacagaaaattcaaatttggccgataccctaataaaatctaaattaatttcttttggattgataatattttaaataaatatttgattttgtttgtaaattttttattggtagtgtagcgtcgttgtggtaatttttcaagtagtaaaaggtaatagccctggaagttcatttattttcattttgaattatgctcccaaaactttcctttcacgagaagattgcctaaatttttcagtgtgcggagaaggagccaacaaaagtgggaaagcaattatgttgtggaacgtgtataggtaaagggcaaatatgttatgcatgctgatataatataatataacatattatttatttatttattgtatatatactcactctaactaagaactaaaactaatacacaaccgtca

SEQ ID NO: 186994 - DNA, 2101 bp, Cannabis indica
tagttactgtggaagaaaaagaacatcccacacctggatgttctaaaaatgattggctactgatttaatctgtttcatgtattttgatcataatgatgacataattagtatgtcagaacataaatagtttcacttaaaacatgtacaatttcactgtttaaatttgtcaaataatgtaaggcgattattcgttcaattactcggcaatcagtaagcataccttagctattttcagagatgtttcttttccccaccggagaaatagaagctttggtgcttcaacatctaacttttgctcaacttgctatgtgcctatggctcataacctagtagaatttgtacttaaagatgattggttccaggtataaacaatttccatttatactattgagtttgaggtacctttttagccaagttcttcagctgccacagaagtaaggggtcaatgaatgtgttatgcaacaacacgttgactgaaaaaaatgaaagatgtaccttggcagcaagagatctaatcactccttttgcaactttggttttctcagcttcctcctgagctgtcactgttgcatctctcagctgccttgatgtccttttcagttctgcttctaaattttcagatttgcaggtaaggtcttctacctacatatcaaattcccattggaactagctatagttaattacagcataaatctccatttcctgccatggaatcacacatggccctcaaaccgccaaactttttaaacaacagaaaatcgtaatacaagacattctaatgtgatggaaagatcatccatcaattttctattattattgagatcaaacataaaccaagtgaaagcggtatgcccactaaaagtacctatagtaacgtttagtttgatcaatatagatagaacgagatcaagtaatgtactttatgtttattctattattttcatgcattttcctgtcactttgcatggtgttcatagcagtgtgacataatttgcaaggaacttttgtaacataacaagacttacctgtgcccttaatatatttatttcctgagagatactctcttctttttggtttgagacatcaatagtgctttctgaatgatcatgactagtaagggttgaagtaattgactctaaataagctggacttgatcttcttgaagcaagagctttttctcgaagaaccaatctcggtctaggaataaaaggagagcgtgcctttggtttttcaaatgttgtgactgattcactgctgaaacattcatttgaaatgggactgaaagttcctttgttggtctgtgggctaagagccagtttagatgagtcaaaagaagcagggcgccgatgaaaaggtccatggtttggagttcctttctcagaaacagcactaatattccgagacagacttctgcttgaatttgacccaaattcagtgaccctcattaatttggtaaagcaatcatcacagacatgataaggtttcatagtattaggagccaaagcggcttttacagacttgttactgctgcatgctttacagaacacaaggccacaattgtagcagtgatgtcgctttcttctaaagccaaatggattgcggcaacctgaacatatggaatggtcagcaccagacatccactcatgaagacagatgacagccgtaaaattggagccgcataccactttctttacttgtttatcttttaaagctttaacaagtgtaggattcttcttgtcttctttgtctccatggcctagttgaccatttcttcccattccccaagtgtaaacctctgctttagagctcaaaactgcaacatgatgagaaccacaagctatctcttcgatgcatctgtttttgatattaccttctaccttaataggaaccttgtaagcactctcatgaatacaagattgcccaaaatcagcacttcccattgtataaacttgtcctgaggtagttagagcgatggttatgacatgaccacaagccacttgacaaaagtttgctttatctaacacagttacacgagatggagagagtctatgtattttatcaccatgcccaagttggcctttatccccatctccccaagtaa

SEQ ID NO: 186995 - DNA, 709 bp, Cannabis indica
agggagtttgcactaaagcacttgcctcatgatccgctgtttcagctggttaatttcccttctgaatttattgagagtgccaatgttcatccgattgccatttagctgacatatttttgcattaataggtttccaagctttatgaagttgtgcctccagttctcacagaattaggcaaggtaattgatgatccatcttttacttgggccaaaattatttatttagaaaaggattcataatgaattgcgaaaaaggattcatcacgaattgtaaaaagaattcataatgaaaaattaagcatctttctgaattttctgtggacaccaatagcttaaaaaagccatgtacatggatgttgatactgcactcttaatatttgctgaaactagtgatatgatgactgatcatacttggggaatgtcttgttctttgtaggttaagaacccgtggcccaatgttgatgcccacagtggggtcctgctgaactatttcggtctaacggaagcaaggtatgttttaaatggtgcctagagtttttctgttttgtggtttgttattataatgtatctattcttaattttgttaggtatttcactgttcttttcggtgtttcaaggagtattggaatttgttctcaggtttgtgctgttctctatatctctacattcattgacagaaatatttgattatccatacatatacatgcatt

SEQ ID NO: 186996 - DNA, 5813 bp, Cannabis indica
atgcaaaaaatagttataatttttctaaaggccctaaatagaaaactaccccacatgaaaattttgctatatatatagccatgtgtgtactattgaataaaaaacgaagataaagaactccaagcaaaagtagaataaagagttcatggtcctcataaaaggattctatctaccaaaggcagaatttatgtaaatgaatggtacactacacagaatgtggtgataaaaagattctgcaaagcattttcttgttggttaattggtcgaaaaatatactatgataatctaaaagtgcaaattgttaattacaatatgcaccctcgaccacttttcctctttgtcatattctttctttttaacttagtggcatttagttgagaggaatgaacatataagaacgagaatccagtaaaatttaaaatatataaaagaaattgataaaaaaatcattaaattttttctcatattacatcagaatgatcttttcttccattttaaaatagaataatcattccaccaaaatagtggaatgagtatttcattagaatgacatttcaatactttaaaatgtcaccaaacaaaagaaatgaaaatttgttaaggcctcttatctttcaatgtgggattagtgaaaatcgaaacacttttactttgtaattgaaaatgaaagctaaagcttttcaacgtgtaaaagttaagagattgaatcgaatgtatgatgcatttatgcttgccttttattataggtacaatctttaaaaagtaaagcaaattataaaaatcatagagcacaactgacatagaaaacttaaaaaatggaaaccatttccagcatgaaatgtctaaagtacaaccgtgttcatggtgttagtcatcatagtcatgaactcatccatgtcgaccataccgtccccatccgcatcaactgctctcaccattcgacggcaatcatcaaggctgcaatgctctcccaacctcctaagtacatttaaaacctcctctggactaatctttccatcaccattaacatcgaatgtccgaaaagcactatgtatgtcagttgttctaaccccacctcctttcttgtgtgcttccacaaactccttgaaacttataaagccatccccatcaagatcagctacctgaaaaatctttgaaacttctgcagctgtgttttgcttacctagtgctttcagaaccgatctgtactcttgctgagatatctttccatctttgttggagtcgaatttgtcaaaaactagtttcagctcatcctgttttggcatgaaagtaggcactaaccccgaattctgcctgtcacgagagaacaaccgacttggcttctgcaataactttctcttagagatgttatactggaaatcaaggaagcttatcttcgacatttctccgacgtgttcttggttggtagatgtatgaaactgctgaaaccaaactgggatatcaagttaaaataatttaaaactatatatacagaacctgaggcatatttataggctgcagagaatgaattaaataaacgttctgatgctttagtcaattggaattttgcaatatctgaggttgacattgattcctcatcaacttgtggcaacaagtatgtcaaatagaatcttaggacataatgaacaagataaggtaaagaataataataaaagtttgtagaagcaaagaaaggaatacattctttgccaaagctaaaaaagaattgcctacaaactttgctatcctgttctcctaactctgcctaaggagacggttgtcaagggctataataaatatatataaagctaactttcatgaagagagaagaaaagaaaaacagagaagattacatttcaccaagatgattgcacaataccgagttgcgaaaaattaaacaataaataaaaattctactgttctgggtcacgatggatccagatcctccattacttctatgtccttgcgagctgtaaacttctgaacatatcctgtagttatcaaccaatcagtatcttgtgaaaataacacaattaagttacaaaacaaaatcctatttacactcagttacacaaaaggaaattatcatagaaaatatccaacaaccttaagctaattgtgttaaatgtaacgaaactaactctttattatgtaacaaagcaacaactaacaagccctcgtggacaaatctgttcctttcactttgtgggggaacaattttcaacttagctcatccctataattaccaagaaatcattatgttcttacttagttttttcctcaataaaccttcagttgagaaatctaataaacagaatcgcagggtgattgtatatgccaagattcattcaaggagtaatctttctttattccaccatttcataaaattagctgtaaattgagctatagaaacagcacacaaaaaacatagacaattatattgaaattttggtgaaaataaagagagcaaagcaataccaattccaaggcaaggaatgcatttgcagagaacctgttttcctcttttattataataactaacatatcctgaaccttggcaacttctacattttccagtccattcatatactacttctttacaatcctacaattttaaacaaaatcataatagttaaataagagaactaaaaagactatatttgataccactttttggggaaaaattgaaacctcaattttgggatcgcattggaggcggcgttcaatctcgtccgccgtgaccggagaagaatcgggataagtcatgggaagcggaagagcatcatcatcatcagcaagatagctttctccactacgtgaccacttcttctccttggcattcaccttaatcccgccattaaaacctcctcgcttctgcacgccgtccatggacgcacctccgtcggagccgataaaaccaattccagctccggcgacgtcggcgacgaatggatactggaccaatctcgggaacgagggggcagttggaatgtctccggcgagaggtcggcatcggcgcgggagtggtcggaggagtggaaggcgattggggttagtagtggataagaagaaggaggtagggtttgaagcaaacattcagggaagatgaaaatgagaatgaagttgaatttggataagtctgtaagtatggagaatgttgaagtaagaagaagaagggagcaagtatatatatatacacagacacagagccggcgtggtagtggcaatggccggtgaaggtgaactttataaaggtatatatacatatctcatatcttcattggtcaaaagactcgaaattcaaaagtcatcattgaatttactcaaccattataggacatatttactcaaccattctaggatacatttactcaatttcttttaattctgggtgcggtgaaaataagtcggttatggttagttcttataaatttataactaatcagttagttacggtttttattttacaaaaataataattgactctttagaaattataatcgtataaaaatgaccgtacggtttttggacgggtttatgtggttttggtccgtttatagtagtttttagcagttttggtagttttttagtttaactaatttttttattttgaaaactgaaatcgactgctgtatcaaaaaaaccgtaactgaaatcgactgtcaaattcggtgatgatgtggaaccaaaaaatcgattacagtttggtcggtttgatggtcaatttcgatttttcgatttttatgaatactcctagattttgggtaggacataaatcaatcaaattcaatgacattcgaatgattcaattataacttactgttaaatattgaatatctaaaatattggatagatgtgatctaatctaataaatattatgtctaaaatattgtataaactcaaattaaactaataggtatacatgaaatatatccaatagataaaatcgatccaatttaatatttattggatgttggatcgattggatgattgaaattaattggattagatagtaaaatctaacatccaatatataatttgatcggatctgaatatgtctaaaaatattaattgtggtctaattaacactcctagttctaatttgattttttttttttttgaagtgcatgaatgattggttgctcataattaagaataaaatagagatagtgataacttttcattaaatattaattaacacatttgtgaggtaaagtatcgttattaatataatttaatattgggtctcatttttcataatagtactagtcactttagtgtcgtgtaacaatgctcttctctaaatgagattctatttaatttttatttattttatgatcttatttttctagtaattatacatgtttttttacttatgcatttttttttattattttagaaataccaaataaaatacacaaaaaatttacgttttttttttacataattttgaagatacagactattattttacgttgcaaaaatatagtataatgttaaaaaaatagaaattcgtaaaaatgtaaataataagaaaaaatttgtaaaattataaaaaaaaatctatttttaagtatattgtgtaaaaaaattttatagcatactagtaattgtttattttattttgtactataaattattaacaataatactttaattttatgcaatttatttctaatttataatttttaaataaatagatctctcacaactcacctattttcatctgatagtgatgtctaatattttttaaaatgttatatcgatattgataaaattaattattaagtttcatataatataatttactttaataactatgatgaaatatcgctaaccattagcaaaacactactttatggtaatactagatatcattaataactaataacaatacttttaaaatagcttaaaaacgatgaatagcttctccaccaagtgagctattttaacttctctacattatcattttgagctattttagtttctcatattggtaccatagtaatacaaaacttagttacactcaaagatgccataatattttttaaacataagcaattcccataatctccaattacattcaaagatcctctcattttctattcattttcaaaagctaaatcttagaaaaatgattatttttattattttatttagaggtatttgcgacaaactcctattatattttaatttttatgcacttaattctcttatttttttaggcaaaatccccttatttttttttttttttacaaatttaaggtgtctgttagatattacgattaaataccaactggattactactgtatcgacttcgaacttttactgttacatatacacaagtgtaaatagtggtcatccagttgatatttaacagtgatgtttaactagcgtgtcaaatttgcaaagaaaaataaacttaagggaattttgccataaaaaagaaagaaaattaagtgtataaaaattaaaacataaagaaatttcactgcaaattgctcttttatttattgatagaattaaatattaagtatcagttgcattagaccataccataccaattttttttataatgaaaaaaaaaaccaattttagtgcaaataacactcatttagagcaaataaaagaaacttcttataacaatgattccttccttcattccaaacaaacctctcattaatcaaattgatatgaatgagaatcagctgtatatccagttctttctcttttttcctttaatcatttttcttctgtggttacaactgtggcttctctactgcaaataagattacaagcaaagcaaaaacaa

SEQ ID NO: 186997 - DNA, 2598 bp, Cannabis indica
tattaatttctttccctaataattctctctctttaaggttacttaatattggaccctttttttctcaaaagttggtattatataaaaaagaatttctcttttttctttctaattgtgcaaaaaattagagcatatgaaagggaaaatatcacaagtctcaaatatcacatcaacgtttaatataatatatatgtcattataatttgctaagaatgtgtttacttaagacaacttttttattccatatatataactgagaaccaaaacgttgctttctgataattaatgggagacttaagttagatttagggagaagttagagaagacatgtggatccaaatccatttgttttatatatgtcaatgtagttatttatatatatacatatatttataagataaagatatacagctttaatgatttgtaagtttgtaacaaaatccatcccttgtctaattttgacctcaaatctttctctattcttatcattcatatatctatctgtacagctaccactcaacaaggatggaaacccacctaagttcttaaaattataaaagagtgagaaaaaaggaaaaaagagatatcatgtttatccacctgtcatacattgcagtttcattcattcattcattcatagtctagtcgtgcacaatttttatgaaatgaaaattatgttcagaggagggccctataaataaggaccgtccgattcgatatatgggcctctctgattcttttgacacctctacacacccacatggccaattaacggttacaatcattgtgctgggtcttccttgtgggttgtgataaagtataacaactcagacccccaccaataatctcattcatcataatctatactatatatatatatatatgaaaaatataattataataaataatatatatacactactgtctactgatgatgatgcactaatattagtgcataattttcatggtatattttagctaaattattgaaaaataagcaaaatatctcttaatcttgtatttcattaccaaattatatcttaattttctcggtattatcctgatctatatataatacaaattatattatataataatatatgaagatatagcaataattaagtttgtgcttaataatgttggatatttgatggagatcctgtggccagtatcaagcttttggactattcaaagaggtacctagtttatcgtacggtcgtgatctaattgtcggcgggccaggacatgccaacttatatattaaatcatttttatttcatataaatgtgcctttgaattggacaaataacacaataataaatagattaattagatatatagagatagagagagaaattttaaatatttatatatacaaaaattttataatattagtggttatcaaagacagacatataatattctcgggtgcatgtgattctcaccttggcaggctagctaagctgtatatacgttattttgatgattaatgtctttgtgtttattatctaaaaaaaaaaacccttgtgattctcaacaaattttcatatagaaattaattgtaattaagctaataattattaataattaaattatgtctcgtttgttattattattatatttaatttaatatttattgcattgctggagttgtctggggcatctatttcacaaaacttgaatcagattggctaaggcactgggatttgtttggcatgcctcaaaacccaagtgcaacaaacactttgggttctgcgtgagaaagaatcttaaattcttcatctctctcctttattaattattatattttatatatatataaatgtatatatgtgagtatatactgatggggaatatgagagcaagataaataagttctttctctgtatcaaataaagacacatgtagctgtttttcaagttggggttttggaagtaaaagtacagtgctctctcttctacgttcttcttcttcttctgatctgaaacaaaaagagactctcaaagaaaaagctttctaggcttctagctagtagtcttctcttctttcagctccttttaaccaaaataacaggttagaattattactcttatactatacatatattagttttccttttgtatatcttctgtttgaatcataatttagtataggatctacaactgcttagttgatgaatttgcaggcttaatttgatgattagtattaatcgtctatatattttgagtatatataataagttccaaatactctttctctttctatttctctctatctgatctctctccctctgatctatatacacataacaaaactacactagtgccggggtttatggtttatatttttactcttgcttttagaaacattaataattcgaactgtacgtaattgatctgatccatcagccaaaaatattttcaaaggataataattatcggatttattataaccatgctaaaataatgaagctaactgatatatttgggttggtacgtactactactaataattaagatattgtgatttgtttttggttttttactaaaataattacttgttcggcatgatcatcaatattatgtgtgtatatatata

SEQ ID NO: 186998 - DNA, 1931 bp, Cannabis indica
atcgaatgataaaatctaaaatcaaatatataattattgcatcgaatttgaatagacttaaaaacattaaatgtgattttataatactgaataatttgacataataatccataaatcataattcgagacataaatctaagtatagccttttgcaaaagacccaaaacaaaatatatagggaaaaaaatgagcagtagtgacataaatggaataagaatacgccaatatttttcgaccacgaaggatcgactaaataaatctaaatgaactaatttcagcaaattctctcaatggtaattaaagaagaaaaaaaaatgagactaactacaaatctccaattatttgatatctatataccaaaatcaaattccgaatccaattttataccaaaatattatgaggctgacctccggggcggtgtgttgctcgggggaagatgatgctcaactttgcgttagctgctgatcgtgtcatcctttcgccaattatgttcatgacgataccgcctctatggcgctgccaagaggccaagctgcttcgacgaagtcattgttgtatttaacttgtttcaccaatgtaatctcgtgccatggatccagacctgttttaatgatgaaagtaataaatacctaacgaattcaaatatgacagaatacagaatggatgattcaaaccgagaaataaactcaccgaaaccatcgacaagcaagctgtactggtaaacgaggtccatgcaaatgtatggcaagttagactcgtcgactcgtggatataaagcttttgcgtctttgagtttagtttgacaagctcgcttagctacgtcttcaaaatctgaaggacgaaccctagcaacattgtcactgggtttgaccaaaccagcctgaatgtgttcaatgtgtttattagaccaaactttctaaacacggtgaacgaaattattactctctactatgtgcgaaataaatagaaaatacctcagcagccctgtcgaagaaaaatgaagcaacgaaaagattcctttggccatcccctcctccgccattccaaaccccaccgaatgtgcatttcatgtgtgaacacgtgtctcttattctaagagcctttccagttattgtcttgcactcatcaaggcttgagccagatgagggagctgaagccttataggattgccctccatattttaaagaccctgaaaataaatataagagaaaagtaaaacaaagaagtcctattatcttgaaaaaattgtaacgaaaatgaataatacaatataacaaaaccaagagattcaactgtatagttaggtccctgtgatgttccagtaattaagcccttcacttaaaaactgctgaaacagaagccatttgataaaatggcactgatgtctgtattgtttatgttttctcatgctttacaagaatcaattctgtaaatggttggttcttatcatttaaaacacttttgaaacatatgtattcaatgccgcatcctaaagtaaattatatacgaaacatgatttatttaacatgagatgagcaacagaatgacattaaaaagaatacaacaactttagttagtatagaaattatggaagatgacataccatcgtagccgcccaaaatgcaaggattttcagaatctccagaaaccttcaaaatctctgctcgagctgctaataagccataacgcaagtaactgtacaagaaatgtaaagacaaaattaaacttaggctacaaaaaattctaccttgttctaggcgaaataaacagtaacaagaaaaaaatcatagaaacaagacagcaaaaaaaatcaataaaattaatgatacaactaaatcaatgaatttaattttaacaattcaagatactaagagaactaacattataaaagatagaggtaagatatccaaaagcatcaggagtacaaaatc

SEQ ID NO: 186999 - DNA, 2271 bp, Cannabis indica
aggtttattcagcaaaaaaaaaaagctccaaatatgcaatttttctaaatggtctgatgagtcctatgagctctggtgagggacaaagctaaactcgcaagtgcgagagaaagatgatggtggtgtgttgtcgagtttgataggcatttagggttttttgagtattgagagagtgggtgtttattaataattagtagggatttttttttttttttcgaaagcaaaagatagaacttttattaatttactaaatcagccaaaagacaagattgtacctcaacaggaacatcacccttgttgagcaatcgaactggaaaagaacaagatgctttagcaagactatgagcaaccgtgttagcagattgtttaataaaaaataagaaaatattatttaaatatgcaagaagtttacgaaaatcttttataatagccataaaagaagaaagtataagtaatgaatttcgaatagcttgtactgctaccaagaaatctaactctagctccactttccgccttggttgaattttaatccaacttagcgcttcctttatactaattacctcaaccaaatttggagcgcctataccagcaaaactgcccaacttagcaattgttaatttcccttgagagtcacgagcaactatgtcataaccaaatgcagttcgatcacaaaaaaggacaacatcaataattatcttgattgtattttcttgcagcttaacccaaaattcagctcgatcaccagctttaaaaactgaaaaaagaagcatctgaacctctattttgggtcgacttccattgcacaaggcaactcctagatgagataagaatacagtctaccgtagcatacttttggttccaaactaaatcttttcgagccttgctttcccaatattgtgaaattaaagtcacgaagattacaaaagctcattccacctatagttttatgtctactcattctttcccaactcatcaaatgaataccgccaccatgagaattttcaaatctttaaacacatcaattattgggagcaagaaaacactcatggcatacgcaagtaatgatgagtaataattttaattagaacctctttcccagcataagaaagaagcttccagtcccaatcttgaacctttttctgaatttcatccttcaagaagcctaaaatcacagacttattagatcgacctaaggtattaggaaaaccaagataagtattgtgttcaaaagcttctgtcacttgtaaaacattgtaaagatccaatcgacttggcctcaccacattgacaaaattaaaaacattagattttaccaaattaacttgttgacctgatgcctccttaaatttatgaagaaactctaaaactctcgtagcatctttaaggaaagctttgcaaaagatataactatcatcagtaaaagatatatgagagataataggagcttgcctacaaaatttgatttctctaatccacttctgagattcataaactcgaatcaatgaggaaagaccctcagaacataaataaatataattctccttatcgaatgccaatagatctccttatcggatgccacaagttggaaagataggccccatctctctaccactgagtacaatagtataagacactgaagtgacacaagtaagaatcaaaccaacccatctctcaaataatcccatttgaagtaaaattacctgaagttattagtaaggtcctacaaaaagggatttttgcatcggtcaacgtatttggtcaaacttattgaccaatataaaagtcaactcatacttttttgcttcggttatctaccgatgcaaatcattattaattagcatcgtttatctattcggcgttaaaataaaaactgaagtaaaagaagaaatataaaaaaaaaaatatacactattattggtgttagtgcacaactgacggaaaaagttattatatatattattggcgtcggtgcactaccgacgcaaaaagccattgaaaaaagaatcagacatgagcttcagtccattttaaaaaaatctaatcctaaaatataaaaccaaaagtttaaccttaatttctttctcaatcgcccctctctcccttctctctctaacctaattccctcttttcgcccatcatcgccttcatcttcttcctttcttctcggcccaaactctaactcgctttttctcattttttttgcaggtgcgttggagctcatcgtcggccatcgtggagcatggaccatctctgctgctctctctctctctc

SEQ ID NO: 187000 - DNA, 3724 bp, Cannabis indica
aagaatgtttatatttggattttggagggagaggaagagagtcattttctgtccatgtactcggaatgttttgcatttcccctcctacgtatgtatatatattatatttatatataaagccatggccaactcgaaccaaggagttaaaacttttttgtatgttaatttaaaagaactaattaaaggaatgaaaaatatgttcgtattccttaactagaaatgatcaggtacaactagaaagcattgcatataattaagggaatgatgaccacaatacacgcgcgtctccttagtacagaaatatagaaaagattaatacaacaagttactgcatacaattggagaaataatgctctaattatagaaatttttacattatacttaactgtataaaatatttatatatacattagaagattttttttccaccttttatacttgaaaaaaaataaaaagtacgttgagacattttatctattttttttatttagcacttgagagatgaaaatagataaatttaaggataagggttgtatttggttcggccttaaaaaaaaattaaacaactaaaaatgagttaaatatgagtttttaaatgaccaaccaaacaaaccctgatcggtgaagtattgatcttctatcctactttgatataagggtcgtgtttggcttatcctgagaaaatatatttttcaagcctgtacctcacctgtgccaactgagacttaataaaaaccgaaaaatcgagataaaaagtcttatgtaagcaaataaaagtaagaaacccctatcctgttcacgaaccctagatagtggtggtcatctccacctacggaagaaaccctattctcatcccagaacagagcatgcacatacaattcaaaacaacaaattaaaaaaaaatgcattccataaatgaaaatagcatacttgatgttgataatggagatgttaagttgattattgttgggtttgtctcaggaagttgattgcacctttctcgaagatgagaagctgcgacaatcaacgagtcgatttttgctccaaaatccaagcttgtgatctcctttgttgtagccgtcctaatcaatggagaaggaagatgagggtattctcatgatctaattctcaatagtaagtgaagacagaagtccacgacattttccaagttggtaaaaagggattctccttgaaggcgattcgaagttttgggagtggtaagaagatttgtgtgatttgaaagattgaaaatttggaaaagaagataaaagtggtaactgaaggtcaccttatttatacccaaaaaggctatccacttgaagaagttaggggaaaccacgatttattctccaaaagcacaccttctatccaacaatcagggagatgtacaatctatgtgtatcatagcttttaatgctcgccataataaaggcatgaagcaatgatgaagattatccttttctgaatttcattctagaaattgaacacctgtcaaagcatagtcgttcttggaagatgactcctcgatagtcgcgccttgtcacacactcgactgccacgtggacatatcattatcacaagtggaagttagcttccgtggatgagtagcctgtgaaatatcactacttcgttctccaatttccataagtccaaattaagagattagagcaagctatcaccacgtgcaatattctgaaagcttgggggtaaatgttatccgtattttcggcattgaacacgcggattccaagtcagaatttaagacccatcagtgggaccatcattaatgataaagtgggccaagcctaatagcccactctattcgtaagtgttgaggctagcttgaaagatcaaggtgtggattcttcaatcaagttcttggattgaatgttcgattgttatacgaaaagaatcaaggatactctaataggcatcaagaggtaattaaatttctttcaataagttggatttaatctatatacattatgttgagatttttggaattatggttcatattggataaaaattattttatcaaaattttgcttccgcttttataactctaatatagaccataaaaattaacaattgagaggacgacttcctcacatttccaaaatttttagtccttaccgaagcaatagttttactttaagtcttctgatatcatttacagagacactaaagagatctctactagagtagagatctcgtctgttgtaatcactcaaacagacttgtgagaacataaatctggtgtatttgagtattaatcaataaaaataacaagtggactagcccattactctcacatctaaagggtgaaccattataaaaatcactatcatataatctgagtctaatccttatagtttataatcttcttagattagttgatgaaaaatcacatccacacgcatcagcagaaataattggaaaaacagtgtaaggtagacaatctatatttatatatatgttgaggtaaaggaaatgtgaatcgtcatttgatctttatgggaaaattttgctttattcttgtttttaagcacaaaattaaacgataggagctatttatttttcacgtgatccgtactttaattatagtattagatggggatgtgcatcccatttggacagcagtaccagtacattcagctttttctgtttcattactctcagatttaacccacaaagttaaacttataatactcgtttattgtaaaattagacacgtatatttctctcaaagtcatgctatatactagtttactaaatgttgttgtgttaataaatgccggccctgttcataaattccaatatttcattaaacaattacagctgtactattagacattgatcatgtcatggaaagttcatcaaaagaattcattaaaatatatacgaactcataagtttagaaaggaaagaacataaaaaagataacatgtaacataaacaatgacataataagaaggcatgtacatgtacatgtataagtattattattccgagaaatgtatggtaagatgaaaaacagaataaacttctggaagagaagaaagaaagaaagaaaagagctcaggctctttgccagaatgcaagaaaggggaaagcaagagcaaaaactccgaccatgaaagagggatacgcgatgctgccatggttggcaccatgatcatgaggctgaggcgaaggagtcatgtccatgccaggggtgtgattgtgaccttcgtgtgcagcagccaccaggaaacatagggccaaacaagcaaccaaagaagctaaattgacctgaaaacccatctctcttagtgattagtttatgtctttcgtcttaaagagaaatgttatttttattttctttatggtttatgttatttctactaaggaggccattttataatgttaatgtcattgactcaacttttgggttagtgagtttatagtattaataaatttagataacatgtcgctggaggcatgtgtactactactaccaccatttgcccttcaattattccttttctttttttatttaagtaaatattcgatcaaaatttttgtattatttatatataagaaatgcttgaattgtcaactgtactaccacttgtactatataatttttgttttgttttgtgtcatgtactatactttgcttgcatgcttggtgagaagatgaaaatagtaatattcatcctaaacttgagtataatgaagaaga

SEQ ID NO: 187001 - DNA, 2488 bp, Cannabis indica
tttatttgaaacatacctctttacctgacattagagagtcagaggacaatataaaaagagtataaagtgtaatttcctctattttttttagtagttttaaaaaatatcaaatatccttttgaacgaagggctgataatcttggtgattttgggctgttttggttagattttagtaatagaaatattaataagtggatttgattttgtttgtttctttgtgcagagtgttattgataacatgtacaaggaaggaaacaagcccaggacctgaaagatataatagacatttagagcttcactttctaatatttcttcacacacttcccattttcatctctctctcttacttattacactttataaataattaacaaggtttactgtgttgtaaatgacattttaatattttcatagtcttaatgtttcaattcttagatgatgtttgattggaaaaaaataaaaatattagaatagaaatgtgaataagaatgaaataaaatcaaatttgaaacccataaaaaattataattttttttcttattttacattagaatggtcattctttttattttaaattgaatagtcattttattaaaatgataaaaaaattgttagtactttaaaaatgcaattaaataaaagaatggaataattttttttttgttttattcattacctctaaccaaattttatattaaatgtatgttactttctttagtacatttttttatatgttttgtcatcttttttaatgtgtttttcttagcttctgaaaactatgggaaaatattaaccaaacaactattgttttgtttcaacaaaacataaaagaataatttttgttttttgaataagaacaattatatgcactttgccaatattactaataagaaaatgataatgaatgcatagtaataaagaatttcttaggacaatatatgatatacccatgcaaaccaaattcataatcttagaaatacatgagatattgggcctaatgagatacaaaaatctacatcatattaagaagagaaatttacataaactattctttttggtaaatttggtacatatttacgttttttttttaaatatttttacggtatttataaaaataatactgaaacaacaataaaattaaataaaaataacataaaaaaaataatatataaatataaaaaaattaataacaaaataacaagagtataatataaaaatatattaaaaacccgtatttaatgttaacaaaatcttaaaactgtaaaaatatttaaaattttgtataatcacattttataaattttattttttattttttaatccctattaagaattacaagaccttgttattactattttttttattattaaaatgtctcattgtctatggaaaatttgactaatgatgcattattatgaaatgtctagttgtccatgggaaatgtctaattgtcttgttgatatcagacctatcgagcgttatatcgaacccatcgtgtcacaatataaaacttaaaattatgaagatcattgggcccactattgggccctatatcagacctatcggactatcttcttcaaccttcaatccctttaacattaatctaccatcggattttatatcaggcttacatcggacatgcatcgggtcaggcaaaaatcacagattcctctccaaaatacagatctgagccttaaaacttcaaaaatcacatattctccacgaaaccactaaaaacacagacctaaaccctaaatcataaaaaataaaacgattacaattaatgtcagcattgggtggtgtggtcgcggtggtccatgagtcgtgtgggtgatgtggtcgcgaggtcgaggtggtccgtgagtcgtgggttgtgtgggtgggtgggtggtccgattgtgctcttttgtgtgcgtgtaacagagagagagagagagggggatagaatggggttttaagaaaaaaaaataacttattctactaataatgaataacttaagtttaagaaaataattttggcccaataaataataaatatataattagtcaaatttgccttgtctatatacattagattatataacctgagatttgattccagaacccttctaccccaataccctctatttcacatatatgagaagggttagttttgaaattgatcaccaagagtcttaacctccaccattaaaattaagtaataattattctgattttgaaatgtatttataagagtattaatctttcatattacacacgagtaaaatgagataattttattattattattatccacccactagtgttgcaaaatccaaggattttattttgtatatatatatatacaaacttacaaaccggccaatttctgcagcgcctaatatgtacaaatttagttctaatagataattaatagtataatttttattaataaaaaactgcaacacatatctattaaattaatatggtttatttaattgaaaacta

SEQ ID NO: 187002 - DNA, 1858 bp, Cannabis indica
atgttgggttggctgacccctctgctctaaaccaggccgttgcttgctatcaagcttgtcactttctgggaatgcctgagtgtgatgttgttcttgctcagtgcgtggcttacttagctatggctccaaaatctatcgcgctctatcgagcaatagcggcagcaagtaaggcagtgaaggaatctgttggacagaacgagggagtgcctttgcatctgaccgaccaagttaatgaaggagattggttatggccaaggctacatttacactccagatgatcccacttctgctcaaagctttttgccatcttcactggagggacacaaatttcttgattggcctacttgtacagacagatgaaacgtcttgggagttttccattttgggtatgtatagttgtgcaagatttgtttattagaatcaatgacttttttggtttttttcaggtttttttttttactgcatcccctgcaacaattttaattttcaggttgtgattgttgcatgggagtaattaggaaaatggataatgtaggcattttctataacagagttaatttttgaattttatgtttggagattcgatcacaagcaccataattttggatgttttttttttgtgaatctttttatcaagacattaaacagttaggtagttgttgtctttaaatttcttttgtttttatgccttctaaatcaatataggacacttaattgctggaataaaaaaatgtaggacacttaatgcatattttctttttttctttttaattgctggaatattggcattgtattctctgttgaatcattttcatgtctaatagactgcaactttctgaaactgtgatagttttaccttgtaagttttaatagaagttggtgtaaaatgtaaaaaatttttttcagttgaaagtggtgatataaatgtccaaaataatcgatatattttgaagatttggaatatacagtaatgttcttgtaaacattttttttttaacttttgccttgaaaactaaactaaagatttgggatttaaactgcttaaagcggattttgcttcttctattattaaatcatattgtgaggattaaatattagagatggtggtgattgtggttagacggggttgaattattgtaggaagtacagagcaagacattttaagaattatgttttatgtggaaatcatactcaaacaaccaaaattgatatccattcatgaatatctaattgtcaaagagaatatttctcaataacagttataagaacctcattgcaacgtttttttttcctttcttttttttgataaatattaaaggacactaccactgcgagttaattgagacgaatgaggcaatcgacttaggccccaaccgctcgaacccccctttcaaaaaaaaaatataattagtaataaaataaataataatactcttaatactaagattataaaagatttataaaataaataaataataatactctaaataataaatatatgttgtagtctaataataatttgattagcttaaaattaataagttcagagttcaaatcccaacaaaagattataaaagtggagataaaaattaaaacaaataaagtaaatatacaacgtaatttctttaattttttttttttttgcctaaatctcaaattagcatagggtcggccctggttttatttaaaagctattataaaatactgctaattatttgcatgataccatcttagagtgttattgaactagtggccgatagcaatgctcttttcatttaggaaatagtcttactaaaccctccataaaaaagctttttaagggcaagatagagtcatggttttgactcttgtctttcac

SEQ ID NO: 187003 - DNA, 1734 bp, Cannabis indica
aaaaatcttaattagccaatataaaattatacctttataacatgatgattaagtcctaaatcacaagcttatagaaagtatacatattaataattatatgaggcctattatatatttagttatataaatagtttaatattattacatatttttcatgtaagacactactaaattttatgcaaattaacataacctttataaaataataatgatctaaaacactattataaagagtgatcatgataccataccttgtttgccatgtccaagaggcaagaccccaaaagtgtagtagtcttgttcacaaaagattccgaatgaagggtttcgtcgggccgagctgggaagatgaaggccattaatcctccaaggacaacttcttcagctctagcattgagaaaattctccatatctttaacatgttgagcttcaaaacacttcacaacttcatccgaagaatgggaataatttattctacctttgttccaaaccctagaatccttgtccataacctcttttgggacactagaaagaatttggaccgcagcatacgaagagtgcacgaaatgaagagactcgcgaggaaatactcggccgtggaaagagccgggcactcctgcagcgaaataccgcctttcgggggaagggatttgaaaagctcattgaaatcattcaagacatgatcattaaaaaatacttgaaattcgagaagttgagaggattcttctactccttgattttgacacttgagctcaatagcgtcaataatattttgcatcgcaataaatgtattaggtccagtagcgcaacccaaatccgccacccgaaaagtatttgaagatccaaggattttcaaatcaaatttctcaattattgctttgttaatcaattctttggcagattgtatagcatttctctacaaaagcaaaaaattaattttttttttgttagataaaaaatgtaacctattttgtgtttaaaaaaaaaaatattgatcaaataattgatacctgaaagcttgagtttttgctgtaactatatcgatcatttccaccattaacattgggaacaacttcattattagtttctgccatctttaatttttctatgtgtttctttgttaattatatatttaattaaccataatttttctatgtgtttttttcttataaatacttggttttggtgtggctaatcaagaattttcaacattgtcagcttattgcatagtaaattaaatgtttgacattcaaacactattaataattaaaaaataaaatgatgatgacatttttttggtacgtactacctagtaaacaaagtcatatttattaacttttactttgaattgaatgtatataggataattaatcattctagaaagatgatggctaggaatataattttttttttactttcagtgacaacataatttgtaactaaaagtacaaaagttgtgactaattataaattatcattcttatattatgattaaaaaatttgtggctaaaagtattagtcacaaaaattataatctactgtgattaaatatatttttaatcacaatatttattgtgattaaaattaaattagtaaataattagtggatggagtgttaacgatgtttaattaatattaataatatctttttaacaattttacttcttgagaaagttccaagttttaaacagatgttatcatcctaatgttgtaattagtgaatataatttaaaa

SEQ ID NO: 187004 - DNA, 6991 bp, Cannabis indica
acaaaaattcatataacaatgtagcaacttaaatcgtaaccaaaattctcataacaacctacataaaaattactggagcaaccagcagagcaacccaaaccgtaaattaaaaaaaaaaaattaaatatagtatatgaggtaattccccctaaaatgaatataagagtatatttatagcttaggagtaaaacacccatttcatttgtaaaccatgtggcttttacttaaaagaaaaaactaattctaataaaataaataaaaagaattgtaggatgacacctcacctattttgtgcaatcctttatattaatatatagatagtttattgttttcaaaaaaaaaaaaatatatagatagtttatttttatctctaattaaaagttaaaaaaaaaacaaaacaaaaaacaaaaaacaaaaaaaaagaaagaagttcctacatcagttgccaaaaaatctaatcttatgttacatattcatctcgtcttgcttgcttaaattgagaacggagtccctaaaataactttccaacgtgacctgaacagtgtattattggcacgagtatatatcatcaaaaacaatttcccgcgtatgctatttgtaatgggaaaatgtttggaaaggaaattatgtaaaaagctgaaatgtctttttccaatttcatgaagtaaagtattcatcaaagtttgtgttctaaaagttgtaatgcaaagaatcaaagaaaagtttgaagaggaatgaaaagattagtaaaactcgtgtcaaaagaaataggaatggagtaaacatggctgaaagcagtacagtcacagcacaaagaaatggcaacgcttcctttattctcattctcattaaagttcattatggattaaataaacataaaccatatttcagaacaatctgcaatggttagacaaaacatgtatattttgaataatgaactttggataaaatgactaaagctggtcactgtgatgaagttgaacccgaacgcaggtatcaacaagtagtaacacgaagcttatgaaatagccagaaaaacactagggaaatggacagaaaaccatctttgttattagtcaatgtaacaaatgaggtgaggactagcaaaatgcctttaggatataacgaaacgaaagggaaagaaacagtccgatggaagacaatctgctgttccacaagcaaagtcattgaaggtttagtcttctttacctctgataacggtggaagccttctcgtttttcattatcatgtggaacgatttcgtcctgtcttcctccaccatctctctcagtatgtcgtcttcaagcttttcagcttgccactttgaagggtcctccacaagagcctcactgaaaatcatactcgaaacccattctttccatgttgttcttctgtacttgtcttcttccaatgtacctgtggccaggagttggtacacatagaccaccttttgctgtccaggccgaaaagctcttgctatagcctgctttgtcttggatggattccactctgagtcaagcatgataacccgagaagctgctgtcaaactgattccttcagcacaggctgtaatcgaagcaagcaggacctttgactcccctgctggctcctcaaatttatccatcactcttcctcgctcgaacaattcaaggtctccagttaagactaagacttccttgcccctttgccaaccaaatactcgttcaaacaactctaaaaacagtttcactggtgcaatgttgtgacagaagagcagaattttctccttcttcacaacacgataaacaaggttcagaacaaatttcacttttgatcctttctttaagtcaaacttgtacttctcaagatcctccagttcttcctcactgaaaaatttattagcacagactgcagttttgattaaccaaggatgtatagatccaagagtaatcataagctccagttctaggggatagccatggtatgtggacataatctgatgcagtctcaccaaaatctcatgctgcttatcagttgagttcatcagcaaggtgtaaatttgtaggccaggaagtgtgtcagcagatcctccaccttcatacacatctatgaatttagtggtaatttttctcaacattttaagcccctgcatcctctctttttcttcacttgaatcgattttctttgcaatattatccaagaagtacttccttgctcgtgcttcctgcaaattccgtgccttttccactagtttcttctttttccttttgtattttgggtctaataccttcaacacttcattgacaaactttggtcttgccaaacataaagtgttgaaatattcgcagaagttgttctggaacaatgtacctgaaagcaatattcttaggtccgtttcaactttcattaaggccttcctcaaccttgatttggtacttctggggttatgtccttcatctagaaccaagattcctggactttccctcaaaactttagccataaatttcctatgtgcaaatttagagtcttcacgcatcaatgcaagaaaggaagtataacccattacaagaacactaggctgtgcatgccacttctggatcttctctaagcaatccaaaatatgtctgacatcatcagttggccttggagctccaggaaagttcacagtttttgacttgaacactctataggttctccgaccatggattagataaaccggtataggaattttccacttaataaattctttgtaccaggtatagagcgttgtctttggagcaaggatcaaaggccttttacccgggaataactttaggtagctgacaaggaatgctatcataagaaaagttttcccagcgccaggagaatgagagatgacacaaccacccaacttactggatttttgtttcatcaaatccggcgttaaagatccagcaatatttttccatagaaactcaaaagcctttttctgatgatcgtgtaacttcctttgaatttcaggaattaaggcccacacattctccttttcttccgatagaggtttgtcaggacaaccctgaggacatagaaattccatctcagattcttcagctgcaccatgctctaaatcatcttcactgaacttcttatcagctgcactccaaccagtgttttgcatctagaaaaatggaaaattcacaagacagttgtttaaaaatcattgttagactagataccacattcctacaatgaacaactaagaaaagaaattatccctcatccaatttgaaaatgttattaacaaatgcctctacttccccctcaccctatcatatcgaaagacatttcccggttcatataaaataaaggtacaaaaactaagttaaaatctgcatgtttctgagtttacgaaatgacttacaaagggtggcaaaatatctctaatctctgtgaaaacataaccgcataaactgcacaaaataccaacttcttcatccactttgtaatcgtgttcacattctaagtttgaaaacttgtcccttgcatttgtccagcggacatttggatcctgaaataagttcataaaagatttaataaaccttccagaaaacagatgacatagaaaattgcacagtaaactattctctaaatacaaaagagtgtatttagattattttaaactagtaatgagaaacaaagacaaaattatagataaggtagaaactagaagtcttacctcatcatcatcaagaacataagtcgatgccaaggctagttccatttctttccacaacagttcagtctctgacatttcttcctcatcctcatctggcggcatttcattctcaaagttggttgttttatgttctttccattggtcagtgatcggtggctcttccttgcctgtacagtcaatgtttctcaagaatgagtttattagttctgtatatgctccagcatggagagatctcttttgataggttctttctccattggcaccagtgtatcgcgtataatgccgaaatctttttcgctgaacgcttctagcaactggtcttctttcaaatgtactttcaagctccaactcttctagatcagaaatattctttttctgtactttggagtaattgttattgtagtaacgctggggaggaatctcatcaagcatctttgcacgggtttgaggattcttgacttggaattgatagtcaaaggacagtgaagcaatttctttttcggtgaaagaaatatctggtttgtgttgatgttctttatgattagtcacactttgttttaccttccttgaagaggtcttactttcacattcaattggattaccatagaaatctcgtttacaaggatgacttatatatttatcttttgtacgtacttttgaacgaagtccatttacaccgaaaaggagcgacaatggcattgacaattcaatatcttcccctctatctaccttgtatggccttgtccgaacatagccaatatctatctctgacccactgtcacagccaaggaaacgctcaggttgaacattgcgacgtttggaacggcgtaagcccatagaatcagaaaatggtgatggttcagcttcaactttgtcaagtattggagtaggctcttctctgatagaatcatgttcagcaaattgaacaacaattgggactgaaataccattatctactttaaagtttgcagcatgtagagtactatgagaacttgaagaactactctcctcaacagctcccaaaatttgatatacaattttgttttgcactgatcttacatcaaatgatagattctttacagaagaggtaacaagtaaccatgaaagatcaaataagattttccctaaaagcattttggtcttctgccgagtagagcaatcctctgagaaatcccatctgtagtactgatcctcacaaaagttttgaccaagcttttgaaggataaatattttatcaatttctactaaattaatctctttattaagtgtttctgtcatcgaacccagagaaccttggttagtatagaagttgatgtaaaatttgcacgagcatccagattcgtgaggctttctctctatggagcttattctagcatcaatccaaacctatggcagaacaagattataatgccagattggtcaaattacttaactcagactaaagaagccaataaacattaaagacaatttgcaaaggtaggcaacagccaggataggaactcagcacaatagttactaactcatcactcatgtacaaaactacagaataaatcatgataatggtaagaaacgtataagacagcaaacagaatgaggaacagaaaatcaaatttgaatgaagaaagctctgtagtccaaagtataaatgtacggtttattataaggatcactcacaggatcttgtccttcatcatccaaattctgtgtatgttgggaatgcaaggttgaaagcacacatatatcaacaccaggtcttagaaagcaagtgcaatcagataatgtagcttgcctcgactttattcgaaggttcgtaaagggtcccttctcctgaagagtacatccatgatccataaaattcaaacgcatagtcccattgctaatgcgtatactcttcagagttttccatgagccacaacagagagcctcaaatgctaccagagttgaaaaaatatataaattagtaaaccaaacactcttatagatgtaaatgaagtaccagaaatctccactgttattttctggagcaacattataagacaagaatgttaaaaagctacaagaaaaacataattacaggacttacgttgatcattatatggatggtgcgatccatataaatgtttttttgacaccatttttgattagccaaagcttttattgatattcttccaaaaagcagtagaatctccttctatccctgcatagttatttttctttatttctttgtttttacactgctcactccaaaaaggctaactcatttgttcggagatgaaacccatgattctgcatataattttttaacatatattacccaaaaaaaaaaggaaaagaaagtatgtatgatttaccatgaattggaaaaatgtttgaacttgaaggtttactcaaacctcatctccaatgtcttgtgctggctattcacataggctaataactcaaccttgtgatccaaatgacatttcatactgaaaatacaccaaaagcaacattaaagttcatcagataatccacattcacaattttttccttcctaaagtcaaaaccttttgaacaaaaatctaccagaaagttttgacttgaagcttttctttctgataaccatccattttttctctgtgtttatctccattattttgtcttgaaagaaacgcataacccacctttttcatttatagccaaaaacatcaataacaaataaaacaataatggaaagaatctattgcttcatcaatctattttcaggagaaaagaaaacatttgaagaaaaaggaagattttacctaaaaaagggtatattttattttgaaaaaaccagtcaccaatttccaaaaatcaaaagaaaagaaaagaaaaaaaatgaacactggtctgacagacagagtgaaacccaattgaaaacgcatttttgcttctatatagaatcatcggctgtgttgaaaacaatattgaccaaataaaaaatgaaaatacagtaggggaaagacctgaaaatgaatataagattccggcgagaatgatcggaattgtgattcccaagctaaactattcccaccactgtgatgaggctataaagagtagtactagtagccagtgctgtgagtaaaaaagtgagtgagaaaagtaggaaaacgacagctcaacggagacatcttaaaaagggctcctttttttcgtctgacaaaattctgaaatgtgaaatctttggtttgatgcttttggcgttactaacccaaatttgcaaccatttatactattaaattaattaataaataaacactactcacgagctaagtg

SEQ ID NO: 187005 - DNA, 4886 bp, Cannabis indica
aagaaagaattaaccaaattttcgtagaggcaatcaaaaaagccacctaattgaatatataactaactattggatttattccgtttagaaagttttgtcttttttcttgacaatatttgactcaataagctgtgaaggtttcaatccaatgcttattttaactcttgactgaagcatttagtcgtttcatctttattcatatgttctaagttttggtttcaaatgtttacttagctatttttcttttagcttacatagaagatagaacctcatataggttaaatacaaatttctattatcaaagctgttctttactgaatagtttgttgtagatgatactaaacaattgggaattgtattaagtttctttgaagaacaacaaatatcttatgagattattagttgtttcgaatacgaattccatgaacatggatttttctttgtaccatcaaatatatgatgtgtggttttcttttgtgatgacagtctaaaggggatctttatggagcagaagattactattctcgggcttcggttgcagatcccgaagatggtgaaatatggatgcagtatgctaaactggtttgggatgtttatcatgaccaagaaagagcctctaattactttaaacttgcaacaaaagctgctcctcaagataggtttgtagtaattttcactattatccgaatctaataggaaatgcagaaattaattcaagtctcgaaacatagaaaatgtttaactgggttttgatggggttttttcttttttggtttcagtaatgttcttgcagcatatgctagttttctatggggaatagaggatgacggggaagaagatggagcgttcgataatcaaattcaggtactaattttcctgttgaaagaaccatgaatgatgagaatgcttcaacttatggagtcattctaactctttaatcatcaatgcaggttgaacagaaggaagattccaccccgcgcttgaacactgcagttgacccttgtcacactggaaatccagatgtttattataggaagatgatcgaagagaatcccgataatgctttgttcctaagaaattatgcaatgtttttgtatgaggtgagtcatgtgttctaactcatcgctcgattttctactcagaaaaccattcatagagaaatggagtgaataatagatctctgtagtccttcctgattgtagattatcatgtttatcattctgtgaattaagttggtttgattcgcttgatacagactcaaggaaatcttcaagccgctgaggagtactactcgcgagccatactagctgaccccagtgacggggaaattatggcacaatatgctaggctggtgtgggaacttcatcatgatggtcgaaagaccgaatcttactttgagcgagcagttcaagcttgtcccgacaataggtacaaaccaaattactggttatgttgaaaccatcatgagaagtttcctttaacttccaaagattagtgattctattctactggttaagtcattttctagatatttaattagtaaaaagttagattagatgaaaataggtcaaatacattttactaatctctttcgcttcactctctttgccttcagctctattcttgcagcttacgcgagtttcctttgggaaaacgaagatgatgaagaagaagaagaagaaaaacaagcttcggcgcctatttttcatggaatggtgatgactgctgcaagtgtctgaactatatatcatcaacaaaagtaatccacactccatagaataagtaggcaaaagaaaaaagactaatgaggcatgcttttgcatgaggctaaaagctaaattgatactatattgtagaaacaggatttggaatgttcttacacaagagaagtagaatttgtgttagggttttggggcatggttatcaatctagtttcgaacttcgactgataagcaagccactgtcaacatctaatgttctacattcaaagttcaacatctaatccatgcatatttaataatttatttattccactggataaacaagtggtaactatattaaagtgtcaagaaaatgaataaataagaatacaactcaaaataaatatcctgagctcaaaattgcaagcatatcattctttaattaagaatatatgtatgtgaaaaagcttaactttttgaagagcaaaaagaatacaaactagttacccaatatatctaataagttaaatcgactgtagggaataataaatcatatgctacttactaataggtgttcttctgagttgaaatgactggagcaaaaatttatgtagtaaaataatcttaacttgtaaaatctgtcccattccttgttggttggtaacctgagtttgctctgtagaaaccatttcctcttggtctattgttgtagtcacggtcgcctccgtcatgattgccttcccgtccaaaactgcgggaaacatatcgaccccgaggagcatctacttggtagcttccccttcctctaccccttcctaatcacgccaattcagtaatttaagttcaataaatagaatgtacaactttgtaacagttaattttattctcgataaaaactaaagaggaaatttttcgtgtttttattatcggcattcatagatatgttgagattaaccaaaaggattagaataacatatacatacttgctaatcgagatgggatgctgtttggtctgcgttcttcaatgtatacttgtcgtccagcaatctgaacagttgctgcctacagttatgaagaacaagcttaattaattgacattcagtcagaagcaaagccagttcaaagtttgagttcatccaaaatgtcaaacatcaagtagatagaaactggctttaaggggggtaaaaaggtactacaagattgtattaagcatttaagctcgataacgaaacaaataatattggaaagaagaaaaacctggactgcattttgaacaccggtaatgtcttcaaactcgacaaatgcataacaaataccaacatcctgcacgaaccaaatatgaatctctcagcttataaacatgcgctacggtattgtggaaacgtgaatgaactcccaagcctataaaatgtcttaaatgttaaaggtcaaggatatagaccttgcgactcctaatgaccacgccctcaggttgctttagtttaccgaaattcttaaattcctcttcaatttcgaaaggagacacagtaggcggcaagtttctcacatacacagatttgatttcacctggaaaaaagatatataaagaaaataagaatctaagcagtagatacgtattcaaccaatagttattaattcataatgcatatcaaatggcatagaaattagcatataaacttaattgatagtactactataagcgtcaaattgattaaatattaaaacaaaataaaatgatttcgataaaccttcatcttccaatgaggtaacttcatatgttgtctctgcaactgatctttcaattgaatttgacgatccaatgggttgctgagcagtggatggtggagactgatcccattctgaagccggtggagcattcttgttaacagaattctgagaagctacagaaggtgtaggctgtcctttagcaaagcgtaacttccagcaagaatatagcggagaaaatcagtatgtgtaaatgaagattacaaaagtgagtctatatcattaggtaatttgtagaggtttagaacatactatagaagcataagtgtgcttatgggtctccccaactggttcctcaacagatgaaggcagttggtcttgtaaagaattcactgcattctgaaccgtaccattcgagtgatctacagagttgtcctccattatgggttcagactcaacaacttgctgtaattgctgctctgcaaagccataattgtcgactggaccattttcattgatatcaggagccacaaactctcttgtgtgtaattctccacccagcatatcataggatactgaaaaatatacatagaaaccatggttttcttttaggattgaagcgggaacaataactatgctgatacgcaaactaggaagttaatttctcagtcgaaaaataaattataaaagaaaattctcttaccagaccataataagacataaaagtgaaaaagcatacaatttgactaaggttgaaatagaatgagctaaacccagatttaaaattatccattaaatcctattctcataatcattcacctaaaccaataatattacccaatagtaaaatcacattttctgctgaaaatcaaacttagcaaggtctggcaacaaaagaaatcttaaaatctataattcgtataaaccctagtacctggctcagtggctgtgttgaaacagttcggttggaatcgagattagcctgggctaacatgactgtgggatgatgatgatggattggttcttcatcaatgaactgaaaaatatcattaagtacaaagtagcccttttcctggggcgcaaggaaaaaagattgcataaatttcctcctactgctgaaatcctttaattgcacagagcccgaaaccattacaagaactccagcattccaagattccagggcatgtgctgtcctaatctcaattcccgtgtaattaagggacataatcagagaatggatttgctgtttagcaaagaactcagaatcaaaaacataatttaaagaaaaacaaaagaaaatataaagtgggagacataacattccaaaattagcatattcatctccaacaatattgaaaaactaaatttaatcacatcaaacaaagcatttatccaattactgaaactctatcatgtggctaaggcttttaataaatattaagtgtaatataaatcccagaa

SEQ ID NO: 187006 - DNA, 2841 bp, Cannabis indica
ttttttaaaaaaaaatgaatacatatacactaattactaaagattaaaaacagaaaaaaaaaatcataagtagtatagcaagcaaagtctaattctgtgtcaagaatttaaatatgatgaacataaagctgattattattaagaatgagaatatgcaaaatcaaatttatgtttggtaccattttagtggaaggagtatagcaaatattacacttggcataactaattctttttattttattataaatccaaataataaaaaatttaaatctaatttaattctatcatattttatttttaaaatatattaaatctattttagattaaatttaaagttatatgttgtccaaaagaaatagacttatataaaaaaagtatttatcatattcttaaaaacatagccagaattagatatgatagcaggtcaatatccagcacactcttttctagtagtacatgtcaattgagaaaaatattataatattttaagtttcataaataatttaaacaataatctacaaaatgtagatgtggcaactaattttaatttaaagagtgatctaatttattaacttcactaattaatataaattaaaaattgcactaatttatatactttttaattaacattaattggtcaaaaaaataataatattggtcaaattatatattgaaaaattctaacccctaaaaaagggtacatggatagccctctttttaaattctatgtcaagaatttaaatatgatagacagtattattaggaatgagaatatgtaaaatcaaatttatatttggtaccattttagtaggagtatagaaaatattacacctggcataactatttctttttaatttattatttatctaaataataaaaaaaaattaatttaattctatcatattttatttttaaaatatataaaatttatcttaaattaaatttagacatataaaaaaaatatttatcatattcttaaaaatatgaacgaagtcaaaattagatggtagggagtcaatatcgagcaaactcttttctagcagtgtatgtcaattacgaaaaatataaaaaaaaaaattaatttttataaatattttaaagctactgaataagtgtttattcggtgtcatataaaatgaacaccttgagtcaagaatccattcttggctagatactcgacttgaaacaacaagcacatcaagagagtcataccctcttataataaaacgcttctctttttttttttttttttgaatttgtctctattgagtttagcttttaacagattgcattcatttttatagtgtccttcctttcttataatagtagcaattctttcgtgctttgaatgttgatttcaaaatggatctctggtaattggttttatgtttgaaatcattgtgattccttttatctgatatgcctttgacaaacagaccttcaccattggaatcatctccattttattctttcttctgaatttttttggagttaagagtagccttgaccgcagtgatgttcaaagtatctttattaccataaagaatcgtgttaacaaaatgttcataaacctttgccagagaactgagaagaattatagcttgattttcttcatctaactttgacaccaatattggtaagatctaagattattctattaaaatcatctaaattgttttttaggtacccatcgtgccccaatcggacccggtataacaaattttgggtttgggattctcctccgtgcggtagtcggtcagaatactcggttgactccgtgcggtaatcggtcggtctgaatggtgggtgggggtcagttagaatggtgctgtggggtgggcgttgtgtgggtcggtgtgttcttgcgatggggtatgcacaggcaaagagaggttagagggaaggagagagaaaagggggaggtgattatgagaggggtattttttgggtttaagtaaaatagtcttattttaacaattaccctaagttttttttacataaccaattatgctttaaaagatgcataaaaattcaaattttccaaagagtttatattttgattctccaaagactaaagtcattagaactagggctgcacatatttggacccgcacacccgaaaaacccgaacacctgccccgacccgctgccaaaaaaactgaccatcagaaaacccgtatagtcaggtcgggttacacccgaaaaagcctaaaatgggtttcaggttagggtgtggataagcagttttttttggtcaaattgaaacccgtaacccgaaacttttatttttttttaaaaaaaaaattagtattaataatacttaattatttattaatcaagtttcacattcaggaaaaaaaaagactattcattactaagtctaaaaactattggtcagcttaagtatccattaattaagttgttgtaaatttaatattattcattttttaatcagattcaaaaaaaaaaaaaagaaagaattaccaatagtcgtagagtgactcacagtctcacacacgacttctcactttctttctcactctcattctcagttcatacagtttcatacttcataatattcattttttttggttctgagtgagaacttctcacttctcacttctcaggtaacgtaaggcttaaccaattcttagaccaaaattttttcttctccaagggcggcgactatttatcttctccggcgggatcgcatccaagaacaagaatggtcggctttgttcggcgtcacatgtccacccacctgtgcggctgactgttcaccggtccgcccgtgactggcgagatttgaggtggtgactactggcgactggcgttctcatt

SEQ ID NO: 187007 - DNA, 1130 bp, Cannabis indica
aatcaccaatcttctttgatttaaggttgggataagacactatttggaaagctaagcaaaaccatactaatgagcaagactatttgatataagaatttagtgtcactgacatagatatatgaagatatacttaccaattcaccattgcaaaatacttcgaaagcaccagtactctgtagagcagattgaaagaagtttccaaagagccagacacttgcaatgcttccaaatctattggcacgcagggagaaataccaagctggtggtgtcattattcccaactttgggaaaatttgttcgcctgccattattaccccgacaattccgacttgaacaactggtatcactttgctcacaatccgtttcgggaaagcgggagggtggtttgccaagacaacattaatccctggaaaagcattttccagcatgtttttaattgttacagcatttcccctgtaaatagaaaccatacaggtcaagaaaagaaggaaataaggttcaatacttaataatacatactaaagataaatcttctatgaaaataatcacactaattgcaaaccaaaacaatagtatctaaatgaaaaacaaaaggattgtagtaatttacattagcacaaaacatattccacttcaagtcttaagctttgataaaaaatgaaaatatacaatatgggggaaaggaacaaaacaacagcaccaacaaaatcatttcattcttatcaaagttggatatacatgatcacaagaagaataaaacaattggtggcacttgaagtaactttgatattcatagaaggattagaaaaaatgcctgaataacttttctgctcagggtaaaggcctcaataattacaaatataagtattacatctacaattaagaatgaaatggggttttttttttctttctcttctgcaaaaatagaagccaggattcggctgaagcacaaaataaattaaaaaaaaaaaaaaaacctaccgacttattatgtgaaaaattcaaaacaacaaaagaatttgaaatgaagtgatccttcatttgccataactcacttcttctatgtctagttttgggagtatctccattcatagattcaatgtctgtaacatgatgtatctatgatattg

SEQ ID NO: 187008 - DNA, 3644 bp, Cannabis indica
gtagaagaagaaaaaatattgacatgaaacatttgtttttcttttttctttcaattttttagtgttatgattatcattattattgtaactttgttgtttgaaaacattgtcaaatgttcttacttattcttaaaaaaaagttttttttttagttataatgccaaccaattactaaagtttttattattagagcatctttaataatgatattttttaaagatatcaaaaacattcacatcaatttaggttacaatttaggttacgatttaaataatttcatgtgaattattgtaaaaattaaaaaaaaaaaaaaaaaaaaaaaaaaaaaaactaaccttaaaataataaaaataaaaaaataccttcatatatatttgaaaatacaatatgctgatatgatatgacctctctccccttagaccttagtgatgtaaaaaacacaaaattgactcaaattagtgtctcagacaccaaaacgggggtttttggtagtataacaaattcaattttctgataataataataataattcaattttgtgcggatagaaaaatggaggtaatatacaatataatctaaataattgctcacaaacacttaccacatgtcaaaagcataaaagaccttatcttgcttaatgtgcagaaataatgagcataataagatcctgcctcgtgggggtgagattttatttccttatcaaaaatcaactttcttttgttgtcaatggaaatcaagtgtcttgtcataggtaggaatcgtgagaaagattcaatttcttacctttttccatgcaaatatattctctttcactcgttgtacaacctccctcgcctattctttttccgatatcaatttccctcttcattcaactttaagaactatcttcatgaattcatagacgaaataacttattgaagctgatggaagtacctgacattgaagatgaagaaaaataaaggaatcttataaccgaaatataaaatttgcaatatttgcgagacctaatagtataaaccaggaaagaacaaggaaggagataaattgaacactacctagaaaaactactgagatggacataaatagaacaacaaattacttcgcatacctactaacaattttagcaagttgatttcttcaaacaaatatttgtaattgtagtgccaagtatccaaataactactctacataattgataaccttttgatgcatataccattaagagtttgtgatcttataatctataatgatgaccctatatcacaaattcagagaagcaaccaaagatgatttaaatgataggactttggtaattggataaatactatgagtgtgattgaaatttatttaaaaaaagtaaaagataatttacactcctcaaaatggcctgattaaccaggcaatcgcatacctgtagcaagctgggaattagtcctgcgtagagagctggtactcctccatgctcgacaattttcaaacaagttgccagggcactcaatctagttgcctgaacttgcaattgaagctgtctccgcacaacctcgaaagggtaagtcgcagcttcagcgcaagcaccagcaatagcaccatacagcaatgtcctaactggtcccaactctaactgatcgaaagcattgagttcctgcccctggctcatgttatgaattcgtttcctaccttctggtgaatgcagataagctgatttcagtatatcatatacaccataaaatactgcacctgaaggtgccatacttagaatggagggtactaagcccttgtaaagggaaaaaaatccttcagtttggatcatgtagcgaaaagcaccaataacaccacccaaggcttctccaccaggtgcgaccattttagttcggatctgaaagatacaaaatttagtatagtatattacttataagtgacagcctaaaatctttttaacccaaagtataggactcttgaaagggcattagaacaatttttaaatgtaatccaacataaaacaaaactctagaagaattcaagaaatgtaaactcaaatggtaagaaaacaagttgcacaatctaaaaaataaggcaaaatactaacactctgaccatttcatagtttcattttctcccttccctatgctgaaagatgtgcagataagttttccacataatcactagagaacaacttattcaccaatgtctgatgttaaataataaatttactaagggactaaacaagagtctattaattggactagggcatagtacatgttgattgattgttttcaagagcaaactaaaatgatattccacaatccacatgttacttccaatactctcagaaatgaaagtgaagcttcattaaacaaacaactagtttaagaaactcagatccatgtcaaacattcagtattttaagcatataatttcctgttatgtctgcaaactatgtggcccatacaactaataacagaacacataaggttaaaacacatagaaatagtagctgaataaatacaaatctaattgcaaattccattgtaaacttcacctactgtgtcaagtggtaagcagagtatagtagcagtgatgccagctgcagcaccagcaatgaatctctcaaaatttgtggtctcctcattcccagaaaatttgagcaattgctttctgtaagtatcgtaagcataaaagttgactgctttaaatggagcagtacgaagaatgttaacgagatttcctttccaaaagcctctcacaccttgagaagcggctattgttctgacgaggtcaaatagattcttctgctcaccacgaactatatattccagctttagtctctcaagtggggcgacaaaagttctgaaaaaatattcacaatcttttcaaatacgaagtgataccaattatgaaaacgatatcaagaatcatcaatagaaaatcttagcttcaaatctcaaacaggaaaatttcactgaattgacctcaattttgacattttccttttacagtaggctagtaaagaacatatatacctggaaaccatagctgcaatagcaccagcccataaatgcttggtggtgttcatggcagctcctccccgaaccctaattttctcctccttcttcctttcctcgaccactgcttcctcagaaccctcatatccgctctgaaccaaacacctcttcgtttcccgaacaatcccgtcgcttctcaagctcaccgaagaaaaccttcctccgaccaccactttaggtcgacaagccgacgaagaaacagacccagaaaccccaatcgaagctgaacactgtctttcctcctccgccaccattgtcagcgaaccaagaagaaatttagaaaccgtgggctcgagaaacaagccaccgttaacaaagaaactcgaattcgaagaaaaagaaaatggaggcgccacctgagagtgtggccctccattagagtaagcaagctcggaacctaccattttgaagagtcgaaagaagaggtttaaaatgaaatcaagattggagggtttgatatgagcatatagagaagttttggagaataatgggaagggaatctaaattggaagaaagagatacaaggtggggtgaaaatggtggagggttgtggagctttgcttccatcgccatagataacat

SEQ ID NO: 187009 - DNA, 2792 bp, Cannabis indica
tttttggtttttttttttgttttcttctgtgttttgtatcagttgagaatcaatcaggtctgagttttttggatttttcttggaactaaaactgatctgcatgttagctgtgactagcgttatagcattgtaattgattagttaagattccatatgcaagtttctcaaaaccacggtgtaattacaaattgtaattacataattcggcatatttgtcagactatctaattacattctaacggtgtgtaattacaatttaacggtgtaattaaaggatcactgaacaaaatattaagaatttacatgtaattaccatcattactctttttatttgtattttaaaatatagtttaattatatagttacttccacccttttaaacttgtattcagtaatgtctagcagtattttataggtatagtgttttgtgttttgatcaactaactgtatatatcttagttgcttgattatattggttacggtttttttggttgctcacattgtgtgaagagttttcaagcgtgtttctaatgtgatatctttttctttcaaaacagttaactgtatttctatttaggaacgtcaccaatttcttgttctctagctttttagtgttggttacgcacacttgtattgtactaccatatgcaacaattataatttttatatatacacacacatatatatatatatatatgtgcagttacaggcttacaggtagactatttggtacaagtaaaacaattagttttgacttcatctggtgatggttggtcaagtttggtcttatttattctttggtgggcatacttagaaaacttgcatacgaaatctatctctattaaaccaattaagataagactgattctatggacaaaggtttctttttttattttatttttttacttttatttttattatttttatttatttacttgattccattccacttgacttttttttaccaataacatgacctctttacagccctttttagtgtgtcttccctacttatttgtttattaaaatcaaacacaagaaaaaagaaatagttatagctggatatgattctatgagcaataggtatgtaaatatataaactttgttaagaacagacagaagtaatgttagttagttagttagttacaaaataatgtatgttcatgtaaaaagcttctgacttttttcttatgtttgttgtagagagactgaaaatggaaaaaagccttattcgcctccgaaggaggtacatcttcaagtgactcattcactaccacctcaaaaggttgagatcttcaagtcattagaaggctgggctgaagataacattttggtgcacttgaaacctgtggagaaatgttggcagccacaagattttctacccgagccggaatctgaagggttttatgatcaagtcagggagttaagggaaagggcgaaagaaattcccgatgactattttgttgcgttggtcggtgatatgatcactgaagaagctctaccgacataccagacaatgcttaatactttagacggggttagagatgagaccggtgcaagccctacttcttggggaatatggaccagggcgtggactgctgaggagaataggcatggagaccttctcaacaagtatctgtatctctctggaagggttgatatgaagcaagttgagaagaccatccaatatctcattggctcaggaatggtgagatccttatacactattacatattataatggtacattgccttaaccttgagatatagtttaattttaacaagttaaattatagaataactatatgcatagctaagaaagcaaatttgtttagattatcattcagttttaaagatgcatgcttttgtggtagttaaagtcttaatcttgtattttactaggatcccaaaacggaaaacaacccgtatttgggtttcatctacacctcctttcaagagagggctacattcatctcccatggaaatactgccaggcaagccaaagagcacggtgacctgaaactggcgcagatatgcggcacaattgctgccgatgagaaacgtcatgaaactgcctacacaaagattgtggagaagctctttgagattgacccgaatggcactgttatggcttttgctgacatgatgaagaagaagatatcgatgcctgcccacttgatgtacgacgggaaggatgacaatcttttcgatcactttgcagcagttacacagaagcttgaagtttacactgccaaggattatgctgatatcatggagtttctggttggaagatggaagattgagaaattgagtggtctttcgagtgagggccacagagcacaagattatgtgtgtaaattgccccagaggataagaaagttggaggagagagctcagggaaggaccaagcaagcatcaatggttcctttcagctggatatttggtagagaaatcaagatttgaagtggtggtgctgctgctgctgagttgagtttggtcaccaatggcaatcaatctcaaatatataatatagtacttaatagtagtgaagagtacgtgaatcagtaatagataaagagatcatcatcatcatcatagaatagaatatcagtatcatccctatgctgctgctgcattttccatcacttctttctttttttctttagtcttctttccttgtgtgatcaatcaatctaaggctttgtagatactgtttgttttttctttagttggttgttaaaagatcaactgtaaaagacaactatcaatactttgtgtttctttctttctttt

SEQ ID NO: 187010 - DNA, 1567 bp, Cannabis indica
atcacggggctctaactattacaacttgagctgaatttttaacaaaataaaacctaataataacctctgtagaaaatgacatgacaaattgtctacattttttacatttgcaccaagttccttgcatctagtgcctaggtcgaccctaagttttgagctccttcactctaacgctttcaaccgaatgataacgcgagtgtttgatcatgagataagacaacaaaatcaccatgcacctgagggggtacccaagtagctctgtgcaggtgaacacctctccaggtgctcgttttttcaacattgtgaagtaagcaatggagacctagttataacacaagagtgacgagacaacgtgaaatttttttgaaaaatattcactgcacatggtgcccaggtaaacatgacgcccaagtggcactttttgtaccactcaataacacctatctccagaagttattgtgcatttaatatgttttttttttagggaagttgcaagatcacattgaccatctaaaatacactaggaacatgtgctttggatagcttagcgaccacctggccaaaaacaaaaccctcatggtcgcatcctttattcttctctaaagataggtgaacatttaaatttaaagtattttgaccatatctcaaaactcacatctctaacttatgcattcttggtggtgaaaatcttattcaaaacccaaaatgatcatgtttctcgaagaagtctaaattcaaggaggaaatgtcaaattattggtatgatatcataattatttacaaagtcaaattttcaacacttaaggaaatttagctattgtgatagccagagtcccgtgatctacaaagagaaagactggataaattgtgcaatccctcccacacattgcctgggaatgtcaagtgtgatatttctaagattatgttggtacgagactacacgatgacttaaatagattgatgagtactacctatgacaagaagatgcatcttcttttcggtagcacgtcacttgagaactccaaatttaagcgcacttgacctaaagcaatctcaagaagacctcctaaatagttttttaaaaagtgtgcgagtgaaaataaagtacgctggaagactcgtgttgatttgcagggtcagtcatcattccaggaagcagccaaagtaacgcacccatatatcattaagtcaaagttcatcagatgtagaccgttatagttatgataccagatcaatagtctacataagatctcataatcaacatctatcattaagtcaaagttcatcagatctggaccgtttggcaaaaatcaatatttgcagacgaaatcaagcctcaaagttctatgatcaagattgaatactaatatttaaattcaatggtggtgaagatatggcaaaagaaatattactaaaatttaataattaaagtatttaattttttatagcaatcaaaatttacatattttaatttagagaaatgctaaaaggtactagtggtgctaagcaccttcctatgtgtcaatattgttaaagacaatatataataactgtattaactgcctta

SEQ ID NO: 187011 - DNA, 2983 bp, Cannabis indica
tattgttttactatatttgatataattacaacttaggcagaccaaattaggagtaggacactatattatctgcatgggttccttctggctcaatatatgtttgcccagtatcctttttcaaaatagtagctatttggctaactggataggtgtgtgacgaaagtacactagagataccatattaaaaaacatgagattcaattgacaatgattagcttatgaatcttacatattctattattttcacatacattaacaatgtgagactctttatccgaaaagagccaccaaaaattcaaagtgaatgagttgtccgagttggtgaaccaaaaattgctacttaaaaagatgttagagcgtcccacattgtttatgtgtgaaaagataatagaaatatataaaattcacgagctactcctctcattgccaattggctatgagtggattagcctatcttcttatatatagctcaatatttttacatttaatccacgtacgacaatgtttgtcgaatacactagattttctattccatctccttttacattatttgattttgatgattgtgttattgctagtttctcagtttgttcagttattaaaaattgtaactaagtatctatatctcagaaagttattccttttttttttatcccatctactttcaacttgaaagaagaaaacactttagaggtgagattgggaacttttgtattggtaattactttcttagttggcttgtgattgactttactattgttgaagttagtggatttagctactgtgtaaaagtttgctgtttttgtttgttttgttttgaaaccattgtttgctactgaggttatctatactttgtctgctttagtctatttcaatctaaacttagtggtgatcttttgctgctgtgctaccatggacggtttttcatgttttgatagttattaaagctttaattagatgataaattgcagccattgcattgctgatcttgtgagttgtaatagtttgacatagcttataagaaaatcacattactcatcagagactactcttacaaaagatttatcttcattgaaggtacctatggtaactacagaatctggtttgcagtacaaggacatcaaagttggtaggggtcctagtccgccggttggttttcaggtgtgttaaatggctttatgaaaccttagaagtccttttactactcatacactactttgtctcaaattttgagaataatattttctttgttgtgaacctttttgcctgcacatttttcttggttgccattgtcattgactctcttaacttcaggtggcagctaattatgtagccatggttccatctggacaaatatttgataggtaataaaaattaagcacatgaaatcatatgccccttttgctgaatttgttttcactaaaactggtttgtgttcattggcagctctcttgagaagggtcaggtttatatttttcgagttggctctggtcaggtatgacagataaaggaatatgatttatcggaatcatcaatgtaaccaaaaatcaaaatagtaatcctattatttgctaacataaactagtaaatcaggtgattaagggacttgatgaaggcctgctgagtatgaaagcaggaggaaagcgacgactctacattccgggatcagtaagaccgttgacttattatttaggctaattagaatttttattctgaattttgacatgtaccaaatcgtacacctgaactttgacatgtactaaatcgcacccttaaactttcattcacgttaggggtccgtttataaaattgggcgaaagtctttggatctaacaatctcaatagttcaaagagaatttttagcgacttgaaaatttcgagaagcatgatttggtacaagtcaaaattcagggagtaaaaattataattagccattttactcagcatgtgaaactactcattaatgtgatctttaattaacattggtgtgtttctggatcagttggcattccccaaaggtcttacctcagctccaggaaggccaagggtggctccaaatagtccggtcatctttgatgtgagcttggaatacataccaggtttagaatttgatgaaggagatgaataatgatacaatttcttctgcatttgcttgcaaaatatatatacttgaccatagaataaagggtcttggtatatatgcagctgcagcaactcgatatgtcccaactattttatatttttggttgagctgttaatagcatttgaaaaggctaatgctataaagttaattattgctctttttttctctgtaattaaatttgatacaagagatgatgatgatgatgatgctatatagattttctttcatcattgtatacaacaccttaatttcatttgttttattttatttctattgaacatagcaaaacttacaagtttcaacacagaagatggttgacattttcataactgtcataagtagaatatgttatgcttatccttttttcttagttcaatagatatattttctcacagggtttgtttagtttggtgtatagaaattttattgtaacggtaatggtaatgaaataaaaaatgaatgtagaaattgattataatatttggtggttggaatgaatattgtaattaaaattattgtgtttaatttggttggtgtaaacacgcccaagaatcatctttgagcaaagatgttttaatgcttcaaaccttccaatgctccccactaatacatttggatgttactttaccaagaaacaccatgagagaataataaaaatagggttagcacatttacaccaaaaacaataatttatggctggctagtgtagtggtgtttcaactttgatacaatgccacttgataccattaagatatgattgacaggttttggatggggtacgaaaatagttacaatagaataaaatttcaaattaatgtatgtaattttacaaaagataaa

SEQ ID NO: 187012 - DNA, 945 bp, Cannabis indica
atataatgtcaaatttcccctaattaaatatacaataccaaatgataattattatgacaaatttatactcttattagaagaatgcaatcttcgccttacccagtaccatggacaatgtctagtgaccacctattcaaggtccctaaccctgaaatccaaatccaatgtgggattgaagttcatgtggatctcagcaatggatcttgacgtttgatactctcatcgtggccatatcatttcgtttcatttgaagatctcatggtgcagatatgcactcattgttcacgtagcaatggtacgttaccattcactgataatgagaaaaagtactttttcaatctagggactatagaacaggtatttattccttggcccaataatggttcttcaggttctccatcttcatctccttattcataattttttctttttccatgtaaattatatacaattaattcttttattcatagattttgataattgagatgtttttaattgagattttagtgtgtttcaattattttcaggcttattttatttcggtgaatttaagactggtttgttattttggaaattaatctggcattcataatttgatgggtggtttctcgagtgcactgtatattttaatatattacatgcatacaagtattttttgctttgtgtcttggttctactttggcagtagttgtatgaattcatagagatttgggatcctcctcaactacttttctctaaggctcgatcaccattcaccgaccgttcttagtcttgtttccaccagacccttgaggatgggaggcttagatttcagtgttgattttgctggaagcaaaggtgacgcgtgatttaagcatggtaactttaatattgagaaattatcgataataccaattaagcaagaaaggaaattctcgatgaattaattcagtatttataactata

SEQ ID NO: 187013 - DNA, 680 bp, Cannabis indica
tttgttgttatgctcctcaaattaatgcttgcagagaccatagaattttgtcaatattcatttgaaaaagactcttgtttgtgaaaatcttaaaattctcttgtcttcttgtattttattctcctacaatttgtatttgtaaaagtcttaggtgtagattctgcataattagtattatttggctcttagtgttgtgatttccatttctttaattatgttttactgactttgatgatgaaatttgtttaatgtaggtgaatgaaagagtaaagttccatagccaaaaaaataagcatggccaggctaacaccaccaaaaagccctttagtgagtgataagaacaaccactcaggttgtatgtggagcttgtacagtctcttcgaatttcgacaaggaaattctagaaggaagatgatttcagataagaagctgttcaaaagagaaggtttttgtaagattctatcaatgataagtacttttttctttttttacattatgtaagatagttaatttgaacattatgttttacaggtgatggaaatgctaagcagcatgatttgcataccagatttgatgaaaaatgcccaggaagagctgtagaagtatgtttaaccaacctaattctatgatcatattttgttttttgttttctttttgtgacataatgtgatattgtcaaa

SEQ ID NO: 187014 - DNA, 1215 bp, Cannabis indica
tgacctggcaaagttgccatgaaccatagtataaactttaaaacataatttggtatgaaaggaaacaccactatcacatgtcaataaacaattccaagaagtaacacgaacaaaatttgcaatcatgttaacatgcattgacaaccacaacaatcgtgatgagatcttgttgagaagattacaagtttaacaactgtaattaaaacatggaaatactacaaagcagaacccaataatatattactacactaaaagaatatgtgacacaaacatggtacagagagtctaccataaagaattaaatctccaaaaagtatctcatgtatggccaagaataatataggcaacagggaaaagaggtaatcaacaaacaattgatgacctggcaaagttgccatgaaaattaatttgactcgaaatttgacaaataatcaataaaaaactgacacttctaacaaaatataataagaaaaatctatgatcttgccagcatgcaccgacaacaacagacattatgtagagatcatattgacacaactacaagatctttaccaagggcaagatattaacaaagtcaagctgaacaatttattatactcatatgaaaatgtagctcaaacaagggtaaacagattctataataaagaattagtctcttaaaggcatcccatgtacgaacagcataatataggcaacagggaaaagaggtaatcaataaataattgatgacctggcaaagttgccatgaaaaataatttaacaaagcagagttaactatttcacttaatggaaaacacttgtaaactgtaacatgaacatctattatcatgcctacaagaagtgaaaaacgaaaagaccaaaacatatgtaaatcaactcattcaaattggaatgaaaagtgtaagagaattcccatcagagtaactatgacataaaaagctacatatggatataaatccatagccaaaaaaatatgttcatcataaggggatccttagatttaaacaaaatccttgtaaattgtatagcacaataagactaaaagagatgctaaaagtgaaaaacgagaagtatgtatgttatgttggaaaatatttaaaagataaaaaaataggaaagaaacaagcaaaggcaatgtcaaacagacctgacaaataatttaatggcaaacagcaatatgtgagatcaacacccaaaaaaaaaaccactacatta

SEQ ID NO: 187015 - DNA, 1486 bp, Cannabis indica
ttaactaatgtagagatttgtgaccctcttcgaaaatataaaaatacattggagatactcttgtaatccttcttcgagatcaagaggaatcccttcagtctacgagtggtcaaagcctatgtttagaaacccctcaaatagaatgactgtcaaacaaatcagcctacggaccccaggggatatgcagggtctattctggagaagccttttagcaagtaaataaaattttgaaaagctttgacaatatctttttaccttcactatctgaaaaaattgccatacaaaacgaccaatactactgttctgtatggcgagaagagtgagaacagagggagttactataatattgatcataacacaattatttattatgtattattattaaagaaataaagttcataactcgaataaaatactggggtaacaacctaacactatgctcaacaaagtttcttgagccctgtactgcactggcacatatttatatataatataaatttacttcatgattaggtttggtgtggattaaatataaacacaaatcattttgctaatactctcagattaccttttatttaaataattagaggtaaaacatttacaagagggtattagccatgtggggttcactgtaaattaaatatttacaaattagagtatggtaaaaactgggaagtcttggatcgtccaatcttctgatcactcagtcttctctatcagcttgaaaccataggcttgtaagatatccaaagctgacacaccaaaaacaagtttagttaatagttcaagtcttggaagaaaggaaaccttgtagtttttacacgagttaagtagaacaaataaaaaggtacatatattgtcattacctggtacatatacttcaggtaaaataggccgtaaaacccctcttgtctttatcttatttccaagaataagctgcaccaaatttgggttagttgttaagaaaatttctcagcttttgagtatgtagacaagagacaatggaagagttttaaacaagtaccaatgctccaatggctgcagggataccaacagtgagagccatagcagtaatggtgtttccattctcagtctttccaaattccaataaagtggctatgtgtttttcagtgtgctgttgatcacctggaaaatctacttccacttcatgatgtaatagcaccatatcctgaccatagatcagacttagctttctcagctttgggaaaattaataaaactatgagcttaaaaagtgggatgagtaaaggatgtagttttggtttggcttataaggttcatttttacctgttctgtgctggaataggccaatctttcctccatgcgaagacaggaaacatcgaatgcactttggcaagagacatgaacttctgtttcctcgttgagtcccaagaatctaaaccaaaagataacaatgattacaatcacttaaattgtctttattgagtgtagaactctttaatttc

SEQ ID NO: 187016 - DNA, 3246 bp, Cannabis indica
aaattaaagtataattcattaactattaagattttaaattttaaaaacaaaatacttaaaaacacaataatattaataaacgaaaagaaaaacaaagtgaagcagttggttgctttctcttatcctaatttatacgatttggttcatgtgtttgatgcttttctttatttaaacccatcaaagctacttatctcaaatcagcagaaagaaaggacatatatatatatttaaaataaaaaaaataaaaagatagagagagagagaaaaaaaaaattatatgcatagaaaaagaaagaagaaaccaaacagaaaataaagtaaaagctgcacctgagaatacccttttattcttgaaaaaataaggacgtagagagctgtatattgataatataataagcaaaccatgcattatatatatcgagttatttattaagtttaggcatatagaatcttatgattagcaatataacaacactaataataggaaaatatagatctaaagaaattaagagcatattagtacctggaggaattactccaaagacttgtttggtagtccatttgatcaggttgtaaattagaccgatcgggcggtcctctttggtccacatattgagtacgtaaaccaccagtactatctgagccgctcattccaatctgcgacatttcatcctctccagacccttctgattgccctgatattgttacacatatgttaaccaaaagtatattgggtccaaataattacgatagagtactatacttcgaaaacaacccatgtatgtttttattatgtggaacattatatatatatgtttgtaaatatatgcatcatgcatctgcatacatataatgtatcatgtgatgtggcatgggtgattgatgtatgttaaggagtacttaccttttgcacatataggcagcacacatttatgtatatacatacatatatttaattatttgtatatggagtataaaaacgaagacgataaagcctattaatttgtaacaataagagaagaaaaaaaagctaaggctgtaaggggctaaaggaaaaaggtgaaggaggcttagcaatacgaattacctgatgaggctgcaggcttgtcagtagtcttaacagttcgatacatctgcaatttaaaacactaattaatatatatgggatgcatttactatgatatacgcactttaaatcaatatttaattaattcatatctacatgtatgtactttgaaaaaagaaatagtaataaatacatgttatgtaacgttcttaatttaccaaattgaagaatacatctacagatacagataccataaacattaatatatatttatattattttattaatgtgttctcttttattcattaatctcgaggtacgtgaatgctgaatataatgtagtactaatggagttagtattattgcaaaatgattactacttttgtcccttatcatcatgatctacttattaattgatagactacaattacatttacattttcgtttttctttttttggtctgaaattaagcagacgctgtctgtctggactggtctggtctggtcccagtagttaaatgatcgagctataactatcagactcatatttatatgaaaatcgctcgctatatacgatccaatatatctcgttaaattcattcatttattcattcactgctttccattggcaactgtgcccgtgtgatagaccaaaaccgacccacatgaaagagaggagagagaaagagaaagagaaagctgtatgtaaatgtagttcaaaatcaaaaaaaatgtatacacatttcatcattaatacctgtaaatggctcttaacatgagctaaggttagatctttaacatccatcagctctaggaccgactttggagtggctcctgattattatcataccatcatcatgatcaatcccaacttaattattcagaaatcaaattaacccaaaacgccaaaaataaaaataaaataaaacgttaaaagatatatgtacgattgatattacaaattagacaaaagacaaagaaattaaaatgagaaaattaagataatataataatgctataacatactctcatggccgccaagaagctcaacggcatggacgaaacgggcgtgtagggtgcttgtccagcgcattcttggtgccctcatactccgcttagttggcagtttcggcaaaaatctagctctcatcgtcccatgagagctaatctccgtctgcccgtactgattgttgtggtgatgaagatgattatgatgttgatggagttgatgatggtggtggtgcagctggttattggctgatttataggcctcggcagctgcagctaaaccgttaagccttgcagctctataagcagctactgcagccatggaagacccatttgaaagccctggtgagctcagcatcgacattggatccaacccccctacccctccaccacctcctcctcctctactgccaaaataaggggtcgctgtcgctcctgatagtgatggtgccatttggtagaagcacatcttgggatccttaacatgatcaacaacccttgtgttatcagcagagaagaaaggaaatgagcggttgtgatagaccgggatacccttaataggacgaaaagcatcggccgacacatctagaagcgaaaggccaccaccaccgccaccgcgattgattgtatggttataaagatggtgagcatattgaggatggtgctgttggtgatgatgataagggttttggggttggtccccagctccgttgagattactaccactactgctgatcaagcttaatctccctaaagagaggtcggtgtgtgctttggaggtgttagtagtagtcgtagtactactactactgcaagctgttaaattgttgttatctgcttcccttcttcggcatgagagatcgagatcgaaccttgcatcatcaagggctgcggcagcagcggaagaagagcaagtactcgtagtgttggggggacttatgttgagagaaagatcaggaagtactgttggtgttgaagaagatgcctcaatgaaaatcccctccaagggcatatttttccctgccgtcttaactaattttccgaatattttcactaggtttcttttctttcttaattactccaacttgatgaggaagacaagtaaagaaagaaaagaagaagatatattgatgaattaagtgagtgggtaccggtctttttcttttcttttct

SEQ ID NO: 187017 - DNA, 7809 bp, Cannabis indica
  modified_base (7728)..(7728): a, c, t, g, unknown or other
ctgaattttcttataaacgaaacaaacacgttacacattcttcaaggttagaaaggtaaatttaatagaataaaagggtaaataaagtcaagatctaagggtattttggtaatatcacacgtggtattgtcctactataattataaaagatattactaccactacagcggactctacaaagaacactctcgctcctatatatatatataatcaaagcttcggtccctaaaaccaaagctttccttctctctctataattcgtcgtcgttttggtattttccagccatggccgcctgtgctagcttcgtcaagctcaacgcttcatcattccaactggatcggtcaacagtccttcgctcagccacgtggatcatcctcatctcgtctcaccaggagccgagtcgctctcccgatccgcgccggggcttacaccgatgaactcgttaaaaccgctgtgagtttctctgattaattaatcgtgttcgtgttttaccgattttggtattgtttacgcttattcgatcgaacctgtcgatttttttttttttttggtttgatctgatttcttagatcttgatgagtttttttcttttatttcgttgttgaatctgaatactttttttatttataatatatttccagagatttagttcctcctaaattgacaaaacctgattattgattagagaaaaaggttttatattcgaatatgctttgattttataaaataaaatatttaaacttgttttacttttgatattttatataaatggatttttagcagttgttggtgatgataaacttttagggttcgttctatattaaattatgtattatgtcatatttttgttgaattttaatttatattgaaatattgtatatttatattcacatacaattcaattacaagcatattattatataaaaatattaacatataatacaatgtaataaggtgtaccaaactggccttatgaaatccaaaaaacataattttctttttagatgttgaaagagaagagttttaatttaggacttattttcaatgtaaatctatagtcgtttatggccgcacaatataattcataattcatgtcgtttctgctaccatacaaattaccatacaaatatacaatgttattttgctaataaatttttttgtagttttatagtttttttataaaacactcatgtaataaggtgtaccaaacgtgccttataaaacaacccaaaaacattattttctttttagatgttgaaaacagaagagttttaatttaagacttattttcttttcaatggtgtgtagaaaacaattgcatcccctggtcgtggtatccttgctattgatgagtccaatgctacttgcggaaagagattagcatccataggcttggacaacacagaggtcaaccgtcaagcttacaggcaactcctgttaactacccctggcctcggtgaatacatctccggttcgattctctttgaggaaacactttaccagtccacaacagatggaaagaagtttgttgattgtttgaaggatgagaatattgtccctgggatcaaagttgataaggtgtgatgttgtttccacttttattgatttttatgtgaatatcccctttgttgttatgttaatgttcttagttttattgcattgtttgtgtttcagggtttggttccattgccagggtcgaacaatgagtcttggtgccaaggtttagatgggttggcttcaagatctgctgagtactacaagcagggtgctcgatttgctaaatggtaagtcattttaagtgtattctatatgtgtgagtagcttatattcaaacagcaaagaagtttatgcctttgtgtttttgttgttgttatataggcgaaccgttgttagcattccttgcggtccttctgctctagctgttaaggaagctgcttggggactcgcccgctatgctgctatttctcaggtaaataaaatctcttgtttaatttttgttcaaaatttctgctagcttgatcgagctataacatttttgttatctcgtcgatacaggacaatggtcttgtgcccattgttgagcctgagattcttctcgacggtgatcacccaattgagaggaccttagaagtggctgagaaggtctggtctgaagttttcttctacttggcccaaaacaacgctgtctttgaaggaattcttcttaagcccagcatggttacccccggtgctgagcacaagaataaggctgaccccgagacaattgccaaatacactctcacaatgcttaagaggagagttcctccagctgttccaggaatcatggtaagccaaatttcgtataaatattcaatgcaaatttattgtatgtttggcatcataactaaaaaattattttttgaaaacaattaggcttgtttggttttgttttttgaaaacagttttcaaaaaataaaattacaaaaaacaagaattttgaaaacaacaaaatggtgttttttgttttaaaaaacaattaacttttggttaatattgtttttagaaaacattaaccaaacgcgacttgtgttttgaaaatttcaaaaattattttatgttcttatttctaaaaatatttttttgaaaacaataccaaacatgctcttagtgatttggactcacatttcttttcttttttaatcttacagttcttgtctggaggccaatctgaagccgaagcaaccttaaacttgaacgcaatgaaccagagccctaacccatggcacgtatccttctcatacgctcgtgccctccaaaactccgtgctaaaaacatggcaaggacgccccgagaatgtcacagctgcacaaacatcattgttgatccgtgcaaaggctaactcattggctcagctcggtaggtactcagccgagggtgaaagcgaggaggccaagaagggaatgttcgtcaagggctacacctactaaagagtcactcaaagaacaaccggtgaccactttcgtgcttaattggcatttgaaagcgttttcgttgcctctttttttttcgaattttcggttttgtaatctttggttagttattattattatttgatttagtggaaagacttaccattattgttagataataagcctttcctttacttcttcactgcagcttttctgtttcattttgagtttatttataatagtgtttgaataataccagtgagcaaggaaatgttttttgttgaacagtaaaagatagaatgaagcaaagaagagtatatgagaactcattttatcttaatttatggttttgcaaaaatattctcacattttttatttatttatgagtaatttactatatacaaaaattttatttttgtattgcagattaatattaaatttaattttttacggtaacaatattaaaattatatttttaaaatttttatcaagtgtaagtcaaaaatcatctggcattctttgattagttcagttcattaatttttatttttttttcattaatttttatttttttttaaaaaaaattaatttaaatatatcactaaaaaagtagtaggtaaataacgatttgacacttaaccacaattaaaaattaaatatgtcagtgtaatgacacaacacaagtcagtgtaatttcttagttaaacaaatatgtcaaatcttgtaaaaattacattcaattctaattacatagtaattttctaaacatcacttaataccaaaaaaaacctcttattttgtattttttgtcacaccaaaagaatatatacaaaattaattttaagtagaaaaattgaattagaacttatctggtaacaagcttaaaagtactcttgactcaatttattttttatatacaagccaagtaatagttttattgaaaagaagaaaaagaaaattatataatttacttgatcaaactgaagtagagagatttgattagtgttaaacaaaacacaaaacaaaccccttttcattccatgcttataatatatcaagacatttacaaaccatgattttctctctcaattcatgcatagctaccaaatattatttattagggtgttcgtggattaatttgatctaatttctttttttcaaaccaaaccaataatactgatttttttaaaatttaaaaccgaaccaaaccaatccagttgagaacagattagtttggtttgaaatcatgatttgtaagtcgtaaatgtcctattttttttcactatattcacttggtcaggtctcaaatagtttggtccaaattggttaagatttagaaccaagaattacgtagtatgggaacaatcctaattctacatatgcatcaatctttacaaaaaggtaaacttggcaaatcaaactaatccaattggtagtggtgcagagtattgacatcagtgtagttaagtattctcctctctggtcaaaccgaaaaactatccaaggctgatggcattctctcttcgccattgtagatgatgattcaaataatatggtttggcggggtgtgggagagtcaccgtggtgttgccattaggtaacaacatcatcaaaacttttgaagactttccgaaatggttttctgaacaactacataagaatcttacaactctaagctattgattttgcataactaagcatgataggttgctcaaaggataccaaagataagcatatacctgaattgtctgtcctcgaaagaaaggtcgttccaccgagtgccactgctttgtccacagagtccttgctcgaaaagacctgagaaaggaatgaagagccttatatgctgttccaaaaccagttattgttattatataatagaaaaaacattacccttttggtttagcagttactggatcgatcgatcgatattatcacattgtcaatggcaccgcacttggctaagtacaacgacaaagcttccttccttagttgcagcaaagtcaacctatttttccaatgatagataagttgaataaaaatcataagagatagcataaaattcaacaagtagagactcaaaactcactccactgaatgttgccatagatatcattcagccttgtgatgatttaaaccaaattttccaaagttttacattttcatttcaccaacacagaaagcattcatggttaagatgataagctaaataaattcttgtaacttttacaagaatgatcaaataaaattaaacataaaaaagatcccaaaccaagaagtaatagatgattttgaaaaccaaaatttaacaccaaattataaattaagaaagagcattaacttcctcaagagaaaggtataaccaaagaaacaaacacacaagaaagagtaaaaaaaataaaaacaatatagagcttataagatcaaaatcttcacacataaagaaaaaaacgaaaccgaccccataatctattcgtaccttgagaatctagtacatgaattgcgctcttcgactaaaactcttaattatactacgcgcatcatcaaattggcggtgctggacaagggagtccaaaacgaagttgcaagtataagaatcaggaatacaaccatttacttccatagaaacaaatatttccttggcttcatcaaattttccagctttacataatgcatgaataaaactactgtaaacagcaatcccaggaattactcccatttccaacatcgaacgaaagagattctcagctttcacaatcttaccaaccctacaaagacattgaataactgcatcgaaggagaaagaatccggtcttataccatcagctttcatctttttcataagtcttaatgatctttcggtatctccaataacacataaggagcggatcaaaacgttgtatgtaacagaatttggagcaacaccccactcaatcatttcgagcaaacaatcaaaagcactctctatctggtttactccacaaaggccatcaattattgaagtaaatgtaaagatatctggtttaaacccgagctccaaaagcataaccaaatgttctcgagctaagcgtaagtttccaaccttacaatacccggtaatgagtgtgttcaaagtaaccaaattaggagcaatacctctaagcttcatatcttggaaagtctctaatgcctttaccatcatttgggccttacaaaagcaatcaattaccatgttatacgaataaatattcgatacaagttcatccttaaacatcgattctacaaactcatttcccttctcaaatcttcctaatctatacatagcttcaaccaaagctagataagtattaaatcctggcttaacaccatcatctacaaaactttcaaatatttcacaactatcattaagatcaaaatcttcttttatcaaacaaaccattgccatattaaaagttgaactatctggcaaatagcctttcaatctaatctctcttaaaaattgagcagtttctttcaccatagaattacttgtaagacaatataatatagtatcacaagctaactttgaaaaaaagttaccattcttcacataaccaaaaagtaactcaaatgccttaccgggtaccaaagatcgaaaaaccccatgaacaaatgaccttatagtagcttcatttgggctcacattcctcttcttcatagtctccaatacctgaaaagcctcatccactctgtttgaattacaaaacccatcaactaacattgtgtaagtaaacacattaggatgaaatccaacactttccatttgtttaactaacctaagagcctcatcaactacaccaatcttacaaacaccatgaataagaatattataagtaaacctatctggactacaattgttctcttctgacatttgctgaaacttcaaataagctaaatcaagtgaatttgacttcactaatgcatctataacagcattatacaaccttgtgtttggattaagatccaagaatgataattgactaaaaacttcaagacaatattttgaaagacccaatcttccccaactaccaattaacacacaaatcaactcctcagatacttgaaacccagattttctaatgtcattaaccaactcaactgacaatacaagaggcccttttctatatagggttttagctaaaacccccaaaactgagggattctttgacaataaagggttaatattggaaacccatgaatagaatttgaatgaatttgatgggttttgttgattatgaatgatgcttacaacaaattgagagttcaattggggttttgaaaactcgtggttgagtaaaaaaaaccagtctttactcgaaagaagttgagctatgtattggtgatcaattgaagaagttggcgttaaaggtggagtctttctctggaatttgatgtgattgtatggctttttagtagctagattgctcagagaagaaaagcctctcatgtcctttgagcttgagcaaataattagggttaggttagatgaagaagaagatggttgagagacttgaaatggaaattgattattaccatgaaataaatatatatttgaaaatttgaccaaaccaaaaataaaaacataataataaaaaaaatacttgaaaattgtaaatttggtgagtttttttttgggacaatacccatataccatttttcttttaaattacactttgggttgctatagtgttgtttagttattttatgtcagttattatgtggatgttggttgcgtatttattgctctatattgctgtatgngttttatgtaaatttcgtaaaaatatagaaatacattattttaaagtataaaaatgaaaaaaatctctttcttttttgtcc

SEQ ID NO: 187018 - DNA, 6766 bp, Cannabis indica
atgtttttgtaaaggggtgaatttctaaggcaaaaggaaattagactttatagtcttttttatattgtcctttttatttttattctcttttttttaaatctatcatttttgtctttttttttttctttttaacactttaccaattttactcttgttacctcaatatagtttctcataaaaaaaaatttgagaaattatttttaaaattaaaataatttatatgatttttaatttactcacaaaaaatctttttttaataatattcaaacactttaaaaaatattttttattaaagaaaaaactattcatataatacttatccaaacaataaaaataagtcaaaacttatacttatattatatttctagctacaagtagaagtttagccaaacaattacgactcacaaataaacagctcagaaggtccccgccactacatcacatcataatccaaatattagcaatcttagctaaattataagctaatgcataatcaagccactaagactagcttagtggtgagggagggataaaaaaaagggagatgtcatgggttcgaacctaggaccttgaagctattaaatgattgtaaaataccattacgctacactcaaaaaaaaaaaaaaaaactaatagcataatcaaaacgaatataatgcttaaagtcaagaattcgaacataattataaatagtgagaatgtctgctaaaaatatagcaaacccatctaacaactgattcttagccataagagcatcacacacgctaacaattggactccacctcaacattatataaaccagccgaacacaaagcataaggccattagaaatgctaacgcttcaataattgaaggagaaggtgaaccaacgaacagagaagtcgataaagcaaggcccactcctaagtggtcacgaacgacagccccgcaaaccaaacattttatctatagtacgaagcccagcatacacgttcaatttgagccgtcctgacggaggaagcacccaacgaggagccatcgtaccaaagggagaagagcccaacccaaggataaaaccccctaccgtattgttctcattagcaaagcgatactaaaaatctttagaccaaccatacactccctcatcatccaaaagcttttgaccatgtacccactgatttctcctataccaaatatgtcatagtagagttaaaagaagacccgtctcatctttatgcaaaatagattcacattcatggataaaggcatagaagtttatattaggcctaaagttcataacagtcacaaagaaaacattagaaatgatagaatggagactagagcaaccccaaacaacatgggaattagtctctacataaacaacaaatcgatcaacatttgacaatatggtattgggcaagattatgcatggtaggaatccaattgaaacaagttttccacacaaaaactttaactttaggaggaaccttaaatgtcccaagaaccttccaccaataagagggaccatttgaagatgcaaattgcccctacccaacagacgaattacattttagtagtcattcttcattgtataaccacctgaagcattgtaatgccagattaatttatccttatgctgtaaataactcaaaatggtcaaaatttgattatcttctttatcgaaaaaagctcaccaatcaaatcataattccaagtaccattagccatctttaaagcactaaccatatggacattcgaatggccatgaaaggaatgagaagtagcagccaaaattttaggattctaaacatctgtctgaatatttaccctactaccatcaccaataagccaacaagctccgtcaagaaaaatctctcatgcccaaagaatacttttttagatataagagcccttagaagtttcctccacagtaagaaaatccacatgaggaaaatacatactcttaaaaacatgagcaaccaaagaattgggacaagaaaataatctccaagcttgcttgggcaacattgtcttattgaaaacaagtatatctctaaaccccattcccccatcagctttatgccagtataatcttttctaagtacaccagtgcattttccttttatcaccccaccagaatctagcataaagcctaagtaatgtagtttgacacaaatttttgatgcaagaatacagtgttatcattgtaaagttttaattataaaaaaattgttaaacccacaaggattgattattaaattttactaattagtatatttttttgattttatgctttgattagacaattaaaagtaaataataattaaaaacataataataaaataattgaaaagtaacaaacaaacaactattttaatcaaaaaataaagacctagagtattgatttctctattttaaactatgaatttcagtttactaattatcctaatttattctataatttgtagttttgaagaattctaatgtagtcattaactctctcgagtgatgatagaattaacttaattaactaccacgatatctctatctaatattaatcaattaatcaatatgattctctttaaataaaattcataaaattagtagaatctctcaatcttacacttttcttatgtcatgcaattctaagtccgattttagattacatctctcaagtgtaaaacctaaaatctctatactgattaatagtgaccaagcattaaaaagacaataattaacacaaaattgcataaaaaaatagcaagaataaatatgagaataatttaaaaactttaattcaaaatataaaatagtttcatcaacatactagaaaaagtatttagttcataatgacaaacataatcacaacaataatcatcttcataattaaataactaaataaaataataaagaagaggaagaataatggactttaatgatagttgatgatgtaagcttgagctctctttgtcttgctcttcaatgtgttttctattctcaaagttgctttctgtacatttctagtcgtccaaactcaatttacatcattatttatataggcttaaaaagatagaaaagatgtcatttagaattaggatttgaatttgaaaagaaagtcaggtgatatgtcacctaaggccaggcaacatgtcacctggaccttatctttgagatcccctatttttttatctgtcacgtgcaaaaattagtctgttttgtaaaagtgacgacatgtcgcctaaggtcaagcaacatgtcgcctaaacctcgttatcgagattttgctatttttttttaatctacatgcgctgaaatattcacttttcataatttaggtgacaatgttgcccaacacccaggcgacatgtcacatgaagcaatattttctattcctgacttcttttgatcatgtttaacttcctcactttgacatatatcttgattattatttttgtgcaccaaattcatattattatcgtcttttaagctcaaaactacacaattacaacaatgtttaaattgtagatttaagtctcatggtgttgttttttttttctgtgacgcaaggtgtaagcctcaaggtccattgaggtgtaaattgaggtgtaagcctcaattatttaattaaactaatagttttagagtaattaaaattagtaataataaataatgttttataaataccaaatactgtatatcataaaatatctcctaaaacaaaaatataacatcaaatatctaataaaactcaaacttaataaatatattttttgtttctagaactagaatcatattctattatcctataaaaaatcccaacaataatggcatgatgatttagaaatcaccaaattcatcattgttattattgccctcatcatcaccattactactaccacctccattatgatcatgaatctccttccattcatcttcatcaacctctaccaagcactttcattttcttaagaaaaaataattacaaactaatcaataattaattaacataatacaatatgtaaattaaaacaagagataaagtttacgaacccccttttaaagtactttctgcctggtttgagttgttagtggaatgagtcgattccgattctccaagttgagtattcttattctttagcctcctttcattttcatctttactttactaacaagtcattcatcatcaaatggaaactcatcgatcaacaaagaatcatcttcatttgaatcttcatttgattgtgttgttgaattcatcttcaaaaatctatttttcattcttttgttgaacattacgtatgccaaataatgcatcttgaggtagtcagttgatttctttatttttttttgtatgaatttgattaaaagtactccaattccactcatatcccgatgctaagcaagtaagacccaatattttgatagcaaattctgtaactctgacgtttgatctccatattgagttcaccattccactaaaaaaataattactttattattcatagtacacattttgaaaaaatttagaaatttaattatctgctgatcgttttgaaatatctgttgagttaaggtgagtccaaagaacccttccctgttgtggaaattgttacatcgaaggttagcttttattctgtctttgggattcggtataagtttgtccatagaatgaaacaaatccaacttgatctctggatggttaaaaaataccttgtgaataattacaatgaagattcaaaaagtatgcagcgacatgcaaacgtctatacaactgaaattcttatttctcatctatgatttttcatatctccttgtaatcattttcttctccaccataagcatgtgctattttttcttttgttgtatccatagcattgtaagtaactcatagttggttcttcatcaccgtcaactagcctcgacacttcaactaaatattttgtggtcttaatggcataagacacacttgcccaaaaatatgtgtctttcaaaactatgtgtcttgcctcctttctaatagcttcagatgcccaaggataggttgcctactcttaagaagtaaatataacttccaaatgttgcctcacttaatatatgctttatattgtaagaaatgcagtagcaaatctagtggcaacaagtcttataatatctcttttgcaatattttcttgtcaagtttaacacctattgatgattgtgaaggaacatgctcaatttttttcttttggacaagacactttggtgttgtggcaattcaccaattttttcaagcaccaaatcaagacaatgtgctacacatggagtccaatatagatgctttcttttctccattaataatgtgctcgctgctttgtaggcactgacattatcaatgaccacttgaacaactagatgctctctaatttcttcaatgacatcatccaacattttaaataacttttgtgcatccttactaaatgaaaaatcattaatacttttaagaaacacaatgcccttaggattattgactaaaatgttgattatgtgttgatttctaatgtctaaccagccatcagacattattgaaacttccattagtggccatgactgcttaatatcctcaactataacttttgtagtattcatctcctccttcaatatccatatcctaagctcatatatactaggagtttccagttttctcccataatctccaattgagcgacacatgttgatgaaagaatgactcttagccaagtagaaaggcaaatcattcttaaagaaacacctcttaatgtacatgcaaactttattacgcaattatttgtatttttggagttacttgggtttgttcagtttctgtctttcgaccatcactacccataaacatatccattgggcctcttacacctctactaggcatgagagtagaatccttttaaaaatagtaagcacccatcggcattactgttggctttttcatcctttcgggccagacgaatccaaaagagacaaggggtgttcatgaagccacaatcatcctccaacttcaacaacatttggtagttgtggaaatggttcaaaatgtcttcgatttcccaaatcgttccttgtttttgcgggccctccgctaactcaagacatgcaagtatattctgtcggtggcttgcccggtcttcaatgtcctttccgtgttagcccacgagaagattttaatctgacattgtaagatttaaaaaggaaaacgaacatcaagcaattagtacccaaactaaggaagacatagtaagagtataggaagagtcctcacggtaactgcttagaaaggtccccactagaccttatttaccggaacatatagttcttagacaacaaaatcaacaacacaagaaagaaaacaaaaaagggctcgaaaagcgtattgtctaccgcctaaagggtcccggacacaaggaacttgtcacaacaatgtcatccaagaccttgacagacctcgaaaaatcaatagtgatgtagagtggaaaaatgtagaattctcaaaatattagagtgtgattggtataggatttgaatttgattttatgttttaaaacttaaaagtgtgggacctatacagaaaacttgattggtttattatttttgaaaattgatttaaaaaacaaactcaaaattattagaagaattttgaaaacaaactttccatgttttcagttgatccaagaacatgatttttgattttttttttttcttctttgaaattatctaactgttcctctctgtgtttttttatttttttattttttttc

SEQ ID NO: 187019 - DNA, 2838 bp, Cannabis indica
tccacctatgtaatctgtttttgtaaatgatttaggtatattgttattatcaatataattagtttcatgtaaagggcaattctttttttcatgttcaattacagaaatacaaaactatttaagctcctttaatgaaaacagaaaccagaataacaacaagaataaaggatcatctggtcacattattaaggccataaaacatccaattaacataagctccacaattacaagattaataatccaaagcagctcagatttcacataagaatttaagcagaaaagaaactagatgggattcaaatctattaattcataagaatccgtcctagtaaccatcatcccaccggtccttgtacccatctcgcttttcttttatgttctcgacgctctctccactcccctaatctgagaacatagcaaggtttggcatccaatctgcattgcacagtaacctctaagaatcgttgatcagatgaaagaaaaactaatgtaacaatttataggaatttatgatatgtcaaaggtagatagatatgctcaggctcaaaggcatacaattaacaaccaaagtgagtcactatgcagaaaaaggtagttaattaataatgagttcactgacatatctctgactcggaataagcaactgcaaaacttggcatttacaaaaatagaggagatagagatatgatacctcttgattcgatcacggcctgtcttgatcttgaaacgcttggtgttggtggaaaatcttgattttgttgagttggctgacaattaaaactgttgaacacttctcctcttgactcactggctcagtctccagaatcagctttgagtccttccttcagaatagttatgagcttgacttttctcttatttcgcttctccaatggtgtgcctgcatttttagaaagattttttattattttattcaacccaagtatcatcatctgagatgtcaaaataaaaaaataattgtttgttttgaaacagaggaacatgagagttataatattaatgaagtacctttgaattgatgatgtttaagtagatgtgtttttgtctctcaccacacaagcaaacaattgcccttctgtttggtgagttccaattccacttttgcgatgtgttgaatctttggccaatcttctcctcctttctcgcaccgttgctttactaaaggacaatcccatatctctaaatcagaaagggaattaggcagcccttcttctggtaggcactgcagcctttcacaattattaatatataagtaagtgagggatgtgagttgttgaaaggccttgccatttaggctctcaaggttgctacaattttggattacaattttatcaagagtgataggtaggagcccttcttcaggaaatgatttctcttcccacccaacgatatttaccattttcaaacacgggagtctctgtattcccatttactacggttctcaaaaagcgatcttgtgttccataaacaaatattctctactttcggatgtgatccccaatctagaagtgactccaacacaggacaatttgatataaatacaaaagcaagaaagggtggggctgtgagagtctgttgagtagttcttggaagcaaaacctccatttcttcacaatcctcaatatggagatcttcaagggatggaagataacaaggtaacccaacatttagctttggacaaccagacaaatcaagttctttaagaagagggaacgtctgaccttctccaagaatatctttggtacaaaaagaccattctttccacatcaacatatttttaatagttaaactttctaaacaaatgaattgaggacaactcttatcaatctcatcacctattgacaacacactgtcacatccttcaattgtgagatctttcagagaagctagtcgtccgagtggtggcaaaaagaagcagcttttacaatctttcaaactgattgatactaaattagaaaacgcatagtcaataatccagttcgagaatgttgtacctctataacctttaatcacaagacatgtcaagtttgtatgtggtcgaagtgcatcaagtacatctaattctttttgcgaactatcaaccccaacaacatcattgttccacctcaaagttaacttcttaaggtccttcttattgtttaaattagcctttgaagcctccattgcatcctcaatattttccaaacctgaaatgcaaagcctttcgcgtacatattcagcttctgctaactctgtaattttaaacccatcatccttatatttgtcactcaatactacctttggtaggaaattcaaggacttcatctgactgatttgttgtggcatctctttcaaaggtaccctatcaatatctaagtaacgcaagttgattagtcgtcccatattcttcggtaattgagaaagctttttacaacgtgacaacaataaagtttgtaaattgtacaagctacaaatcgaatcctgtaacacttcaatttcagtaaaagacaaatctaggtaccttaaatgtattagaatgccaattgaatcaggcaacttcttaagagtagtccggcttaaagaaagtactcttaaacaacttccctttgtaggcatgactgagtagtttggagagacttcttcatatggagactttgatggcaatgcaatgaaggtacgcaaagacgtagctttactcaaattgatatgcttgttaaggtcacaagtgcttcccttacatgacagacgccgaatcattgttgaaaagctatcactgatgtctaatctcgaacaaaaatcatttgaaacaaatatggccaaatcatgtacaaggtcatgcat

SEQ ID NO: 187020 - DNA, 2352 bp, Cannabis indica
aaattactaattagccaagaaaaaattaccacaagactcagatttcttaaaatatttttctataaaattacgctcaaatcaacattgctcactcttcttgaggtgatcatgacaaaatcaaactttaaaatctgtaacattaaattaaattaaatgttaattgattttatagattactaaaaagtattttgttattttctatttaaagttgccatattttgatagtttgtgttgagtattcaatcctttgcaaattaattatagtttgtgttaacggttcacggttattgtttagtcttgttatcctctttggtgtttgagaacaccacataataattaggggtgttcatctaatccaatttacgctattttgcttatagtgtatttgatatgcattaagtgcggattttaaattttggattcaatccaatcttaataattcaaatctaattttatctgtaaaagtgcgaatgggttcgattattttggattggtaattttttaatattaaattcttttggattggatcatacggattgaattgaattaggtattttatgaacaccccacaattaagacaattaaaaaaacattagaagaattttttatgctatttttgatatataaatacattagaatagaatagaaataaaaaaaaaactactccttttaatcttacaatataatgatctttcttttcaattttaaatagaataatcattctacatctaaatgatgtaaaagctattttaatatttgaaaatacaaccaaataaaaaaaaaggaaatacttgaagtcttgaactttgtttcaaagaaagaaaaaaaaaatggaatggaataaaaattaattattttccattttatcattttattcccaaccaaacacaccctattagagtagaaaactcttgaatgaaaattagtggagtgcatgtgaaaattaacataaatattttcaaaattactttttgtttttatacttaaattaacattaccttgtttctttttaaaactatattaccttgtttcaatctttatgaattttgttatcaatatacagttttaatttacacaaatttaatgaaaaaatgagatgtaatagtccctttcaatttcaaataaatctaaaagccaaaaatattgcatatacattataagacatatacaaccacaatataatatcgatgtacatatatttgtcataatatccagtactatataaacaacccaccactagaaagcaacaataaatgtgacaagtttagtctatttggttttaaaaccgaaattgggttcaatccattggcagcaagagaaacaacaacaacaaccaacatgagtttaataataataagaagaagagatcaaatctgtataactattatacataattttaaacttttttatatagattgatatggggaattcttcatcattatcattagtatcaataaggtggtgttttcttgtgcttgcttggttgattactaatttttgtgtagtattattggtgatgaagaggtgtgaaggtgaattattattagcaccagcattgtatgtgtttggagactcaactgttgatgctgggaataacaataaaatccagacttttgctaaatatgactttctgccttatggcaaagattttcctgatggaccatcaggaagacccaccaatggtcgcacaatccctgatttttttggtattatctaccttattcatatcattacatatatatatatatatatttatatagatacataaaattcttaagaaggaggatgtgtttataaatctaatctattgtagaagtaatttaagtgttaagttataattatttttatatgatagtgtattataattatagtaaagatcttgattagctttaaaaaattatcgaaaataaaatccaaatattaacttaatcttgtatgtatgctattaaaagtgttatgtgtcacgtatgcattaaaatggattgaaaatttattactggcgtgtgcgttaatttgtttagctttctaatcttaatcccataaggttactaattgaataaaagttatgtttagtatcatcaatctataaaaaaaatagatagttaatcgtatttatatatgcacacttattttattttttctaaaaaaaactacccttaaattgaacttttttttttttaataaaagaaaattattacttttgctaaatcaatattaaaaaaatggagtgattgactcttttcttttttcatgtataaaaatgcagctgaatcacttggactaaaagctccaccaccagctattagacttgttgaaattagttcatacaatagcattgaaggtttcaattat

SEQ ID NO: 187021 - DNA, 2385 bp, Cannabis indica
tttttttttcttcagatttgggggttttgaatctctctctctctaggatctctcactttctcatatctcctctgcgtaagcttgattgctgcaaatacatatatattacaaacttctgtgattggaaattaatattcttttagccgtctttttgttctgtttcagaactatattttttccaataaatttcgcttgtttatttttttgacagattgggaaagaagtacgtgaggaatctaagagaaaaaatttagttttccagcattggattgaagctgtaagattgtaattgaaatgacaattattcttgtgaagttctgacatttggctaataaattaatcttcataaaatgaaaggttacaaagtactagttctgtcttatgcaggttggatgctggagatggatataagattgactttctgatcttatttgtaatattcttcataaaataagcaagagaaaaccctacgagtatatgttgatgagttatggtattagttggatattcttttttatcttttcatattcttttttatcttttcagaagacttatatgctttattctctttttgattttctagaaaataaaggtgtcacttcatcattccagcttccttggaggagttgtcaccttatctattgaaggtctcgtagtataatagtataatggggaagagtcaaggtacaatatatacactgtaatatagctgggtctgaattatgcaaactaatgttattctctgtttgttttgatttagaaatagtagtagaaaatcaatatatgtatgttatagcttctaaactcatattgatttctatattaatttttaacctttgttcagctctttttacaaggtgggaagtagacatccaaagaaagatgatcattgccttagggtaaagcctagttctcattttgtgtggatataattatcaccaacttctgctttttgaggtaaagtttgttgagaatattttctctgttttggtggtatgttgtcttgtagtcctatatgcttcatgccatatttaatttagctattggcgttgtagacttttggaatttaatagtaggatttttcaaggtgtggaagatggatatatatatttattttcatttgaagatggagattgtatttgctctgttttgttacactaatttacattatacaatttttgattctttgagcttgctggagtagtcatatatcacctttactaatttctatggtaaattcttcgtttgtaatagttttccaggaaatgagaggaccaagtattatctcactttcaaggtatatccttacttaaatttgactaagaaaaatgtgtttttggatagatcatatatctgtgtaagtaattaagttattgcttttatatttgttatttgcggcagcattgttaaatttattttgattggtactatgccaggtgattgagcagctaaaagacttgcaatatacattgtatagttattcgtggctgatggaaccgatgacgcccatgccacaacgaacacagaacacagcaacattaaaaggcaaggatatagaggaagatactatggatttggggctttagtaatcctattatataattgtagtttaaacattgattaacagtattgtaatgtgaacaattaaagattaattcaatttgctataatttataaatttaaatatttttagttttttttttcctattagctttaattttaatattttaattttaaatatattaattgtaaaattaattattttttttatttttttttttaaattttaaaaaatattagaggcgacaaatgtcgctcctaatgcttactattaggggtgacgcgttgcctttaaaaaggtataaattgccactaatatttttttagatatcatagattgatttcaaatagggggcgactttcaattttttttagggacgacaaaaattgtttctaatacttacttttagggacgattttttttattgaccctactaaggagtattagggacaaagtattagaagcgatattttaggggcggtatgtcgcccctaatattttttagggtgaatttggaacttttagggcgataaaagtcgcccctaaaagtctcttttcttgtagtgtgggtgacctcctgggatgttttcccaaaaaacgtgcgagtgagaacaacgctagaaacacttgtattagtatgtagtgtcaatcgtcaattcaggaagcagccagagtggcatactcacgttacaaaaatatttaatctcacccattaacttcattgtttcaatacgggagattgaaactacatagatgaacttgaatttataatatattatgagcaataatataatatacagtgattaatatatacaaaataattg

SEQ ID NO: 187022 - DNA, 6619 bp, Cannabis indica
  modified_base (6554)..(6554): a, c, t, g, unknown or other
ggaacaatcttgtgtctaacactcaaactctcaatctcacaggtgtttctctctcattcccccgagcaagaactttcacaacaattgtgcttctcaatataggtcccaaacccagttcacacactctcaatactccaatcttgattggtgcagcagaacttgtctctgttctaactagaaagtctatacgcttctttctctaacttgtcttgtctctctttaagttattctctaaaatgcattctttggcatctttgccttgttgttgtgtaacaagtggaatgaagtgactttatataggccaagagctgatctaatgattggcaattaagacagctgggatttggaggaaataatcccacaaaattcaatggtgggctttaacgtttagagttaagggaataaaatgataatttcttctaaatttatcatctaaggaaatttttgattgctaaaaccagcttaagttttgaagcggatgctcataaaatgagttctccttttcattaacgacggcttcaagaattggaatattttagacactttggtgggtggttattggccggttcatttaaacttctatagttattattattaattttcaagatttttcaaattttacgaaaatcccatgtttaaaattaaattctatattctggttttcaatttgcaagcccggcatttattaagctacctcaagtatgtgtaatcaaatcaaactagatcagcatttacgagatgttcatggcaaaacataaatgaaccaaactcaaagcctaaaagatcaaattcaagaactcaaaaagcattccaagttcataatggagctctttttaaaactcgaactcgctgattgctatacattaataataatagaaaaataaaaaaataaataacatacaaagttttctagattcactgaacaaaacacattctatataaaattttgaatttgcatcacttaactcaaagcatcaattagttggctgagatagttgctgtacatgaaattttcttgtcttcacattttttctctcctgccacctttgatagccaattttccccttatatctttgattgggaatgtatatgagaatgataactcttgaccagccaatgtttaaagcaattgcctgagttgctggttttcttttcttagagacttaacttctttcatcagctcagcttggttttccagaataacattcatcgcgtttgatatttccatctggacaaagtgattccgtgacaacttcaggaggagaggaaggtaaaagtaaaagaaattctactccaagaaaaacacacacacacatacctcttgcatatgaaattgccttaaggtttcaatgtggagatttcttatgtcttcatgcattgatttttcaaaggaacctagagtctcttccagagtacgttgaaaaagctgtagtgtaaaggaagttccttgttgtgcatcctgctgagggatcttctgtggttgcaaggttcccccctgcaccaaattaatttgaccatgttaatctaaatatgcataatagagagcatgatagatatatcagcttagatgtaatatcaaccaatatgtaactgtagctttagtgctcataagagtgaaatataaaaacaatatttgaacatttagatgcaaatattagtccattacatctaaattcttacatttactgtgggatgaattcccatttctaaggcagctgatgtgtctgactttgataaaatgctgctaaatagttcttctctttcaactcctgttttctttatttttggcgaacccgtagagagtgatgttccatcactgaaggaagatgtagtacttattctctctgcgtaagtggaaaatcttcgaggaagggacggagaacctaatggttcaaggttagcttgtcctacaatgcctttggtacttggagagacagccattgaactagaggtcaagtgttctggaagggctatagaactctcttgatttaaagaaatatctttatttcgcaagtttgcataactaaagttggaatttgttgaggagctaatagttgcttgacttgttgaggacagatcaggtaatccagaaaaaactgacccggttgtctgactactagacgcaaacattcccaatcgagacggcaaagtgcgcaggtgggcatatttatcagatggtctctcaccaccccaagcttctggaggtgtgatggatgaggagtcctcactcttagaagatggagagggtgttgaacccattactccaaatgaagatttggcgtcatcctgcacattgtggaaagaagaaatactgatcgagaacatacaattttacataaaagagtcaagaagaaatcaaagccgccacatcaatgtcactggaaacataaactgatgcacacattacacacacacagctcaaaataattaaaaacaaatgccacagcctacaactaaattcaagcataagaaaagtaatcagagtctttatagtactgtcaagtttcaacccacaattttattttgttagaaatctgagaataagagaattgaccaaacaagcaaatactcgataccttttgtttactttccttttaatacgtccttaaactgttcacttatatcaattaacaggatacaaaaaagtgacaaaaacaatagcataacttcttaattgaacaatttaagaacatccacaagatcagatcatcctagaacatgtcaagagtaaattaatactatcaatttataaatgctctaaagaaaagcatattaaatggagaatttatacaagaaagtaacttgtaagaaattagagcagaatatagacacaggccaaaagataaagaactcaggaccagatattcaaaagataattttgtcatctaatggattacatggtcagctaagaaaataaaagctaaagaaagactaagacctgttcagaagttgagttaggcttccaatcaaatattggatgatcaatgccaccatcctttgaaaaaggaaatcttcttgtagatgaaggaaacagaagtgacgatggcttcttgtctaatagcaaatgctctttttttgatttctcaggatcatcccagaacttgtcaagagtgggtgtgatgggttgaacatccacaagaggagagaacacctccatttcatccttgaagttataacttgtacgaggggcgtgtaacctacccaatgcaccacctggccacaaatggtttcgctgtggtgtttcctctgcagaaggcatgtgtagcatgcctgatgtaaatccactgctggttgctgcaattgaaggtgtttcaagagagggacccgaacgaccaggattccgagaacctggtactgctgtagatagagagaggctagacgaggtcatagagggaagtggatcaggcataagaattgaatcttcaacagcatctcccagaagggcagtttcagcagtgcagctactttcatttacaataactggttttgacctttgccagcataagctagtaacagcctgaaaaaaatactagaagtgattattagaattgaaggtgtttacatacacaaaataagttctgctctcctaaagaataaaaggaaaaatacaaataaaaagagaggggaaatgacaagtctctcatttgcagacaacatatggaaccctcatgaatctacatttaattcatattttttcttgagtcttgatgattcaatttagaaaaaagacactaccaaaaaggtgtaatcccaacttttcggatgttcatttctacgggtatacaattaaattttatagaaaatttggaaaacaagcatttaagctggcacttcaattcctttttttctcgttcataatgagcaggcactttaattaataagatatagacaggcaataggggcaaaaaggaaaagaaagaaagctacctctgaactgctatatgctctaagaacagtgaatggctctggttttccacgaacatcatagaagactacacgaccagtgcttgttccagctgataatacccagccatcatctctaaatgccaacgaagaaaaaggtacttcgtaagaaatgcaagatgaaggtcttctagatcctgagtcgtaagtgtacaactttttatctaaaccaatgctagcaattgtctgtcatggagaatgaaataacaaaatgattaactgttcccccactaatattcagacagcaaagcagctttgcaactccagcgcatatgattgtaagtcatgttattcatacattaagtatcatgtaaatacaatgccaatattagtcaatacgcatcttagtatgcttaagcatatgcataacaagagaccttgtcattggaaggtgaaaagctgataccagcagtaggtgcagaatgttgcttcaaccaagaaacctgatcaaatttatatgaaaaataaaaataaaagagagaatcagatactcttaactgaatttagatgacaaaaattaaagtgttaaaaccccaagcaaagagagctatagagatatacttccacatatatgactcagtataaagtatataccatagttcaaaattggctaaaagataatacttcactagttcactggaattttgtaatcaaatgcaggaagcatcaagacaattttagtgcaaatgttaatgaccaatctggtgaatagaagtggcctagcgttctaaaacttcagatatttttcacatagatacataaaaataactaatgttttaataactctataaccatcaagatttaagaagaaaaataaaaaaaaaagaaactgaacctttgggctgcgaccagtagtatcccataaatgtacagtcccatcatcacctgcagtcgctagaaggtgccgactaatccgggaataatcaagaactctcaatacctggtcttaaaatccagcagaaatataagaaaaatatacacgtgaagttggcaatgtgaaagaaaaatatgaaacatcataatctacctgctcatttggatccttgagttcagcagtccgtgccccagatgcaaggttgtgaagtataagatccccactaagactaatggaagccaagtgttcatccttgcaattgtacattgcaccagtaatcgtattagtgtgacccctcaaccatttaatacagcgcttcctttgcaaatcccatattctaacaacctggccacttccacccgtgcatatgtatctagaaaccttgttgctgaaactgatagctagaatagactcctggacaaagcaattaaccagaaataaattaactaaaacacaaaaagggaaattcaaacctgcaaatgtagatttataaagactgtaaaaactcgatttttgcaggtgtgacctactcaaagttccatataagttcggacttgacattctacacagctcataagtggtcttattatccaatgagtagaactaccagaagaaaccatctcttattcttcatatctctcaaaatgtgctcgttgttaatttgtatgattgatccacacatatttgaattctagtacactaagtctaagtgctggcctaattacatttacaagagtacgcatactgcattcataaactactaacctcaatgttgtctccactatcagtcccagaaaccggaatggtccccatgctttgtccactcttcctccataatgaaatcttcttatcatcaccagcactggccaccaccaaatctgcagcaatcaaaccccaccactgttaatacataaactgtcgctccagcaacaaaaatactaatcatataccaaaacataaataaataagctcaaccaataattcttcaacaatgagtatatcctactaacaacaattaacccaccccatcctcgaaatgattaaaaaacaaaaaatgaaagaaagaaaacccagaaaccacctcaagagaatcatcttcatttttttccagcaaccaaaaatcgaccctcttcacagagcgatgtggacaaaaatcaaaaagagggaacactaaaactagacggatcttcgtaaagaaagaaaaaaaaaactcaatacaattgcagaaaatgatatatgtgtgtgtgtattcgaaacacaataagtaggtactcactggtgtggttccacttgacagaattgacttggcaaccgggagatggagtgtagcttaaggtacatggatcgccaggcttaccagacacatcgaaaagtttgacagtatcaccaccgctcgcggccagtaatgccagagatggatctgatgaattcatggtggctcagtttgtgtgtgaagtttgaaaaatggaaatggcaccacattcaaataaaaatccgggaaaatctgagagagagtgtttacaagggtggggaaatttttgaaagtaaagagaggaacaaaattgagaaagttgagtttttaacaatttattgaactaaaatagtgttgtgatttttgaaaaccctatcgaaaagccgaaccaaaatttaaatgttcataggcttgctagcaatggcccatcagtccacgccttcgcttgcattctactttattaanaaacttttttttttttttgactatgtataaatcatgctttctgaatttttaaagtagttaaaaat

SEQ ID NO: 187023 - DNA, 5629 bp, Cannabis indica
tgagcaacattatcgattatgttagctcgagttagtgagttagtgggtgttgagggattacgccatggatgacttactgtgattattttcttgtagcacttgagattgatatctctaattctcctcattaataatgattggtagcagtactttcaaactagagtatgacaaagttcacattgaacttaggatcgaaacaagtataattttcttgtgttgtgtctggaagctacctagattcatctctttatttatctttctggtttaatatgtgtttgcttatttaggttcttgatttgtttgttttgatttaactttttttgtttaagtgtgatcataaagctataattatagaggttaattgatcaaagaagattcaaagatcagttgcttccgcatcaagaactcatcaagaattcattaaggaattctacatgaactcaggttgaaggacaaggtcaatttttatgttcgaactagagaagtttgatgatttaactgattttgcactatggcaagagagtttgaagggtatacttgtgcactaaaaggtatcaaaggtactcagagatgaaaagttgttggctgagaagaaaccagaggaaattgtaaaaatggagaatatggcatactacaccatcgtcatgtacctatccaatagaattagaagaaagctaatccaagaaaagaccgcaaaaggattatggaacaaactagagcagctgtacatgacaccatcaatctcgagaaaaattaatcttcttgaaagattatacgggtttagagtgaactcatctcttttcttagatgataatattgataaatttaatgaaataattgttggtttagctaatattggtcattaggtagatgaagaaagtcaagcaatcatattactcagatcattgtcaatagcatatcaagaagttagtgcagcaatcaagtattacggggatgtgacctcgttggttggtgttcatacaacattgaagtcaaaggactttgaattgcaactcaagaaggagactaggaaaggagaagcctatcttgcaagaggaagaagtccaaagagaggatcattatggaacaaccaatcatcatcaagatctaagtcgaagatcaaagacaatcgataatgttaccaatgtggaaagattggccacattaaagattctactgtcaattaaagaagcaaccttatttcagatcaaactacgatgacaagagatgcaacagaaaccagaaccaatactcataatctaatgatcagggaaatctaagaaaagactttgcagttgtggctgagagtagtcgagatagaagtacagatgtggaattagttttcttttagaaaataagaaaagtaagagtagatccttaattcaagatgcacttatcatatgtgtcccaacttagattctttctttgattatgaagaaaccaataatggtggtagagtactattggtgatgatgtttcttgaagggtttttggaattggtaaggtggctataaagaaattcaatggtgaagtgaagaatctgcataatgtgagacacattccagaattatgaaagaatttgatatcacttggaaccttagaacataaagatgatggctataagtccttgaatgggagcctaaagatgacaaaaggttcaatattgcttgtgatgaaaggaaagagagtacatgggttgtatgtactctaaggtgaaattgtacctgtggtcgaggtagatatatgaaaggtttagaaagtgatatgcaactatgacataaagggctcaaacatatgagtgaataaggcatgagcgaattgcacaagaagagattaattgaaaagcttcagacctatgctttatccttctctgaggcttgtgtttatagaaagcaacacaagatcaaatttacaatagcaactctgaacaagaaggcagttctacagtatgtgggtgctgacctttgggagccaagtagaattctaacacattcaggtgaacattacttcccatctattgttgatgattttagtagatgcgtttggacctatatactcaagaccaaagatgagtgtctacaacaatttaagatatggaaagcttaggtggaaaataaaataaatttaaaggttaagacaattagaactgataatggtctagagttcatcaacactgatttgatagcttttgtaatgagcatgggataactaggcataggacagttgttaaaactccaccatagaatggagttattgatcatacgaatagaacacttttgaacaaagtaatatgtttacttctcagtttagggttaggaaagccttattggggagaggctttatctactgcttgttaccttattaataggattccaaattgagtcatggacttgaagataccttataagttgttgtatggggacataccaaacctgaaacacttgagaggtttggatgtgaagcatataacagaatgggaagcctaaggtgatcatttctagaaatgttatgtttaatgaaaatgattttcctcacttaaaagattaaaagggaaatgttttacctgatgcagattcatctagcaagagggaggatttagcagagtttaaaattgagcttaaaggatttgaaccaagtgagaagaatgcagcacagacacagctttagatgagagtgaggaacaaccagatatgtctgactattaacttgcaatagacaaaacctagaagagaaatctatataccagcaagattcgtagaagttgatctaattacttatgctttgtcaataggccatccatgttacataccaaaaccattaagtatagaagaggctttgaatggaaagtacaaggagtggtcttggttgtggatgatgaattaagctcgcttagaatgaacaagacattggtcttggttccaagacccgaggacaagaaggtgatatcgtgcaaatagattttaaagattaaagaatgtgtgacataggttgtgatagtaagatttaaggcaagattagttaccaaagtttcacttaggtggaagggataaattacactgaggtattctgatgtagtaaaatataagacgattatacttatgttgtcaatggcaactcatagaggtttagaagtggagtagcttgatgtcaaaactgtttctagaagaagagatctatggagcaaccacctggattttaggtggaacaagatggtaaagagttggtttgtaagttaaaaaagtccctatatggcctgaagcaatctccaaggcaatggaacaagagatttcacatctatgtttaggagattggtttcacaagctcaaagtttgattactgtttgtattttaagcacctagaagagtcaatttgtgtatcttctactatatgtagatgatatgttaataatgggtaaagataaggtagtaataaaaggaattgaagatcaactcaaggtagaatttgacatgaaagaattgggacaagtaatgaagatccaagagtgatggagtcatgcatctaaagcaaaagaactacattgagaagatcctaacaaagtttaagatgcaagattctaagagctcttcaatacctcttggagaaaaatttgtattaaccaaggaagaaagccctatgatagcagaggagaaagaagagctggaagaaattccatatgaaatggctttgggggtgcctcatgtatgtaatggttagcacaagacctgacattgctcatgctttaagcatattgagtaggttcatatcaaatcctatgataaaccattggagggcactcaaatggctactacgatatttgagcgggacatcagatattggattgacttacaagagaatttttgagaaaataactttgaaaggatatgtgaatgttgattatgaatcaagcaaggatactgggaggtctactatctcatatgagtttcaaactaatggagattgcattagatggaaatcatatctccaatcaatagtagcactttcaactatagaagacgaattcatggtgaacatagaggcattcaaagaagaaatatggctacaagaaattctgaaggagttgaagcttctagatggaaaggtaaggccaatctttgaatcatttgtgcaagaatctagtttatcaggagaagacaaaacacattgatattcagttgttttggataagagagaagatagaagaagaagtgatcaagctggagaaagtgaagttagaagaaaaccttgttgatattggcactaaggtgttactaaccttagttgctaagaagctacacatgaaagcactacaacctccattagaaaaatatgcttagcttgttaatgggggcttgaagaaataaggtagaatttgtggtattatcccttaaaccccaaaccaaagattaggttagttagttagttgttctttaactaactcaactatcaaatatgacagcaagcttatggggtcaattggcctatataaagagggctactcatttaataacaacacataacaaggagactccaccagagaaaggggagagacacacaacataatagagagagaaattagagtgagaaaagtgagagaggtatttgagaaagagagagagagttgggattgggaaattgtattgagcaacattgttgattctgttggctcgggtcagtaagttaatgggtgttgagggattacaccatatataatttactttgattattttcttgtagctcctgagattgatatctctaattctcgtcattaataaagattggtggcaacgctttcaaactggagtatgactaagttcacattgaaaataggatcaaaaccagtataattctcgtgtgttgtgtttggaagttatctagattcatctatatgtttatttttctcgtttagtatgtgtttgctgattttggttcttgatttatttattttgatttaacttttatttgtttaagtgtgatcttgaagctagaaatatagaggttaattgttatgtattagagctaaattttctacaccattaaagcttcttgtaagccaagagactctggggtgatcatataggattcaaaaaatctggcaatcaaggatccttgaccacatcaatactgtcactcgaacccacactccaacaagaaccacttcaaacaatctgtggatcttctcaaaaattttgccacacaaagtttggattctttcctaactgagttggtaggaagtttgcttttaaaaaaatagccaaccttaatattttgaagccaaagactataggttgagtaaaaaatattcatccttgctttactaacatagaaaaattaaaatatcgtaagctatacatgaagtatttttttatgtaatgagtatattataatatatggaagatattactcatcataaagagggtaatcatcatgatgtttgtgtttgttatctaataaagataatcaatgagcttaaatcgtgcaacaatttaatagcagaccagtgtaaaaatgttataagatcttatacagttcgttagaattacctaattaatattagttctaattatatttattttattcaaagtttaatcaataaaatattttaattatgatcaacaatattttggtaata

SEQ ID NO: 187024 - DNA, 1992 bp, Cannabis indica
agtttttaatagttagctaattttatcggtaatatatagtgctaaaatgaataatacaggtctaaaatgactagctctgacaaaatgtaataaaaaatgatcctgcgaaagtaatatggattatgttctcatgtaatatccagtcaaacatgcagaactgctgatcacatagattaatgaataactagaatgggtctattgaagattcgttacattgtttatagagcattactattaggtactagtggtacctagcaccatctagatgcggcaccttacaatttgttaggaatgtaccctaaaacttatttagttaatttatatgggacctaaaatttaatttcagcaatggttgtataacacttaggagagtgctaggcactactggtaccgtttagcattaatcttgtttatatctatttgtttcatttaaatggaaagattgttgatctttaggatttgttaactattctagtttggaagcttaagtttaattagctttcaattacttatctactattggatgcagtctaaatgccatccatctggaggaaaaggagaaaagagagaaggaaatgaggaatcagatcattgaggaagctgaggagtataaaagatctttttatgagaaaagaaagaccacttgtgaaactaacaaggctaacaacagagaaagagagaaggtacaatttttagaattcatttttccactgttggctatgtcaatacacaagcatcttccattttttgttttaaatgtatgatctttcctgtagctgtacttagcgaaccaagaaaagttccacaaagaagctgacaaacattactggaaagcaatagcagaaatcattccccgggaagtacctaatatcgagaagaagagagggaagaaggatgcagataagaaaccttcagtggtggtagttcaaggacctaaacctggtaagccaactgatctttcgaggatgcgcaatattctcttaaagcttaaacagaagccaccacctcatatgatgcctcctccacctgcacccgcacctgccaaagacggaaaggatggcaaggaagggaaggatgacaaaaatgggaaaaaggctgaaccaactgctgctgggtctacttcagaaaaatctaatgatgctcctgctaatggtactacagacacatcaaaatcagaagcttctgccccagatgatggtgagaaagctgcagtaacggagccaatcattgtggagtgataagaccacatattttgttttgtttttgttccttctatttgttattattgttactattttgttattattacatgtctctcatgatcattttaaaataacgatattctcagcttattcatttcgaagaataagcacaggcaatctgtagactggtctggagtctcggaatggctgtgcataccttcttcctaatttggctataggattcttttagtaagaaaggactttgctggccatcttacacatattttaacaatctttacttggtattattatatttacaatttcgccatatattagaggtatatctttgcttcttaatgtttatttagtacacaaaatgtggttgatttggaaatttttattgtttttattaatatattgggttgttggatagttttttggcttatattggtagtgatttataactaatgggctttgccactatgtgtgtaatgtctagagagagtccaagtgtgaatttttctagtttattgtaatttttaatgagtgaatttaattcaactagggttacgtagttaagtttttttctaattctataagtacatatgttctcttataattgtagatttatgataatcaaataaagatgattatgatttatagatctagggacaaggctttagttgatagtattaatctatcaaattgcagtaattgatatgaattaattagatacgtatacctaattaatattaattattattgcattttaaattatatattgttataa

SEQ ID NO: 187025 - DNA, 1791 bp, Cannabis indica
tttaatttagttattttttactgtcctactttaatgtttaatcttaaccatatttctaactttttttttcaggttgtgactgtagcaggggatttagcaggggatttagcagatgatataattttttttttttttttgaaagaaatgggtgtatttaccattttgtagtgtgcaactacaaatagaactcctcaattaaaataccatttcgttattacaaaactacccttcacttttttcaatatcattcccccaacaacctacttcttctactctctcctcttcactctcactttactcctttcacgcttatttacttattttattttttcgtttaaaagaaaacaaaaatggctaagtcgtcgtcgacgatagcctcgacgacgtcgcttccagccatcaaaccagccgattactctcacagtccggttcactacgccgtctcattgcgtgaccacactaccttgtcccgaattgtctccactctacctcgactcgctgagccaactcagatccacaccgagtccgactccctcgcccaagaacgcttggcggataaggtatcttctgtactagaccgccgggatgttcctcatagagagactcctcttcaccttgccgtccgagtaaacgacaccgttgccgctagaatccttgccaatgccggcgctgatgtctcgctccagaacgctgctggttggaaccccttgcaggaggccatgtgccgccgtagcaacgacatagctctgattctccttcgcttacaccaccgctcggcttgggctaagtggcgccgtcgtctgccacgtgtcatcgcagtccttcaccgaatgcgcgacttctacatggagatctcgttccacttcgagagctctgtgattcccttcgttgggaaaatcgctccctctgatacttataagatctggaagcgagacgggaatttgagagccgatacctcattggctggattcgacggtttgaaaatccaacgagccgatcaaagctttcttttcctcggagacggcgatcatagccgcggtgtttctcctggctctctgctcgttcttaatcgcgacaataggaaaatctttgacgcctttgagaacgctggttcgcagatgagcgagtctgacattgccggattctgctcccagacgagcgtctacaggcccggtatggacgtcacgaaggctgagctcgtcgggaggaccaattggagaagacaagagaagactgaaaatgttggggaatggaaagctagggtttacgaaattcaaaatgtagtgtttagttttaggtcaagaaaagtagctaatggtgatgctgacgtggctgggagcgaacaggtactacctcttgagctcgacgaagacgacgatggttttttagttgctgaaaacccaaatttcctcatgcctgatcgacgaaggcatagtagttttgttaaggaagataggccaaggccaagtagctttgtaagagaagatagggatttattgacattgggaaggaagagcgtggacttgccttctgtaattgcgccgccacagagaagaactatggctccgccgccggtggcgttgccgcctcagacgaaggagaaggagtacgtaaggagccttaggccgtcggtgtggttgacagagcagtttcccctgaaaacagaggagcttctgccattgttagacatcttggctaacaaagttaaagccgtaaggagaatgagggagttgctcaccaccaagttcccgccggggacatttccagtcaaggtaatgctcaacttctttt

SEQ ID NO: 187026 - DNA, 4609 bp, Cannabis indica
ttttgctgctgagaaaattcaaccttttgaagagttaacttatgattaccattatgttattgatcaagttcatgatgcaaatggtaatataaagaagaagagttgcttttgtggctctcgtcaatgcactggtagattgtattgagcagactaataaaagtttggactaaaactaataaaagaaggtaaccgcttattccttgatataatttttttggtatagattaatgatctaattctttttattcatgaatttatttatacagatttaaaaaagttattattatttatttgtgcatgtgctcttctacactcccttgttggtagtatgtagtatttttacaatgacaatcaatttctttttggagaatctacttctttattctggtaaaaatcttaaagttgtgtttcatcttatgtattcctattttgattaaggatgcattgtgtttgttggtgtgtgggttttggagagtataagagtagaaagatgctgattggtcctcattctgtatgaatcaagttgatgatttcatgttaataatatgatttatttcttagttctgttcaggctcatttcatcagatttttcagtttgctagtttgaagtttgaactttatatgactccaattgcttgcatggttgttcacgtacacactcacatggtaacaccacatggttgacgtcggtttattagatgatcttcaatgtagtttcaaagttttgtgatagtgttacattttagcacaatagggaaaaaaatcttctccaattcaatgcaagctgtgtcaaatttgacgcaaaatatatcaacttttgcactacagtaaatactaataaaagtttaccaatcaaatgggtttttcttatttatatttatttatttagactcgattccaataaattattatgcatttattatacaatattgacttttataactattatttctgtgtagttttgtacagtaaaatactgctcaacagtgtgccagatatagtatttagccttttttttattctaaattcggtattggcattggcacttacattggacatgatcttaacatagtacaaaaatttaggtatatgctgaaagttatctggaatccagatacttatgtcatttttatgtagacactaagacaaaatttcattagatcattgtgttgagtgtacaaaaatgttcactggctgtttggtcagttatgctctgaatagattcagagcgttattttaactaatcctgttatggtacatttaaaaagatttatagtaaacttcatcatctttctcattcatatttatattgattttcttgttatataacaattgattcttgtttctaaatgattgacaggttgcattcaatcaataatcttaaatcgtctactttcagttctaaggaaaaggatcatcagtatagtttgagaaaatactatgaagaaaaagaagaaaagaagtcaactgcatggatcatttttagaataattcatttatttattttcctctcctttgctgattcttttttcatctttatgctaattatttgttctgaaatctttggttggcttattctttatgctgataaggagtatacatttctctagtttggatacctatatatgctattagttaaattaataaaacaaaaactcgagatatgcacacattgtgtataatatatttcccttgtaatatctagaaaaatcgtatgaagtgggtccaattttttccctttccaattaattgtccatttctttactataatcgaaaattgtggtaataccaacattttctagttgacactatacttgtatatattccttctgttcaagtcttgtcttagagttagttgagaatgtcaggtgaaatggactcattaacgaggtcatttgagtgtgtctctactcttatcagaggggaaaatgaggcataggtaagctctctctccattgattgaggatgtacaacttcaagttcaggatgctcccgatgcatttccagacactattctataataagttacaggctgaaaaaatgacgattgtcatgtgctattgaggtttgcagtctgtctctcttttgatttggttctctctcttttgttttttgtattcttttcaacaagtaaaaaatagtagggcaaaacaaagaagtgaaaatgtagtatacttttttttaaaaaaaaaaaaaaattgcagggagttttaaacataaaatgtatgctgaaaatgctgttttatgttggatgagcctttcccacatctcagaagtaatttatgttagtaatttttttattagcaggttcttcaaggcaagaaagtcttatttgaatatacaccaggggtgtggatgttggatatggtttaaggaaggaggagatcggggtaagttgataacttgataccaataaaatattgcaagttacagtcatggactgataagtggcataccatgttcaggaaaatgagaaaaatctgtgcaacaaaattttcagcttctaccatttgcagcatttagacacgtaagattcaagcccaataatcttagttgttcatggcttagtatgttgcatatgaccatttatccttgcaatttctataataagcatattttccacaattgcattctccaacatttttgaataatgatgtggagaactttataaagactacaataggaactgattacatctgcagaagattgacggtgacagccaactatcctgaggtatgaaatcctagccatctcaatattttttgttttatttaatccatttgtaaactaatcctaagggtgcgtcttgaaggcgacactgcaattggaattgagtgtaatttggagtaattactaggtttgacatgtttgtttaaccagataattaaacaacaatcatgtaattggatgaaaataattactcttttaaataattagtcattacacaatgttattttctatgtaattactaactctttgtcaaccatgaaataagatttcatgtgattaccacttgacaatcttgtatctgaaaatagtgtatttaccatgttgtgtattatgagcgttgtatttacactgtctcgtaaaacacaagcaatttaattgaagggtatgtgttattgctttctccataagaagtgtctgtatttttgtatttgataattgatagactctgcctaattttttttgtcatcaatgttggtcttgaattaaatctagtgtggaaggctgtaaagttatacataggttcccaaaacgacgtaaaaagttcatgcatgcaaatttttctaggtttcatctgtctcataaatgttatttaatacctgtggctttacaatctatacatggaaaatttgtgattcttggaaataaattccatacacattagtgagggtattaattttataacgggggaggttggtctaagacaaaccacctctctccttttaaaaaaaagaaaaaaaaaattccatacacattagttgagatcattgatggcaggtaattgtgatcatggatgtgggtttagaaataaagaatattatttccttgacttgcattgaatgtgtacattgttactcttatatatagagacaaagaatacaagaaagggagactgtgcaaaatcaggatactacatacaaccaagatcctgtttgatatcatcgaccaaatcaattaagcttgaaattgttgctgattttcccttgtagagaatcacatgttctctatacccataaaaggcttcaaactcaatataattgctaattttccacatcggatttggtttattttctaagttcgtatattgccttttataagttgtctaaagtggattgactagtattattctcttcatttatttttggattattttgtttttactccctaaaatataaggcagtggtctcctaacctagcctacaaatgtatcagtatcacttctcctacaaagtaatatacaattttttgcagcagccttctcttttctttctttgcatgttttctccttcattaattgtctcctacctacatggtttcatggtattagagtaaggttcagttaagcaaaagctgtacaagacaacattgactggtgaccgacgagagtagggattgatggttcctctaaggtctcttcagagactactcaggcctacctatccaatatgagatgcacacaatgcaatggttatggcatggattgtgaactatggaggaaaatgtcaaggagtcttctctatattattccactgcaaaataaatatggggtggttggacagttctgctcaacaagagaacgtgatgtcactgaatatttcaatgccgcggtcagattgtggcagtaggatcaaccgagcagtgctgaaaaatataagaaaacaggttgaaagagatataagattttgtttggcatgtgttttgattcagatcttgatgaaggtaggggttgatttgtaacagtttgaagagaggaaagcataaacaagctatgttaggggaacccaaatcatcactatgaacccaaagcatggtcagtagattcttaacagatcttggacagcaacattggtctgctctttaatggactctaaggtacatcaaa

SEQ ID NO: 187027 - DNA, 2178 bp, Cannabis indica
ccatttcagtttggttttgactgctaaatacgaaaacatatacatcatatactgttctgatacacaatgaaaatgcaaaaacatcttattttaaataacatttgtagatctttttctttactcaacattagagtgcacctgatcaccataacatctctgcatgactgcatttctttcaagtgtttccttcgaaatcattctctctgcaaaataagagactagctgaaacaaaagaaagaataagaattaggggaaagactacacattacaaagccatgcacttgacagctcagcttatctagtaactgaaaatcaaattggtaggcaaagaggtttaaaagaaagaggtagaagaaattataatataacaacctcttcgcaaggtggctccagttgcaagctctccactgttatttctctttttatcttaattttggtggttttgctagatgtttgatacgatgacttactatttgcgaaaggctgcaacaaaccagcatggcttggctgattactaatccattaatttccaaaacaatattgtaagaaatattcttaaatacagctcggaggaggaggcaatgccaacttactcttgtgttacctgtccacccacattttccccgaaagcacgtccacacagcagaacttctaagaaccaagcatacccaatataattaagctttggaatcttttaaggaataaaatttataatgtgaatagaaacatacccatctggttcaataaaaagagataagctcttctccccagaatcaccacccgagcactgcataaatagtgttaaagttaccacattacagtacattaaaatatctcaaataaacgagagaatttcatgaaaagatattacctttatacaaatttagaatctaaaaccaatcaaatcacatgaatacaacataaattgctcttagccagattggcagattagtacaaataccaaacaacaccaaaataataataattagtaggctctccttataatcttacaatatttgggagtaagagaagtatagtacttgctgctacataagtatccagaaaagactaaaactttagactctgcgggggcaaatcacatgcaaaatctacacttgtgatatacagctaagttgtctagagtttaaactttaacaatcatcgaagcacaataaaatcctatggactgaaaaactaaaaccagttactaacaagttacaactagacttggaaaactaaagacaatgtcaaataaagcattaaaccccataattcctaatcaaaacatcccaatataaatctaaaatgcaggggcagaagtgaaactaccattggacaaagcaaatggttgaactgcccaggtatagatatgtcacagtccacaccaaggtcgctcagtttattcttcaaaatctcaattttaagagaagaagcctcctccgtgttctccaaaaagactacataggagtaaagcttagttaacattcacataaataccaacatgggcagacaaacaatcttctacctccttcactgtactttctcaaagtaacttttttaataaaacaagcacatgattatctttattataatcataaaataaaaacctcaaacagataaagcagacatgggcttaaagggtcataccggttggggggtcattgacctgagatacattagaatacccattagtcttaagacagaagggctgaattctggagttgggttttagaggaaaagcagagaaagagagtctaaaagtgtggaagagctgtctatgtgaagaaggggttaaagggtttgagaaaaatgtaggcttgagaaaatggtttgaggccatgaacacactggtcgaggatagagagagcttgtgaagtggacgataaagaagacgcatgtctatgccaaaacagccaggttttctaatagtttttaagcgtttctatcactatttggatatagctataggctatagctatggctatggcttcttcttcgtttcaagctttcgaaagaggttgttgatatcttgggttcttagaagagaagataaaagggagagtaggggtttaagggcgcctctctttgtttcctttctctctctttcctcacttttgtggtgtcttaggggggaagacgatgaccagttgagcgcgcttttgctcttccaactcgaac

SEQ ID NO: 187028 - DNA, 4724 bp, Cannabis indica
aaatccaaatgaagaattcaagtttatataacaatagaaactagacactgcagcatccaattcacatgcttcagcgaaggaagagagcaacaattctagacataaccacaagggaagggagaacaaacaagctcacctcaactggattaattccaacgtcaataacgacagcaccaggttttatccaattacccctcaccatatttggcacacccacagctgcaattactatatctgcctgcctggttagctcctcagcattcggggtacgggaatggactatactgacagtagcattttcattctacaatattgaaatgtcaagtcattcaaataagctacagaaggaattaaaaaagatcaatattaagtaaatgaaatatcacctgcagcaacaaagcagctggcatcccaacaatattgctccgaccaactacaactgccctcttgcctttgatactgacgccagatctatgcaacaattctatgcatccttttggcgtacaaggaacgaacattggttccctatcacgcatggctaaacaacccatgttaagcgggtggaatccatcaacatctttctcaatgttaacaacatctaaaatgtttgtttcattcatatgctggatacaataaaagagggaaaacaattgaaacaattgaagccataaccttccaagaaaatagaacagacccaactaaaattcatacagtaaacaatatttaaggcatctaataactcgatcacgatttagatgaatcttttctagtttctttggggtcggtgaagcagctccatgaatgcatatttaaaagaccaaccctataactttatttaaggtagtagaatgaggtagtaatacatcaatgtcaagttaaaaaaccattatgcattgttaattcctgcatctcattctccttatacagactaaatggcagttcttttaaaagttgttactttacacgtcaaatcactttgtcttgaagtaagccataatctgatcccactaagctcacaattcacgattttgctttttcttttctaatcattatcaaaaattcaagtttgaaagtaagaagcttacagaaggcaggggcaactgaacaagaatgccatgaacagaagaatcattattgaactctgagatatggttgattacttcttgctcagtggcatcctcaggcaaacgaacttcaaaagagatgatcccaacagactcacaagctttcctcttgttccgaacataagtcgctgaatccttcctgtcaccaacaattataaccgctaaccctggaacaacacctattgcatccttcatcctcgccacctcaacacttatttcatcccttatttgcttcgcaattgattttccatcaatcactttggctgtagctgatgccgatgtcgatgcctccgttgaaaatgaagctgtaacaacatcaaatacatgaggggaagacggtattctcacaacccacaaagaaactaaataaaaaagctcagcccgaaaatcgttcaacacaatgtctcgatgaatagaaagctaaaagcgatcagagacttgtctgtaggaacatatgggttctaaaagatcgagagtcatttctcagtgcaaatatgcagcacacatattatcttaagaaatgtctcgatacgttagaaaaagaaaagcacacgtaagtttgattagatgtagaaagcagtataagtgagggagaggagagttctaccggtgacacgggtggacggtgaaggcgaagacgaaccaaaggcgagtgccctgcggggactgggcaagtgtgagggtgtcagtgtcacaagacgccggaggagcaccgtgccgtctctgaggcggaagagtgggtttcgggtgaaagggagaagacgagctgtggtggacgatgaacagtcggtgaatatcatagacgccattgatgtaccagttgcgaagctcaaagggttttacacaattaatcaatttcaagttttaggacacaagggtttttaactaaatactacttttttatatatattattattaacattaatatataaaaggtttatttgaaaagcaaggctctaaattatatagattttagaaagtggtccctaaattttatcttttaataaattggtccctaaatttcactatgctccttcaagcttaaacaatgaaacaaacactatatacatatagagaaattcattattcacaaatgtccctaaataatttgcctaaatactaatttggtttagtaatttttttttaattaataaatgaataagctttattgtttcactcgaccattttcaaccctttttctgattgttccgctctagatttttgtttttttctgaaaaaagtaaaaactaaattcatctaatataatgtgaactatatattttcaactaaaagtcaatttatttctaaactttgaatgcatttctccctttgaccatttcacatgcttagctagcaaacaaaacgatgatactgcgatatttttattttacttcaaaattaaaaaacggagaaggacaaggtcatctaaaattctgaaatcagagcccccaataaaacagacggggcctctgtttacacgaaaattacatgtttatgaagatcaaaatctattaatctatttaaataataaaaataaataatcaaaaatgctttcagtcaaatgtcagctgaactattttgtttcttcttcactatgttcctgtacattttgtccaatggaatatggcaatctgcttctatacagttcttgagtttgctttgcctcagccaatttttattactatggtttttgttgggcatgtgttattgttatattgccagtgttccatcagcaatgtggttttcatctggggattctgaaggtggaactttgggggttttacttatgacccgcgaaaaaccatagccaagggaacttccactggtttgacacagctgtagacagaaacaaatgttaacagattattagttcagatgaaaaaacaatacgaagattgattgtttccatataaaatttatggacacagagccaaagcttcccatgttgagtacctcagctagctcggacaggtggcgagaacgaaattcatttatggttgcagcaatctcagacattggtagtttagcctaaacacaaaaagatgttaaaaaatttagaaaaagagaaatatgttggagcagacaataaaaaacttcctaaaaaataacagagctaataatctgtcaaatttcagactgatacccacaccaatgaacatcatgattctgtccataacaaaccggataaatgaagacaatggcaaaagtaattcacttactgagaaggtgatgcaatctcaagagaacaataacgaacagatatatagatgagtttacagagcaatattatgaataatcatcaaagttatccatcaaaaccgagctcataatggtcataataaaaaatattagaagtgagataataaaactaaatgcaaataatagtacaagtggtaaatcagaagaagaccaactaattcgcatgatgggcactaaagtcaagtaaaaagccttaaaaaaatgaccaaacaacccttaataaatcaggattcaggtaaaggaatcttaaagttaaacaaaatgtaacacttttaacatttaaacattttttttccgaattttaatggaaacatgttagtaaattcagtgaccatatcatagagatggccagatgggttttggcgcatatttaagcaacctctaaacttcttgtaaagtacggacgagaatacatttcaagaatttaattactatctttcaaaaaaaaaaaaatactactttagtaccacttgaccaaataaatatttttgtaataccacaccaaatatatgtttttaaaataccacgagcttctagataaactagaaaaggagaaatcgtgtctcgctgtgagtgcatggttttgcccccaaaattaaaaatatatgcaaacatatagcaaaacaaaaagatctacataaaaataataataaaaaaatattacaccaatgtaaagcaattataaaagtacattttataccacaagaataaaatttaaatcaatatatgcattgcttcaagttacatgctccaagcaattagtcacatatgatactagtgacataaattatttacctgggccagaacagcagctgccaactgtagactaggttccaaggtctccgggacaacctggtaggatttttaagggtgagtgtactcaaataagcattataatttgtacaggaaaggcacatggctaatcactgctctgatttaagatactaagaactactacatgaatgagtcaatagccaagagaacaaaagatgacaaaacaacataacaacaaatattcgaagtccacctagatgggaataattgaaaagtaaatgcataatcagtatctgaatactagtagtgttaccgctgtggcaccagccttctccaaattaaggccgtgatcaacatcgtgagcgcgaacaaaagttttcacattgggaaaatacttgcttagagcccaaacagttctataatttgcaccaggtgtatctaatgttattgctgctgcacatgctctttcagcaccaaccttgtggagcacctaatcatccagtagaaaatgaatcaaaaaatatatcagatcatacacactacaactttctgatttttttttttttt

SEQ ID NO: 187029 - DNA, 3603 bp, Cannabis indica
ggaattaacttagaaacaagaacagatcatttattactttataatgttgctaaaagataaattattttagtacccatgaataactcatcaataaggtttcaatgactgggctctgttctattattgtggatgctttctgttaatttctataactgatgcaaaaatatttggaacaggatcttcagaaagttattgaagttttcatggggcaattgaggcaactttttggtctcaaatctgacaaccatttttttggctcttctggcatatccaagctattaactagtgaaagaggcttcacagtgtggtaagattcaaattaaaatgttgtgatccaaaaaaaataaatgaagcatcacttactatgaatatgaatgcatttttattttgatatatcaaggaatctcactgtattttgctaaaacctgcagttggtcacttccagatccccttgttaacatgtttgttatagtaaatcacttctttgatgtgaccttgtgttttatcaacgacttctcctgttgatgtcatataatggtattgcttattatattattaggtatgaattattctatttattgattttgtagggaattggatgtcttgtcgcggcaacaggcctgttttaaccttcgatcatgtgctaccacccttggatctctttccagactggtacgtctaaacttgttcggcatttgaattggttttctgcagcagatcttcatgacaagaataacacatttcttcatacaggttcagtcacttcctaggatgattattatggacgagattggtaaacaggtaacttttctgatactctccagtgaccgttgtcaagttacatgtgtctaatttttaactagactcttaaaattaacacaatgcgtggaaaatgagcattctatgctgtttagcttggacccaagtgcatttatagtagctccataaactagggacacaaatgtgtctatagcttctagccttttgcttctttctgatactgatagatctcaattcatctccacgagtaggtagcgtattctctggaggcagcaaaactgactcaaaataatgcttctcttggtatttatgatgcttctgctggtatgtgcctttaacttgttaatatctcatgaattgtccaaaacatttgatttcaagctgagaactagttttatttcttttgttatcagtggcatctggacaagcaagatctctggcagaggacgccttttttcacccatcgatcatgtccgttagctactactcattcgagcactgttttgctgtctactcggttagtttactaaaaacatcttatatatcccatgctagaattatgaaaattcattctctctcatatttaatcttcttccatatatatgcacagccattttttctgccagttgccatgcatgttatcttggcagctttaagagagtggagaagatacaagcaagaaaacaacaagtacttggcatggaagaagatcgaagtaatcaaagcatcttattaaaaagggtttttagcccaaagaatatttgtcagttttgatagtttatttttctgtagattaaactagaatgaatgctaactaacttcacaattgtgccaactaattttttcattaggagccagccactggtttcatttatacatgttttggattgatttgagttagcttttaagacaatttatttgcttcaatttacttaaattaggctccaataaaaaattaatattaaatatattaaaaaattcttattattattattattacaaaaggaatttcattaaaattcgaaatagctccattagcacgggggagaaacacaaaaaaataaatattataataaaataactaaataaaaacaataaataaatgagaagaattattataataaaataaacaaaatagcataaatataaatcaaaaaaaaaaaattgttcatttattatttttcttaaggaaaagtaactttttctcaaggatagttcttacattttttactaattttacatcacccatatattcactttcattgaagatgctataatatgtcaacaactatgaaccaaataccatatttgtgatctcacatttgggtgtttggaaaaaaaatggtaatttcagcacaattcacaattgtataatgcattataacattatattttatatcattatatgcttgaatttgaatataaggaaaatggtatccacaggcaacgagcagtataatatataatataaataaattgacaaaattaatattcctactaattcaaatttactaaattgcaacgaccattggggtttgataccaattcctaactccttagagccaatttaatcaatacaaccaaggtctttgaagacacaaaaaaagtaaagaagctatctgaaagctgatcttaatcagaacaaacacaaacatctgaagtgcatctgccatataaaaaatccatgacaagatcgagctacaaaacatataccacttcgaaaagtcatcctctcgattccaatgctagaagtatcttctttcttgggccctgttgtacaaaaacgagtgtgttatggctaaagaaacacagtaaatgtaagacaggagcattgtaaacattgaaagtgtatatatttcgggttgtttttaatctattttggttagggtaaaaagatcaccacttaaaagcctgagtagaaaatcattgcacattcaaattgggaaaagggaacaccaaacaaagataagtccatcagaatatgataataaggtttgatcgggagtaactaagggtacgtttgatcaggagtaatgaaatgaaataaattttaatttcgttcatttgttcggttgcattttaaaactttagaatatcatgattattccaagttctttgattgctcatgacataatacatattatatgatctttcaactcacacaggaaataaccaaaagccagcataagccaaaggaatgttaacatagtaactttcttctaacataaatgtaaaaaaaaatgaagaaggcatattagagctggaagctttaccattggtattcctatggcctttaggtcttcatcagtcatgtgtgtaagagctgtcatatcaacctacacaaacaacacaacttaaacgataaacaaaatgaattgtcatcaaaattgggatgtaaatgaaagattgttctaaggtaaacgtacttcctctgcttgaaatgtaatggaatatttctcaagacctaaggagtgcagaaagtcatccactgatgtacttgcctggaccaacaatgagtaatcaatcagaaagtttaaatacagtaatacagtgtttttggatcattacttcaatcattttagtttgtttttttttttttttttgtttcataagagttctttattatcaacaaatggtaaaaaaataattcattcatgccttttgcggggccttcttcttagcagctgaattggcaacctttctattctccggtgcaacagcaatagcaacacttctcctggttggcttggcggcctccagtgaaggcttatgtggatcgtagtttacaggctgtggatgcatactaccagaaagcttttcacg

SEQ ID NO: 187030 - DNA, 3519 bp, Cannabis indica
gaaggtctcggagtgggacctctcgaagcagacataccgaaaacatcattagcaccgaaattagagtttcttccaccggccatcatggagtaaaaatcggtatgattaaaactcgatcctctcggagtaggattccgagaggattgaagagagtaaatctctgcattagtgagattagaaggtctcggggttgtcgaagacaaaccctgagaccttctagaaaagatatcggatctagaggcatttgatctcctaacagtgacgtggagtttcccatcttccttaatctcagcctcagtctccaactgttgtctaccatccaaagacatgatatcagagtccacgtgtatggacacgattgaaccagcagtatcaggaaattgttcagaaatcaaaagcttagctcctctatattcaaacatgaataacataagagtgtaccaaatgatacattgaagaacaacaatttgaaccattaaactccctgagaaatctccatacataccctttaagagtggtatacccataacaagtgtgtttgggagtgtggataaggagaatagagttatagtccattccaaacaaccccttttactaaccttagaccaaacaccaagaacagctaaaacaatgagtttttgaagtgtatcagctgctatgaatctaaagttcatatggtaaggatcatttgttgaaataaaatggaatgacagtaatggaacggcgaaaagcgccacgaatcggtttatcccggaacactgatccggtgtgaaaatcttccaccattttactgaaccataggctaaaatcattgccacataaagagggaccacagcggtcattacatggtagaaatccaatagtgtaatcattttctcttctaagaacaaatctcagatcagagaatgaaagaaagaaagaaagaagaagtagatgaataatttaaactaagtttaaaagaatggtttgaagaagatgagaatatggtattggtagtagtgggagtgatgatgaaaagggtttgtaagaataaggaagcatgtgggttttgtgggatatggagtttctattttattttttttttcttttataaactttgatagttgtgatgagagaaagctttgcacacttctcttagcaagagtgagtgagtgagtgagtgagtgagagaaatgtttaatatgtgaaaaaattcttttgtttgtttcttttttgtactaaagtatatggtgtttggatggatgaataggggggtgtgtttggatgtggggtttctttcttctattctatttttctatctatgtatgtatatgtatctttcttatgggtctacttggttgtgtaaagtgggagaaaagcattttggttagaggtgggtatgtctctaagtagttgtatggattatagctttttaagaactttgtgaaaaagtttctacttttttcattttccttttgttgggttctctattaactctttgggctatttggtattggtattgggtgtgttaagatattatatatatgggctatatatatggctttgtgtgtgtatggttttattctctttaatcaatttttatcaaggggtgtataaaacttaagtaaaataaccattatattatactaactagacttggttaaggattgaattttgattaactagttagtttaaacaaagttgtcataatcaaaatttttaggtgagtatatatatgacataacttttttaaaaaagaaaaatgtgtgtgtatatatattatgattattaatgtactcattatctatgttaattctaaagtttattaggattttgtgagcttttgattgagataatttattaacttgactcttcatcaatatataagttttattttatgatgaatcaaataattagttaccaactaaactaaaattggttacaatttatttgaaaaatagcataaccatatactatagtaataaccaattgccaattaatcatatatatattggattttgaataaaaaaaaagaaagcttaaattgtatatcatatatatttctcttttttatttatttaagtatatagttttggaaaaacataaatgccatttataattatttaatattttaaattatttatttataaatattaattatatatataaatattcaaattgaattaaatggattactttttaaggtgaatttaaaattttctaatttaatccaatcacgcaaatataaatacttgtactttgtaaattgaataaaattaaatcgtacacattaaattatatcaaacaatattttctggatacccctaatggtaggtggatgtgcattttatagcaaatcacaaccttatatctttgttgtcattctacttagtcgtgagtttttcagcaaattatattgaggcctgagtaacttttctattgacgaaaatcagaatagtctttccaactagggcaaatatatcttggatgtgaatttctaggatctagaatatcaaatttcatatattttgattatgtttctagaaactttcctactagagaacttgtatagtcttaagaggccactagccaaaagactaaattagccatcccgatcgcaacacattcacgagtcacgatatgaacacatgcccccaagacgaaaacatgacctcaaattatattgaagagtagtgaagttcatgaattaaatataagtaatgtgtttttatgatgaatgaaataactagttataaaactatattaaaattgacaagtcccaaagaaaatatatcctaaatttttggccctaaaaatatcaatatatgtgtccaaacatatatatagttgttatatgtctatgaagtaatatatgtatcgatctagctagccttttgtgtcttcctagaacataaattccatttaataaaacaaccaaaacactactacacaagtggcatgtacaaattgaaaagaaaagaataattaataaaagagtgtcctttgaatctacacctaaatggtggaaaattatctatattgagatcattcttctagggagaagaaattataccaattaacaatctaccatatccacatcaaaatatacacgtatctttattagtaatgttatattttacttttttttagtgtctaataccatactgatgtgatatctaattaattagcagttttttttatattaattatgaaattaaaatatataaaattcaatattaaaatacgtcaataacagtatattactttttgtgatgcttgaaatattaaaataccccataacatttatctatatattatgggctataacataatcaaatgtaaattatagacaaggacaaatgcatgagaagcaaagggatatatctatatgatatgatcatagaagaatatatctaagcactacttctaacaacgttcagtgttagttccaagaacttagtgccaatattattaggtgtaaaatggagcccatgcatcatgcatgtaattcccaacccctatcactcattcactcattca

SEQ ID NO: 187031 - DNA, 6308 bp, Cannabis indica
ccaaagtttttcaaagcgaaaccgactgcgtcgctgattgtgttgtatccgagaattaagaggagcaaaagaagcggatatagctctgtggtctgaactaaagtaatcgagatgattaacccctggagcttgaaattgattctcccagtgatggttcacaaaacaccagtccagacgcgatttaatagtgctcactccagaacgattcttaatccatgtaaaagggtccccttcaaacaccgtctcatgaagcttacaatggtcaagagtctttcgaaaagcttccatatgtcgttcatttctaagacagccacccgatgtattttcattagagagaatctcattaaaatccccaatgactaaccaagggagagatggagaaacatcagcaagccgttgcaaaagcatccatgaatctggcttattttgggcttccggagcaccatagaaagctgtgagatggaacgtagcctcattatctgccttgacatagcaatcaaagaaagtttttccaaaattcagcaatgtaacatcaatgttctgatgccacaacagtagcagcccaccaccaaggccagatcgtggtgattccaatccattggcaaaatttaaagtttgacgaaaacgggaaatagaattctgtgggagttttgtttccataagaaacaaaatatggggcgattgttgtttgacaagcaatcgtaagtgcctgaatgcagacgggttccccaaactccgtgcattccaactcaagattttcataataaatcgcgggattgcaacgcaatctccgcggaatcatcaatgaagccatccgaatccatatcatcataggaaacattttgacttgagttctcacccatatcatcaatgaagccatccgaatccaaactgtagtgaggtgtttgcaaatcaaaataaaaacataatacaaaatcaaaccatattacatatctcgtaaaagcacatgaatagacaatccggagatatagcatttctaaacaaaagagctttttctatataaaacaaaaaaggcaggaataaacgtatgatatttggacacgtggcaatcatacattgtaatttgttttggaaaaacaccaatagagtttgtatgagtgtgtgcctttttgccttaccatctaagtttcctcatttgtttcacactctcactctcactctctcttctccactcctctctttctagggtttcattcacacaatctgtctcacaagttcaaaccttaagctccaaggtgtctcccttcaattccataccactctctctgttttttgtttttttttttttccgttgtacagttatttacagatcaaaattgtaacctgatgcatgaaatggagttttgagttatacaaatatttgtgtttattatatgtatatatgttgatctgcattcgtttaacttgatagattaatgcttatctgatcatgcaattttactacattttctgcttgtattgacttcttctttggaaatgatttacgtttttaatcaatattcttatggacattttttatttacagattttgtatacattcaggacttgtttggattcaggaattttcagttttgtgatttttacacttttaaacaaaagagagaactttttataaaagttcagcaaaagtttcaattttttttttgagaaaatcaaagtttataatgttagcaagccgtaataagtagcaagaagttctgaaaattcattacttgggttttgagccgtttttctgaaatgttccaggtttgccgtttggatgatatggaaagggaagcattgtaccagaaaggaaagaagaggccgctggttggaatcaatgatgaaatatataggtttaaagttttattacctaatgggacaactattggattgactttgccggaacctggtccaaaaatgccagttgatgagttcattaatttggtgaaaggtgaatattatcgacgttctaaatcaatgcaatgtaaaggacggattaactggaatgctggttctttatctcttcaagattcaaatgatgccaagatcacaagcgctgtgtatttcaaggattttaaaccacataagtgccacattttaatacttcgtgtgagtatacatgggaagtttggttgtagttgaaatggagaaaatgaaagagagatgaggaaaaaaattgataattattttgtttcttgaattgtttcttttagtttagtatggtatttttcaatattttgattgctttagttcttatgtttctacctgtcttgcttctgaattaggatggctctggcaaagttactgaaacttttgaggttagtactcaatctgctttatcttatcttagttcttaaaataattgagtcaatagggactttaatacatgtgtccgtagtagcctcacactccaattccacgagttgcagaatatgtgggatttgacgcctgataccgacctgttaaaggaggtcccagaatcgtacacatttgaaactgcccttgcagatttgattgtaagtgctcgtttcagttgaataaaatacgagtttagctgattgcataattttcttgtcaacattgtatttaatgctcttgtgtttattttatcaggacaattctctgcaagcagtatggtcaaacagtaaaaatgatcaaagacttattaggtattacattgatgtaatattgttattattgatacgtgatttgctcgcattgtggcttgtgatttttagagaattatttatgtttgtgctagttgcatgtgcaacttgcttgttttctttttccttttttgctctagcgtactacataaagggactgaatttagaaaaaaaaaagcatatccagtctgtgattgtttctctcaatatattttcactgcagaatatctaatattgagtgacattttgtttttatcttttgaacgcagttaactatttttaacttgctctgttatgtcattttatacactagtaacacaagatagtacatttttaactcttaagtaacatttgttgtgtttgtgtttcaatgtttgcagtgtggacatattacaggataagattgtaatctttgacacaggtacaggaatggatggcactgatgagaattctatagcaaaatggtatgtgctagtagtatcctttccagcattttgtatgcatttgaatttaaatggtgatttctttttatgtgagacataccagtgttttaattagcgtcttctacatactatacaggggaattatgggtgcctcacttaaccggtctgaaaaagaacaggctattgggggcaagcctccatatctaatggtaaaccagtgtattttgtcttgtttggtctttcttgatctttttacctatatccagcatatattccatgtttcctattgatttgcattttattgatcatcatgttgctatatcaattgaatgtcttaattgtaaaaatgtcttgtatcttctctaactgtaatgtaaagattacacacctcttaaatgctattgccttttattaaccaaatgtcactcaagtgtgttatgagtcgttttccctatttatgcagccttcttttggcatgtttgggtatgggggatcttttgcatctatgcatttagggaggtataaacagatccacttcttctattttgctacctcagagtcttttttaatagtaactaacaaccatttattgcctttatattctgtttcagacatgctttagtatcttcaaaaacaaagcactcaaagaaggtatatactttacgtctagagagagaggctttgctcagccgttctggctctgaacttaaatggacggtaattgagtagcataagcagtttcttttcctttgaagactaaatgattctattttttatgatttgacaatgccttgactaatcgttttctgtggctgcggttcactgtgtttgtttatattagactgctggaggtcttagggatccttcagacgatgagcttgcaaaaacaagacacggaagttttactaaggtaggctgttgcttccctttaatggctatcaggtgattcttcatgtgcatctgtaagaggagcttttctagcaaggaggggaggggattgccaccctacatatttctttcttacttctcttgcttattgtaactgtttgaagtgtcattgatgtgcattcaagaatggatcctttcttttttaaataactattcctttagcatttgcctagtggatttttcagctaatctatatgccttgagtattagcattgtaagtctatgacattgatgtgcctagtgagtctgtaactctggtttttgtgaacattaaaactattttgtaaaattactatactgatatgaaaattttgcaggttgaaatttttgaaccaaatataaagacttcagacatcttaggacttcaatgcagactgaaagacatatactttccatatattcaggttagctgtacttcggtttctctctctcttttcttttattgggagtttatatttgagttagaatgctccaaccatggagatttgggatggattctgtgtatattatgatgtagagtttgttgtatgatctttactgcaataccacccccaattttctcacttttgttatgtgtacattccttttgtcgggattgcagtgtgatgagatgtccaagtcagggaggacaattacaccgatatcatttcaggtttactctggtcttgttaagaaattttattccttgaagtttgtttactgattaaatatggttagtgtttacctgaagttattttatgggttctcactgacacgggtactatttaatatcaactactcaatggagtgctcaaaagaataattgtaaaagaaattatcatatgctggctggtgtgtgagtggattatcttaagaagaaaaaatattagtgtgaagtgtaatcttatcttatatacatactaagacatttatgtagtttttactttgtcttatttcttatactaagtgcacgctcatgcaagaaaaattgttgagctggttattgttacaagcatttgagttcatcatatgatttgtcaggttaatgacactgatttggctgagatcgatggtggtgaagttgccactacaaacttgcattcttgcaatggtcctgattttgtcttacaagttcatttctcctttaagcaggacagtaaaaccaagagtccaggtaactggctagtggctatggcttcttttgtgaacttgtgacattgttaattctctaattttatccacatttgcttgttttctagtgtcatctctgttattagcatggttttaattataaatatttgttctgtttctcaacttaaagctgtgtcaggatcaaggccatatcaagaagccaatgcacggctgaaatgtgtgtattttcctgttgttaaaggtaaattattatatgcatgacttttattttttcttgcatacacttgggaaattaaagtgaaaaatgtctttcagggaaaagagaatattgagaggattttggagaagttaaaagatgaaggacatgatgtctctgaaaattatgaaaactttagtcgcgtttctatccggaggcttggtcgtctcataccagatgctcgttgggtaagtttttaacttcaatttttttttacagtagaggctcctgggaatctttatacatatattgtctagtaagtattaacaagttctgcttgaaactaataatttactattggcatgaaatatatttatttagttttcttaatctagaatgagtaaaatcttattaactaagaactattagtgcctgattagtacctgggggttgaatttatctttgtatcatttcacatttgagagacctatttttaattgaggccagtctagtccttgcttaaagatgaaaataaatgttatcttaattgtatttcctttcataacctaattaaaacaaaatgtcaggcatggctgcctttcatggacttgaggcataaaaagggaagtgcagcacagtcattgaagaaatgttgtttaagagtcaaatgctttattggtagggtgacttcaacttttcgttttttgccttctttttctctaagagttgctacatatctgcactttgttacgaccaatttattcgtttgaggattttctgcattgctctcattgtattggttaaattaaacaatgccatgttgcagatgctgatgctggtatcaatccaacaccatccaaggtaatgctactctttcatttctgcagtaaaagttaagcaaatggttccctctctctctct

SEQ ID NO: 187032 - DNA, 8645 bp, Cannabis indica
aatttttacatgttatttatcaaattctaatattggattaatacataaatcactcaacttattgctaattaaattaggattattggagctataatcttaagaaatctttattctaatcagtctttattgattaaatttcagcaccatatgtgatccttacttgaacatattccggggaatcattcctccacttgggggcacactggacctgtctcccattctagcattccttgttttgaacgcctttacaagctcagccgctgctcttccggctgagctaccagcttcagagacttctccggtgagattttctcatgccactactactacttcatcgcacaagaaatggttgaggagagttcagggtcatgggaatggaatcagaactaagagttctagtgattctcattagcttacaaagtcctttaatggggtttgcttttttcattgatttctgttaaatctttgcctaatttgttctggtaatgagatgagatattaatggcttctcttcctttaaattatgcaagagcatcactattcactacctttcctgttacattattgtatttatataaatatgtatatggcattactttatatggatatgtaagaattttgataaaatcatgcacagcatctgattccaaacagttatttaacagtggccagtataaaacattaaaaacctatatattcttgcttaatggagaatagtctgattctatctatttagagaaaaaactagtttatgtttattatgtcactacgaaacttcaaatttaagcttgaatagtcttaccccaattgtcaaataacattatctcttcatttctggaatgattcctttgatagtataaagtaaaataagccttatcactttgttcagtttgatttggttacattatgtgaatgagtactgtttcatattcttgatgggtggtggggcatcatggtgaaactgagttcccacattttattgtttttggtggaacaaagttaaacaacaagaagagtctaggtttattttcggtttctccaggaggtgtggtctgaatggatcttggagcgacatggaggagaaataggtcttcatcttgtgagagattggcagttatagtcatgggtcttcttgctgtgatttctcctctctatatcgaccgaagagaggtcatcgatccagaggaagaagagactagcatagatttcgaatcttggttgcctcttttgctcttaatcttgatcttagccattgctttgtctttgttcttggataaaggcttaaccaagtttgatccttactggattcatagggttggtggttcttctggtgggattctggttattctcttgattctggctttggttttgaagtgtaaagcgtctttcggaaactaaagaggtttgagacttaagatgaggaaagaacccttttaagtcttttctctatggcttgttgatatatgcttctcacttctcagttttacatatctcatagttcttctaatatctcttattagagaatagtaagtagttaatattattaacttaaatgtttattaatcttgcttttgctttttgtttatatatatttatcgagtaacatatatgaatagaaaacataattaggattctgattttaaaatcttgtattgggttacctcaaatggttatgtagttttgcctccataactaaaaagtgtatcataaatgaatttaactggagctcgcgatggtgaaggaattggcttgaaaagaagagaaattctagttgtaaaatacctattggactaagtcttgcaacgagcgtaactctcgtatttagttgccaccattaagtttggaatcctaaacagactgttggagaaaggtgaggatgacttcaagtcatcatgcctctcatgtcttgggcgacacacttgctacaatagctgagacaaaatggtcgccatcccaaacacctggctctcaaatattgtaagattagtcagagacccgagtattaaaagaaaaacaaaaaaagtgttagctatcaggttttttctttttacatagttttcacagaaggtgtgtgagtatatagcattgttgatgttaacaattttaaccaagaactcatcaaccttaatgaaacaaagtctcataaattttacaccgtgaaggaaaaatgtaaagaatgaatagctctctacatccaataacaaaaaacaacaaataaaacaagatcaagcctatcaatacaactcattgaatcattgatcacaatccaaagacacagcccactgccaccaaaattgtagcaacaaatgttaacaaacgattgctactgaagcgatcatcggcgccattacaaacgtcgttggcgccactaaagcagccgggtttcgttaccttagcaacacctccatccaaaacaaagctactattcttcttcccactgctaaacaacacacaccagaaataaggacccccaccatctgaaccagacacagcagcacccacttcagtatggttcttactatacaaaatgtctaagctcttttggttttccataagaatttccgaaaacgctttgggtggttttgcatacttggactggcaaccaagtaaacgacctgtaattggtgaaagggttgagacttgaacaccacaggctggtgcaaaagtttctgcgaattcggagtcgaatggcttcttggcttttggtcctcctactgctttacaatcaccttgataggcttttatgtactgaagagcaatgcaggccagaccttggttactgtaaagggatgaagatttgtgtgctgttctgttagtgttaatcacttctaccaactcatccgcagggttatcagttactttcactgcaatgtttataaaaaagaaactcatcaaatcttatgcattatgagataatctgtacataaatgcatgacttcgaaaaccccagaagattaattgtctgttggaacatacaacaaccagtttgtgagcatatatgtatatatataagagcttaatccaaagtagacgaattaaactaaatgatatagtgcaaagaatatatttgatcttgatggcattacttgttgagagaacaaagatttatataaagggtaaatagcataaatttaataattttttttaacgatataaatactcaatatttataaaattgtaatattttttcagtttcatcagtactctcaaacagggcacatataatacccggattttaaattatttgatctggacggaaatatgtagtattggttacttctaaatcttcttttaataaatttaaacggagcttaataaaaatagaaaaaaattacaattttacaaatattgagtacttataccattaaaaaaacattagatttataccgcttacaaattcaaaactttgtgtacttgtgctggtatttacccttaaataaatattatagaatacaaattcatacatactgctttgatagttaaacaatatgatttcctatacacatatagatatctaccaaagagttatttttgtaatggggaaactacttacatacaaaaaaaacaaacataaattacaacaataagagtcaaataaaagccatatactttcaatttcaaaactaaaaaaaaagacttttcttacaagaaagaacaaatcttttcaaccaaattgcaaataaaattctcatttaagtaattttgtagttatacacctataattacatgtaaactcatacatagagatcttaatcaaatagatcaacataattctatatatataagcaaaaatatcaaacagatctattcattattattagtagtagtagtacattatgggttccaatccaaatccaatacttttaacacatttccccaaacaagaatataaattaaaccattaaagagaagagaacagaaaaatacgtactttgtgtattaataatagtatcagcagcagtagtagtagcgaagaagaagaagaagaggtagtaaaagagcggaagcaaaagaaacgacgccgttttcgccattgatgattttagatcagagtttcagagttcagtggttagtgcagttcaatcaaacaacagctgtgtttttatatggtagagtagaccgggtcgacccgacttgaatccggtaatatgagtcggatttcggaccagaaaaacgacaacggattttgtatctttctctttgtgttagttttttgtaagggtaaattcgtaattacgatgcgatgacgcgattacaaacaacaaacggataagatcttttattttgcaagtattagtccttccactacattacatattataatttggtcccttaaagctttaattttaaccaattgaaatttattattttttattcagaataatttgcggtataaatatctaaatttaactcaagttgcagataaatatttagtttaattatctgatcattaagtgtcaagttaatggcacatgattgttctatataattaagtttttatttttatttaaataatttaaatatgccaataaaaaataacatgtgacacttaacggataaatacttatgaaaatttcagaaatatagcttaaatatttatctacaactaaaaattaaacataaatatatacaccacacaatactctttatttatcaattgctttagaaatatttacaccataattacataatattttaagtttgtaattggtaagaacttaatggttatttattttatttttaaaataatttagttttaaattagagtttttcgtttttaaatctatagctatcagaggttttttttttctctgaccatgcttgtcgacctttgttgggctgatatacggcttggtcggaattgtattttactactgcaatgtgattttcgctactgtgattagtcttatcactgtgatataattttgggtattttagtcttatttctatgtcatattttgagtgttttagtcttatttgtatgacgtgattttgttttgttttatttcgttgttggttcttctttgttctttgatgactcgctatcaaatcattattagtgattaggaataacaagttctctacaactgaagggattgttagtaatgcagttacgcacattacacaatagttgagtgctcaaattacgaggttgaatgaacctgctgcaataatttctaatgttgtgtcttctgtgttgtggatgaaatcaaatataaatattcttaaggttaattgtaatattgcaatctttctcatctaattttattttaattttttactaaataatttgggaattaaacggttaattattttactcgtttttttaagtttaatcctaatcgtaatatcctaattaaattgtaagatattattttaattgattaccattaataaaattccaatataagaaaaacctaaataattttgctaaacaaagttatggttaaagaatgagttttcatgtattatctaattcaattagtaaggcaaaggacttaattgtcaagaaaagaaaagttgagggctttaattgataaaaaagactataaggactaaaatataatatcaagattttatcttaactgtaataatctctttaactaatttgggaaatagagaaaaaggagcttcgtttcagtgtgataatggcgatggcgcgcgtagccaccactctcttcccttccacagctttccccataaaacaacctaaccggaaccggagtaatccgccgccggtaagatgctcgtcgatcgcgccacctctgagtagaagatcggtctccatctccatacttctctctcacttgcttcttatccctaatcgtacgcttctctcactctttctcttcattttgtttggttagcgagaaaattttactttactaaggataatgacagggaaactgaaatagcttattgaaattttttaacgagggagttcaccaaactcgattacgatttatgtatgagtaatttcgatataatcagattgaattttatagtttatgtaaattaaattaagataaataaaaaataaaagtttaataattcttttctaaaatccgtaataaaaaatctgataaattaatttaatcaaaaattaatgtatttaatttgctggtcttagattattaatttattttttatttaaaaattaatttaaatactaataagaaaatgatgtagacttcacacctaacaatcagtaatataatttatgtattaaatattaaattagtatttatgctataaattactttatttataaatgtaatttatggtgtttgataaaatttaatatgagcttatgaagaagaattaaagcaatttaatatatttggtatggtctgtttggttagtcttaaattgtctcatcttaagggtatgtttggagagttagaaattagtaagtttggtgtatttatttaatcatgtaattagagataattgggggtttcaattataatatctaattctcatgaatcattatgagagttggatgtaattacgaaatgtattatgatattttgccatgtgattaaaataatattgtacattaaaataatgtaattaccatgttgtgtaattagtatttattagactgcccatctattaattaagcaagtaaagtaaagaataattgttttatgagttttgtgttgtgttcatatttgttacagatgccattgcagctaacttcatggataaatatgtgaaaaggtaaaggactgaaattgaatgattttttttttagtattttctgtttttaaagcattcatatttgtgacaaattttatattataaatcaggaaaaagcttgatcctttggaggcttatgtaccagctgttatattgagccagtttcaaatcaaggacttgggtaattaactaatttaagtttttgattttccaattttcccatgaaaagaaaactaatttgtttgcttagttataatcatttgctcttaacaaaacatacatcattgttcttaaaatctaacataaaacaacgaaaaactgcagaaaagacattggaagctgatgaacctcagtatgattcttgtcgatctcttcttcgttctggccctgctgcatctcttcgcataaatattcgtgcggtaactagttcttgtgcttatcttcatctttaaaatttagtaacaatattgatgacattcaatctaatgtttgtaagcttctttgtccatgaagattttccttttgttcttttttatgcattgcttggaagctaagttactcccaagacacatgcatatgtttaatttatgtgtgtggactgtgacattatacatttgcaatcatttatggcaatattttaaaacacaagccaacattctcttcagttgtcatcatgtgatgtgatcatctgggtgcactattgaaattgaaatcatatgattcattctttatgctcattaaatcagcttgatgacagtttttgttttatatttgattgagaaagttcctaatatgtttggcaattttcttcggaggtttaggtggcacaatatgcttcagaaaatggaaatggtaaatccgcttccgatgacgtcgatcaatgtctcaggtatccgttatcagctccatcgctataagtcactttagggtgtgtgccaacactctagaacatgtcatatcactattggtacattttagtaataaggttctatatatttataaaacaaaaattacaactttatatctaaataaagattttaaaatcagtgtgtttgaattgaatgaagggcattggaggaacttgactccttacttttgcatgcatcaagaaaagatccaggagcttcagttaagtcgatgaaggcacagattgttgttgctcttgattcactagaagggtaatataatccctgcattgttgtgtatgttaattatcgtctttaatcaatcaatcatgtgtgaacaaaaaaagattagttctttaattaataagaattacaacaaacactactacaggctcctcaaaacggtgcctccggacgtgctcgataaagggaaagccattgctgattcatataggaacacagaagaagaagaagaagaagaagctggtagtcaggtcttagacccccaactgaagcagctccaatcaattttgtgatattgtaagtgacaattcaactattattatcatgtacatgaaagacaaccttttatcttaaagggaaaggtacaaaaaaaagacaattcaaattcaatcttttagataaaccaaaagtgtaaaattacattataaatgaggccattttgccaataatatcttactcatgggatcttatattatgtagacgttttcccacatgggatcttgtattatatttattaaatggatgaattttatgtataaaataacataatgataacaaccatattctcatataggtacatgatttttttccacattttgataattacatataatatatatataacaaaaacacccaaagaaaatatgcattagattgtcattgtatggaatgttatgaaataatatgtccaaaataccaaaaagaaaaacaaaaagaaaaaagagacaaacaaactgatttttattgtaacatattacatataatagagaaaaactactacaacaacatcatcat

SEQ ID NO: 187033 - DNA, 2793 bp, Cannabis indica
aaaaaaaaaaaaaaacttacttaaattcccttcttaccgaccatatttggtgcattgtacttacaataatggattttcaattaatttataataataataagggactttcacttttaagaagtaataattaatcatcgcgcgttggagaatgttagcaactgcaataatgtgtgtttatacatatagagcattgctacatatttctcaaatatatatatatatatatgtgtatgattgattcattaggtattaaattagtttggcactaaaatatatattatatgatcttattatacgtgggaaatatgtaggtcttgacaaataacaatgcccctttaccgttatatgtcactccattgatggttgcccactttggtaaaagttttattagggtatggcccatagcatttatgccccatgtgagaggttgcatgttcaaacaagtcaaaaaagaccagtctcatgcatataattttgttgtgatagttaaagtgggtgttttgaataaagtcttcaaagtttaactgtcttttattgtgtgtgttttgaaatgacattttttttagccgctgcaaatttttaggtatttgaattgaatggtatgttcgagttgaccaattcaaggtttattgtttcatttcccgaccgggtcgcatcttgattttgatagtctatcctatataatctattatacaattattggtatatatatttatttgaccatctaacatatcgcattacagtactaaatataatgacatacactataatacagctcctatttattatttactataaacagaacgcaaatatggaaatttatttcgtacatataaataaagaatagattgtttctatattagtcatctacaatttagatagggtgcgtagtgctgttttctagagtaatattattagatatagaaagaaggtcaagccaagcgggctctatcacataggtgctttaaggtagaccttgaaacaaataattcacttaaaggtattggatttctcatagaaatttatttatttggggttagtatatataaaaatgtgtactaattcattatataaatgagtcaaataaatatgtgtcctattttagaataaaatttagagaaatattaaagggcacctgtctagtactcttctatttgttaacatcgctattagtctaactaagtatcgagtcctatataatttaatataatagtttttaaagagtattgctagttaattgcaacgcgacatgtcgagaaagtgctaggcaccattggtgcctaacagcaatgctctaaaatttattgcttaagagcatgattgtcataattttaatatgtggatactattaagacaatttataatttaatgaggaatcaaattagaaataataaataaatgattaattactattttctacagttactaataaacaaatattagttcttattttttcgtcatcgtattatatcgtttcttttcatatattcttaaattcccatgttcaagaatttttttggtttttagaaaaaattttgacaaaaaattagaagatcataccatttaaagtcgattctatagactccggtatactttcactaatatttaattttattctttaatttttatgaattaattaaggttaaggctaaatttaaatttacagtattctaacaatttcaacctatactttcctctttattattgattagtaattttttatattatttataaaatcaaaatatataagaccgaatgttaaaatatattaatagttataatagtatactatttcttgtagtgcatattaacaagttaaagtaccccttacattaattgtttatcaacacacgtttaagtaacccttacatatactgtttaatttaccatgattgtttttctcttacttagcttattaattggacgtagatctatacagtttaattattattattattttcatcatttacctaaaaatacccatattattgaattttcacattcagttgagtggaagaataacacggtgagtcaaattataactacttggtcaaaagtttatatttcaaatttttttcttaaaaaaaaataattgattattattaaattttaaaattttacaataattggtggtgtgctgatcaatttgtaaactgccgatagttaagttaaaaggagaagaataaatatggtatgattcaaaagggaactctcgacttattttttaaacttaaagtatacaaataaaagtggtgtacattattgagggcatacatatcattattatatttggatttttcaatttttatatatagtatttttacttaaatcattgactatatgatctagcaataataaataaatgtttttttttacacttttgaaattttgtaaagacactataaaaatcttgactaaagtttcaaaatgacttgactaaggtccgcttgtacgtagcaatttatagtagaagtattcatccgattcaatttgtactttttgatcaaacaatatttaattcgcactaagtgcagatttcatattttggatccaatccgatctgcataagagtttaaatccaatccacaatagtgcggattgaatcggttattttgtatcggttgtttttttaatgataattattgaataattagcaaatttactccctgaactatgtcactaccgacttgtggcccctaaaatatacgggctgttaaaaaaatctccctaatatattaccactatattaatgtaccccttctgttaaatttttaacagacacacgtttattta

SEQ ID NO: 187034 - DNA, 2965 bp, Cannabis indica
tgttagcagcaacttacaactagtggatgccttcactaaacccctgccatacaccattctccactcacatttacccaagatggccatacatgacatatatgatccatcttgaggggggtaacaagatttactctatcctctgtctactctgctgtatgtactaaacattggaccgttagtgattgtttagttggttaattggttagtagatattttaggtggttaatagatttttctggtatctgttttgttatttcttggtttataggaatcgggtccccttctatatatacctttcccctttgtattttactcattcattcaattcaataaaacactttctggttttatattctcttccgcaatagatgtcaagttggcaaaaaaaagaccattaaatgaagcgagctttacccgatgatgtttaggtggttgaccatcctttttgggtgatgtatatcaactaccaatgattggagtatgtttgaaattattttgcgatgacacatacaacaaatttcttactgaaaaactatttatctaaatagtatctaagttatctagcttcttttcgaaacagcaggattctttgtgaaaattagttcaccgaagtgtttctaaaagatagctatttatcatagtgtaaactgaaaacccaatccactctctctcatacgaaccatgacaattttaattttaaacaatctaaagcaaagcagctgatctgaatcaaatggatcaagtaactgtaactaagaaaaattcaaaatacattggtttaatatcatagctaagaaagtaaacaacagccgtcttttaattgatcatcaaatggatcatgtctctaggcatgccactataaaatttactactccgaagtgaagtataagaagcaactcctttcagaaaaatgattcaagaaacgcaggagaggcaatatgaaaaagaaaaagcaggcatacaaagaagcctcgtctgcccaagcaaacgaggctaaatctcttttgaggccacccatcccatgtactttttttttactgcctttcttgttaagaaaagaagtcaactcatgatgcaaccaagtcaggtgtttctgcctcgatggataccaatgcggtgtgcactttatccaaccagttgtccagccggtctcgcaacgatttgatctgtggaatccccaaaactcttggttgcacccaggaaacatgcacggttccatcaacttgatcgattatgccttcaatcagatgaacctgcaacaaacattcccctatgttaggaatagagaaacaactaaaaaggcagagaaaacaaacatcatcaacaatcaatgttcacaagcaccaattgtttcttagaagacaaatacactgaaaaatgactacagaacttgttcaccaaaacaggccacctacagaaaggtctgcaaatacaaataaaataagcaagactactaaattaaaagtaaagtgattttggacgcagaaaaaaaaataatgttagtaaagaacagataggctttactctccaaacacctccaatataatgctggctagctatagtatgacaatcaagctggagaagaacatctcacaaggatgccagatacatcctttgttaaacaaaacacattcaagattggatacgtgtgcatatattaacttatcatatgaagcataaactactgactaggaagttatgaatttaactcactctcagcattgctaaatttaaagataaccataactaaattcagcaaaaaaaaaaaaagataaccataactaagctctaaactttctgatcaatgttctaaaaaactgctgaaaaatcggcaataataaggaaagacatggttattttaagccattaactctaggataagacatgtctcaaacgaataaaatattgaagacgactttgtcaatctcaaggcagtgctacataaagaacattatttactttttattactttgtaaagatcacaggttctacaaaaatattgatcaattcagtgctcatcaagatttcaagtgatgaacttacagaaagactcttcataaggagatgctccacatcctcaatggaaagtttagtgcgctcagcaattatactcaaaggtatagtcctgtcgtcagatgaccgactgcaagaatacacagcatcaacatggttaaattctatatagagaacatacagaattccttttatatgaaatgataacaaaaaaataaccgaacctgaagatgatttccatcaaacatagaatgttaatcttttccactagcttcttctcattctcaaccagcgctggctgagcactcaaagcagaattgtgcacacgacataattcctgatagcgaactaaatcaccagtattgaatgcttgaagaatatagtacagccactcaacctttgtccctagaagactcttaatctgaacaatgatgtatcattatgatgttatcacaacaaaccaggatgataaactagagtacaaacctagaattaatgccatataatactgcaactgagctgtatgctaatgcaattgaatagagatttttaaagataactgacagacatgaaagagatggcactgcctcaatgggcaggaaatctagtagtaagttgacttgacataccaaacccatctaagaatcataaagcttccagactaaaaaaaaaaaaaaagacttccagtactaaaattcacacaattgtttttgggtaaatgcactttatttggtggactaaagtggccctatttctgtcatagaagataaacaacagcatatacatgacatccttcgctgttgtgaaggacctttttttataagatactattaaggatttcaccttgtactagtactctagtacaccccaggatgatatatagcagggtatgcgaaggcacttcaaaaatccagagaaggaaaaactttgaaccacggacatggaaaatttt

SEQ ID NO: 187035 - DNA, 2704 bp, Cannabis indica
cgaatgaaactatccatggaatcatgtgccgtgtgaaatgtagatcatcgccattcttaactaagctggacacaatccaagaattgcagcagattcagcaactagctccagatcaacattttactgcagagtggaagcataggaaaagagtctaaaagactgaaacccagcagccttgtaaagctgtgaaacatggaaaatgggatgcacagttgaagcctaaatgcttctgctagagtattttctatctatccaatgcaccaatcagacctcattaccctataagcctcactttcccactttactcttgtccaacacatacctctaaacatatttctttctcctagcataagtaaaccttatagaaggcctatctaaaatgttaaattctaaacaggggtgttttatatggactgaactcaactaatactatccttatccttttagattttctcccaggagcacatctctttcaccacatcaagaatacatgatagtacagaatttcattgtgacatacattactgaaaataaaagtaaacatccagagtttcctcagtagattagtttatatcaaaaattgggtgagctatttaagtgccaaaatttcaagcatatgcaaaacacggggcttcggatatcaagttcaatgttcttttctcttaagctcaccatttcaaaagcttgacaagtaaaaagcttatgcatattattatttttttaccattcacccatcctcgtttttttaataaaaaaactagcctccatgcctaaccctacaatatttgttgaccaagaaactatagcaattgcaggtacctagcagagacttgaacctcagaccttgtggaagcaaaccacatgcctgagaatttgaggtaaccctcttaggtaaatccatcttctctttcaacctccatttcaaatgtaacatccaggccttcaagctatattttctccacaactaagaaacatgttaaactaagcttcaaaacttaatattgggttgctaataatcacatatttttcactatcatgtgatcataataagtatgaacagaacccaaccaaatcaatgtgcacattagtagaagacaaaaagacaatgtaagctggtgaactactgcatgaattgtacctgccgcttgaggaacctgttttgttgattggcttcacttaattttctaagaaggttcgccctctcagagtcagcaagcagagccttcagctgtgatttcaacatagctttacattacattaggaactaaagaacagacaaatcaataagacttcattacatccaatctaatgataaaacaaaggttccaatcaggttgatgtggcagcaatgcgcatacctcgttactgcttatggttgagcaagaaactcctctggtgaatccttagatgtcgactcttcatcatttggactaaattctgattctagagatgaagactcctcaacgttaataggcatacaatacaacctctgacacacataactcaaatgatgcctagcttgagactgattcaacctctgatggcccatcttcaaattacaggaagccatgttatatggcaaatggtgaaatttttccttacaaaatgttcttgtattccgggaaaaacatggtgcttgttttacaagacagcacctagaccaattacaagaaagtacgataagctcatcgaaacaatgtcgaatcaagttattcttaaaattcttgaaccaaaaactgacagaagaatcatagccaaagcataattctcaccaacaaagaacccaaatgtcaaaatacaccatagcttgtattggaaatatttaccatgaagaagagacaactaagcaatgcattcaggaaacattgataagacctaccttgttgaacccatctccatcttggaaatcccaactgaaaatagaaataaattattaataataataataataataataataaattaataagagccctatttcttgaacacaagaaagtaagttagaaaaaagcatttgaaatcaaacctgtgtacaaaatgaagttcacgaacagaaatcaaacgttgaccactgtgacaaacaagtccgagaaagcatttgagctgcgaaacataacgattatacctctgctcaatgataatggaatccaaaactcagatttctaatttataaagatatagcagaaacattgtgctctgttaattaacctcatttcgtttttgacgaaagcgtttcacattcagttcaggttagtgagacatggattggggatattgataaggtgtactaggtaccaccaaataccaagccaaaataaatattgattaatatataaattaattagactaatggcatttatgatcttaaattatttctaactttgcaccaaaaaaattttgcaccaaaaaaattagacaatatacattttttttttgggtaactaataaaagttaaaataactaaagtaacaaaagttacacaaaaagtggggatttcttccatccaaaaaagtttattatctattttaaaagatgcttgaagaaagctaaaaaataaaactttaatatgagataatcttcaattcattcatgtacatgactaaactcctagtataagttccacatcttgagcccaatgcaaacctattagtatgctgctctgcctaacgaaaaagagaaataatttaaaagtaataaatacttt

SEQ ID NO: 187036 - DNA, 7919 bp, Cannabis indica
  modified_base (7777)..(7777): a, c, t, g, unknown or other
cgactcgaattcagtcgaggatcgattggcgaccgtagcattggcggacaccgttgaggaattttcctcgccgcctcctaatctggaaagtcaagacggtatcggttttgcttcggcgagcgagggagaagatgaggacgctgagaatgatgaggatgaaggaggtgtggcggttggtgagggttttgtacgtggtggtgttgtttgggggagaactgtttcggagattgaggtggatgcgccgggaagccctagtagtagtgggtatgctggtgaaagaggaagtagtggtgcgagtagtggtgaggttgagattgatgaagttggaaatgatgagataaaggatttgaggaataatgatggtgagggggttttggattcgcaagcctcttgggtgcctggaaaacgccatgttgatgaggtactcacttcccatttggaatttgtattgcatgttagattttctcagtgattctcagaatgaaaggactttaagttagataatttcttgagtgattttctctttaagttagataatttcttgagtgattttctcagtgattatccaagagaaaatgtatcaactggtatttgagtttagtgtgttgaaacatggaattttgaatgaacttgaattatttctacattgaaatctgtaaagaaaattagagtagtgactctaatctttctttgctctttttttttccctttcccttttttgtttatgttattcttatacaaggattcatataaactaaaaagcttgcatctttagctagtttaaagttatgtcataatcagaatcagaatcagagaaatttcttattagcttttggtaaaattggcaagaagggcatgttttatggcataaattaaaattacactgtaaataaaggcatacaatacaaaattaccatataaaacctagctgagttttttagttatatcattttgctttcattactttgccaactggcagaatctatgatgatatttgcagtgttatttgctgtttgattcataattgaagcgcaggatgatgcttcagtatcatggaggaaaaggaagaagcatttcttcattcttagtaactctggcaaaccaatatattcgaggtctgcctctcttacctttttattttatatgcataatgaagtgcaagaaaatgtgatattgttttttggtgtcttatctcttcttttgattcttttattaacttcagatacggtgatgaacacaagctagcaggattttcagcaacattacaggctattatttcctttgttgagaatgggtacaattcctgaatccttttttatgcattatattttaattcaagtcattgcagcccttgacactgattttcttcatacagaggggatcgtgtcaaattaataagggctgggaaacaccaggtctgcttacttactatatgtttaaagctttcttactgaagtgttgatcatacaaattagtaaagcataaccgctagttatgcaagcattggcataatttacacaatcaactttaggtttaatttgctgttctgaatgtagaaaaattggaagaataatgagaacttcctttttatactttgaacgagtaactccatgatatgagactttattttactgggccacctatgcggtggtgtatgatcagtaatttatgcttcacaaaaagtaacaaggttggagtgtgatactaggtttgaactcaagtacaagctcctttaagcgggtttaagcattctgggggtaaaacattccggttggaatggctgaatggatttcaaaattggcaggcgaggcggttcaaaaccaaatttgaggctatgcctcatacgcctcttattgatgaggcacacttgaggcttaattgtgtgttaggatggttttattgtgggttcacttgggctttttttagctgtttgtcagggctgcttttaggattttaaaagatttaaaggggctttagtttgggcctttttttagaagattttttataaataaaataagcaagatgaatgaaaacctaaaacactatttctcaaattcaagggctcctaggctagtttgtttctatgttgctgattcttctaatttttattgtattttttgagttgcttggtttaagttaggacgagtagatgtgaacgaaatgatgacttcttggagatttaataaatttagtttatgctagacttataactagtaattttatgattttgacatggaaggaaggcttacatctcgtggtactaagggattgagtcctatgaacggagaaaccttttaattatactgttattattcataagaatttactccctcatatacgttgtcagttaattaactggcatgtgatttcatgttcaggtggtttttcttgtcaaaggaccaatttatttagtatgcataagctgcacagaggagccttatgaatctctaaaagggcagttggaattcatgtatggtcaggtagcaatgaaattttaatacctcaacctattttttccatttttaacatattattgtcttcttgttttcttgccttattaatgaaaccaacttgtgctcccaactttgagttttatttgggaacaaagttcttcacgaaattctcttatcttcttttgtaattttgcatgcaaaatccatttcttttccttttttaactgtaatatatggatgcagatgatacttattctaacaaagtcagtaaataaatgttttgagaagaattcaaagtttgatatgacatctttgcttggaggaactgatgctgtcttctcctccctcatccattctttcagctggtttgtgtctcatctttcttgtaacattccttaattagttttgtatgtagatttattgtgtcctttggtaaaagcatacaagggatgttattgactgtctctttgcaatttcttccccttcatcttttttcttcctgaatacgtatttctttgctttcagcaacccagccacatttcttcatgcatacacctgtcttccccttgcttatgcaacaaggcaagccgcaggtgccatattgcaagatgttgctgattccggtgttttatttgcaatattaatgtgcaaacacaaggttgtaattccctttccttttcctgcactatatgcatttgaatcatgtattagtagagcatttaataaaataggagcttgattgcaggtggtgagtctggttggtgctcagaaagcttcactgcatccagatgatgtgctactacttgccaatttcgttatgtcatcagaatcttttaggcaagtgtagttttcttttaatgacaatttcaacttaaggtttttgcaaccaaggtgcttaatctgctttctaactatactctagttgcaattcttttcaagaagaaatattttgccccttcctcgaaaccagctctgccttaatttgggtcaatgtctggttcgattgtttattttgtcacggattttgccatattctctttgcttacatttctaagttatcggttatcctatgttgtcttaagcaagagcattttccccgtgcattatcatactaccactgagagtgcttcacctcgtaaggtgttttcaagtatttaattttttgttagaattttcttctcattttaatgggcttcacctcattccattagaattttctcctcatgaagtgcttcacgacatgtttttattttattttgtattttttagaattgattgcttgattaatttatccaatgctcttgttatattttaatacaatcattatcgagattttgattgatggactccgatgttttgactagtcttacgaaccactgattgtctttatgcaggacatctgaatctttttctccaatttgcttgccaagatttaatcccatggcgtttttgcatgcttatgtccattattttgatgtgagtgattgcatcagatgtgatattcctttacatgccaatcacttcttaatacgaaaaatagcttaatcttaagcatatccttttagtgtatgttgctttgtcgcgatgattacaatttctttttacaggcggatacttacttggtgttactttcgactagttcaggtgccttttatcatctcaaggattgcaggttaactctggtttatataattgaaatttgtgttgagtgatgttgtaaattcattatggaatacgtttactacttggcctaacgcgagatatgaaaacacactacggatcttcccccatgctcctcaaatgagatgaaattaaaaaatatatgtttgcaagttggtgatcgtttttatgtatttccttaattttggttgtttgattcgtaggatgcgtattgagacagtccttttaaagtcaaatgttctcagtgaaatccagagatccttgctagatggtggaatgcatgttgaagatttgcctgttgatcccttacctcgatctagtgcattatcgtcgcatctgaacctacccaaacctgtaactgattctcctgagaggttcagggacacatgcgacggcatagctggtccttctggactttggcattttatataccgcagtatatttttagatcagtatgtttcttccgagttcccagcatcaattagtagtcctaggcagcagaaaaggtaagatcgtcaacttttgatgcatctatgaaagaaactaaatattttatcagctcctacagtgacgctaatgcatttggtgtatatcatttttcagattatatagagcataccagaagctttatgcttcaatgcacgagagaggaattggaccccacaaaactcagtttaaaagagatgaaaactatggtatttatctgttgttcaatagcacccacccccagccgagcatattattgatacttttaaagaatcaattcattctcttgtttcttcaattcataactgattgatgaggttttgatctgttctcttctggcagttctgctttgttgggtcactcaagattttgaactttatgcagcatttgatccacttgcagacaaggtaacttctgggtcaagatatcttaatttgttcaatatgaaaatataggtgataagagaattaaaatgcaacatagttttgataatccatgaatactattaaattaattaaatgaattttttttctgatttaccggttatcatttcgtttgagattgtcattctatgtacttactctaaactcggagagaaatcaatgctgtagaccgctatattttgtgatttgtgtaggctttgaaaatcaaacaagctagacgaagcatatttcaccttgaccaaaattaatttttttccttttgagtggcttgtagaaagaagggattgcatatgagataaaacatgaagaaaacctaaatagtgtgtacatcttatgcataagaatcttttgaacaaagtacccaagaagagtaactcaaagggtcaggcatgtggtttgctcccacaaagtctaaggctcgagtccatttctaagtacccacattgcaattgctatagatttttggtccttaaatattgtagggtcaggcgggaatcctagtttcgaaaaaagaaacacaaaaatctttttgaacaaagttctggcgtctatgactatttgattggtttctaataaatgtcaaatgatataatgatgagaactgagtactccaaactcaacaacacaataaaacagtagcaaattataagatgggagcccttaggcgcctttgatgcaaatagatttactcgatactttgcttactctttttatttactatattctagcacaccctactaatcctattgcctaacaaataatgttaatgaattttgtattgacatgggttttcacttttcaggcattagctataaagacttgcaaccgtgtttgtcaatgggtgaaagatgttgagaatgagatatttttgcttggagcaagccctttctcatggtgataaaactattaatcccaaaataactctgtagcacaccattgtactatattgtttctttttttctttcttttatcatgcccacacgcatttgaacacatcaaatgagtagggaacaaatctttaagactttgtaaaggaatatatatatatctatatatatttatatatgttttgtcataaattttgtaatttttggtagagcttattgttgaagagagaaaggaagaaagaaaacctggacccaataaataaagagatgatttgagatttgttttcctttgtcagtcttagagtcacatgagtttatctttccatggttgcagttgcagaattaaaggtgtgaatgtgatgtgatgagatgattttcttacaatacaaagctctagttactactagagctctaaatgaaatgacatgataggacttgacatgagtttagctaagtatgagcaccatatcatccatgagactcaaaatacatgagtttgggctatgcttcacaaggtttatgaaaaattattaaggatttacaagaagattgctcgtgctgatgttatatatgacacaatgtttaattttatgaagttatatagttaaaacaaacataacatgtgttgtccaaaataaaaaactaaggtgatagaaaatgggttgggggtcgaggccagggtatggggtgggggacagtgtcgggtttgggtctagagctgaggcggggtctggggctaagtttggatttggagtttgagagcaagggttagtgtcgggtttagggttaggggtctggggccgaggtgtgagtttgggtctaggttagggtttgggtgctaggttgggggtcaacctcaggactcgatttgaggttcgagctggtgttcaggtttggggtctacgttcgagtccaagtcgaggttcgggcactgggttccggttcaaggttgagtttggggactgtgtcggggttgtgtttaggtttgcattgggccatgtacaatgtttgaggttcgggttaggattgaagagtcgaggtttagggttagtgtcaggatcggtctctaaaatattaataaaagaaaatataattagaacaacttaattgtatcaagtgaaatcgacttaattatattttcattttaaaataattttgattctcattttataaattaaaaaaaaatagcttaattgtatttttattttaaaataatttcttaaaagtgtctatttagaacatgtttttaaaaaatatttttatttttcaaactaaaaaaattgtgaaacacatccaaatatataattaaaattgttttaaaatttgagttacaaattttattaggtattagtgtatatatttaatttctatgaattaataattagaaataatttttatacataaatgtgtgtaagatgttgctaaaaaaattataaaactaattgaatttgagattattagagaggaagtatgtatttcttttctattttgtataaaagcttcatttttgtttgcttcaaatttatttgtagaaaatagttatcttaagaaatcattaattacctttaagaaataatgtcaagcttaagtaataatattgtgtcttaccatttaagaccatgtttggttgtatttttatttttaatggaaatccattggtgctggtttggtctttggtggttcttttctttgtagatctctcataattgtgttattttatcataagagtcaaacttctatttttaaaaattcaaagtatttaaactttgtagatctagcaaagtggtagaggctgccaagcattactgcttggactattggacaaganctttttttttttttaatcattcatttatatatatatatatatatatatatataacataataaagtatttttttatatataatgtatacataataaatatttataataacaaacatgcacttaacaaaattgaataaaagtaa

SEQ ID NO: 187037 - DNA, 1927 bp, Cannabis indica
ttacatacaattttattttagtttttccaattaacagaagtagtttcaatatgaaatatgacattaacataagcaaatgagtacaggagtgggttattttatctttgctactcaaaaattatatgttgcagccactaatataaacttagagaaaggattacaattcctaaataggacaagattaattgtagattgattgtaatgtgagagttgggagtgggactatgtgtatggtggctttggctagagattatttaagtattattttatagactgttacagagattttggatttggccgatactcttattggtgaagctacaacttgctaacttaccttgaagacggtgaactttttgaagcattattttgtgatagtggagaacgattttgagatagttataaattatttgaaaggtattttggctatcgggagaattgatacatatgtaacatagtctatgttcaccaacgtaatagattttctactttatttatgggttgtaatttctcttttatttcataactttataattttacggctcataatattattaagtggactttgtaatgaccctcgtgtctaattttatttttatctaaggctttttcaaaaagaaaaaaagttaactaaaaattttgctctcaactttgacatatactaaattatgctactgaacttttaacatcgttaaaaatgcctctgaactattgagattgttggatttaatgatttttttccaaatttagtaaaaaagtctaacctgaacaaaagttgagggattataatttagtacatgtcaaagttcgagagacattatttagtagatatcaaaattaatttgaggagcataatttagtacataaacaatattgaaatagtaaaattaaatgaaattaaacaaaatttttttaagacttttagaaataatttattccatgtacaagtttagaaaaaaaaaaacaatatacccaagactcgcaacgcataaaccttgagaagtccatctctgaagaaacgaccctttgagagaccacacatcgcagaaacccccaaatggcttcaacgatccacaagctcctcacaaagtctccacctttaaaaattctgactgctttcaaacccaaaccagtaccattattaccaaatctcaatgtgcctcttacacaactcagttacaaccaagtcaaactctacccttatttgggttctaacccagatcaaagtccttttttgggttcgcagaaaaatgattacttgcccactttctcccacatatatccaagtttcccatttgggtattgtttaaatcccttgccgttatctgggtcgatcccattggaggtcgaggatgattcgactgagttgtgggctgatagcgttaagaagaagaggaagcgaaagatgaacaagcacaagtacaacaagttgaggaagcggcttcggagacagacttaggtgagatttgatcttaatttgtttttgttgagatttgattgtaatagactgacttgtttctcaggctaatgcctaattgagtttttgcttgtaatggtgaggatgatgagagattgttcagagcatttaagttgttggatattgtctcctttcaacactatgaataattcgatattgcatgtgctacttcacttattcccaatctcatgtatcaattatctttaagaatgtgttgttttgatgttgaaaagctgcaatgaccttatagctataaattaagtgaaaaaatcttgctagaaaactatacaagttaagaatctgcaatgttggtttagtttattgtatttgtatgtgagtgtctaattcatgttgctcatggagaacttgtttagctggaagaatttctctctttcttaatatgctttacatgaattgcaaaaagatggaaaaaacaaaaaaaaaaaaaaa

SEQ ID NO: 187038 - DNA, 4318 bp, Cannabis indica
caagactgagggtgtactttccatatgaaaaataacaaactgttattgtctgatttcaaggattctaataaatggaaggtaattttggggcatgattaatcctgtcctatagaaggctcaagatcaatgagttttaagatgtttgatggagtgattagaatcctatatgaggtcagttatgtgcctaaactgtctaggaatcttatttcactacgtgtgcttgatgatgtgaatgtagaaagcaagataaaggatggaaagataaagttgtgcaaatgatcaatggtgatcatgaaaggcatcaaaagggaaggccaatactaactgattggaaaaccagttgcaaggagtcacaacactgttgaagaacccccagaagatacaaatgcagtgttgtggcatagaagtcttggaacatagtgagagaggactcaaaatcatgagtggacatgagttacttgggaagcatcacaaactcaagttcaaaataggtacccacatgtccaaatccacattagaatatgttaattcagacttgtaataaggacctgagaaaaccccaacacatgaaaataatgttaattttttgtctattattattgatgattattctagaaatgtatggttatacttacttaaatataaaaataaggcatttactaaatttaaacactggaagactctcatggaaaatcttacaaacaaaaaggtcaaaactttgagaactaacaatggcttagaattttacaataatgtgtttgacctattttgtaattaagaaaatagaaatctaaagacatagaacaacaagaaaaatactacatcaaaatagtgtggcagattggatgaataggactatactaaataaggctagatgtatgctaacagaatctggtataaatcatggattttagggggaagcaatgatgatatttgcttatcttgtaaacagatgcccttcaagggatatataatttaaaacaccaacggagagatggacatgtaagccattgaacttagaactgttagggaattttttctaggttaccctaaaggagtaaaaaggttatagaatatggttaagggaataggaggttttaaaactattatttgtagggatgttatttttaagaagtttttttttccttgtattactaacactagctctccaggaacaaagagaactaatcctacaagaatcctagtactaaacctatgaacacttaatcagataaaggaagatgaacctgatataaatcaggtgaaactagcccaaccatatcaagttcaggtgaagcaagaaccaggggaaccagtttaagtggaaccagatggtgaagaaggacaaggaagtacaccaacagaaggatatctcatagaataccaccagggacagagaaaaaataattccaaaacctaatcctaaatacaacttcaacatatggaatgatgatctagcctatgcctttttgtgcaacttagaagctaaaaagtttaggaaccccaaagctatgaggaggcaattactggtacggatgtagagaagcagaactaggttatgaataaagaaatgcactctcttagaaagaacaaaacctagataatggtgcacaagcctaaaaggaagagtatattgcttgtaaatgggtttacaagcacaaggaagggaggttcaaaggagatctagtgaattttaaagcaaggttagttgctaaagggtttacactaaagtaagggatagattatactaaaattttctctccagtggtgaagtacaaaattatcagaataatgctatccttagctactaaatttaacatggaagtggactagatggatgtgataatggcattcttacatggagaactagaagaagacatatacatggaacaacccaaaagggtttttgattaaagggcacgaggatagagtttgcaaactgattctctctatggacttaaacagtctcatagacagtggaataaaaagttcgatgcttgcatgatcaaacatggatttactagaagttatcatgatacttgtttatattttaagggtactaaggttgaggaagtcatctacatactattgtatgtagatgacatgctaataattaacaaagaaaggcacaatgcaaacttcgtaaaagaaataattattacaacagaatttgatatgaaggatttgggaacaactataaaaatcctagacattgatatgaaaagggacagaagtaatggaaaattggtcctaacaaatgaagactaaattcataaaataattgaggaactctcaatggaaggttctaagctagcaactcaacctatcacaagtccgtacccattatctaaggctcaatgccctaagacacaagctgagaaagaagaaatgagtaaagtaccttactcaaatgcaatatgatcagtgatgtacttaatggtaagtacaagacctaatttggcctacgctataagtatcctaagcaagtatatggaaaatcccgataaaatatattggctagctatgaagtggatgttcaggtatctaataggtactagtaagaagggtctagtgtacaaacaatagaagcaatgcactaacatagagggctacattgatgctggatcgagatatatagtagagaatctacatctgttgtgtaagttggaaagttcaattacaacctattgttgctttatatcaaaaatagaattaaagtatattgcaactacaaaagctttcaaagaaggaatctggttgaaaggcttggtagaggaattaaagctactaaaggaaactccaaccatatactctgatagccagagttgtgtgcacctatgcaagaaccctatgttccatggcagaactaaacacattaaataccgctttattagagacaatgtgatacaaggtaacactatcattgacaaagtacctacagatgagaatctagaaaacatgagaaaaaagtgattactcttagtaagtttaagcattgcttaaacttactaggaattgatactagctagctataatagtatcgagctaatacccttatatggaatctcaagaagattaatagtccaagtaaagatttaggtgaaaattgtttagtaaatatccacttaaactattaatttaggcttaagtattacaacgaaaagggctctggcccatttgtctacaatataagtattacatcaacctaattagttacaagtaattgggaaaaaaaaaataacagaataaagttaaataactcataactatcacaacaagaaagaaagacctacaatgcctatttatacatgatttctccaagctcttggtttaagctgcagattactccaaggaaactcttagatatagagagagaaatagatagagagttagaaagagaggaatattgtaatacaagaaagaaagtgatcaaagggagacagagagaaaatcataagaattaccttgtcaatcttagtgtgacttggactctttgccaatactttgtaatcaagtcagaactagaggagatcaaggcaaccatctgaggaatagctcaatggggacgtaactcatttttgcgggaatttaagaaaatttttttttggtgctttctttctttttctttgtacttttgtgtttctaggtttagatcgctctagatctaaacttttgtgtgtgtctatgtagaaaccataagggttcgagctggtttagctctgctagggtttcgagaggaagaagaaaattagagatctgattgatttcaagaatcttcgaggttttgttgtgggaaatcaaaatggtgtagttttgattttgttacccttagttttaactgaagtcaattgggtttgagaaaggtcttaaaggaccttggtttgaatattgaattaaattattttgtgttggcgaagattttaggttttacgtaattttgtacaagtcccaaaataattagatcatgattaactgtctacattatcactaaaaatagacagacactttaaaaattaacttgaagaaaattcatgtccaaaaaagaaatatcaaagaaatagtatatttgcagacctttcttgtagagaagagattttttgaagaaaaaaaaattagggaagaatagcccaaataagaacatacatatttataaatattcatgggtttaattcaagcctagctaatgcaaagatcatcactcatcctgtagaaaattagctatacattttctaaccatattacaaaaatgacacaccaaaaatattaggcataattagtgtaaagaatcatgaaatttcgtatttttgtaaaaaaaaaa

SEQ ID NO: 187039 - DNA, 2541 bp, Cannabis indica
aagatgaatgtacaggtgtaaaggatggagagccaagaaggctgcaatattataatcaatatggtatggttggtacaacttatcataggggatggggcgatgagcactgcttgaaacactattatcttactatgcgtcgttggaagcttcagttgacttgatgaaccggcctttcactcgttctctagtatcagccctcgcctttcttgtttcataacgaatgtgtttgtcgtatctgttgttcgaagtttatcaaagaagtattagtacatttaatcaaataactaaaatattggatagtaatagcttaagggaataggattagagtacttgccttcttgttttcttcttctccttgtatcgtaacatggcattgcctctgttctgtgcctgcatctccatttccatcatagatttagaccctttagtgggatcactcattggcaaaatttcatggcctgagtcttggacataactggggctattgcaaccttcaggtatatccaaatccatttctgtttcaaatcctaaagactgatcatttgtgttctctccaagttgggatgcataatttgataatagttgatcctgcaattttcgatttcagtcaaacttatcagtaacaaatgaaatatgttttggcaaataccaagtgggatatgaagataaaatggtttttacttaaattttatgctttaagtagctaatatgcagaaaagcaattttatgaattttcctttcacatcaattggtttcatctggtaatattttcaagatttaggcagttcagtctaatgaatgccatgaagatatgtcagtctaatggcttacgttttccgatagagtatcttcgtatatagtagagacctcatacttgggtgttactaacgaacaaggattgtttatttctgtgatttctgaacaagattcttcacaatcttttgagtcttccagttgaaagtgccatatctgcaagagtcaaaaaggatgatataataactagatgtaatatccagaaagtatttaagcaacaatgatatctaagagatgaagtgcttgacataaaaatggatattagacatgagagaaagttggttagctggcgacaataaatgactaccaaagaatgcatctttaaccaaggacagcattattgcttcaccaatatataactttccacttactcctacaagccacttcaagccaatgattcagctgtgactttaaaattatataccattgctttaagtgaagctgtccttcctgaaattgaagtataatatatatgtgcatgtgtgtatttagataccaaacggtatttcatttcatgaattatttagcaattactaacatcaaattgcctttatttattactacagagcacgagagtagtttcaccaaataatcattaaataccctttttcaaagctataatcaaacattccttaaaggcaaacaagacccagattctctgcaactatagtgtgtacacaaagctactcaaaactgacttgcatagcagtaaacttaacaacataacaaaattcgtaatttttactaagagcttaatttttggtttggcacataccagagaagaatcataggtgtggttataatcccaaagatgatcttcttcagcaactgaatcaccctgtttgaggtccaaactcgttggtaacacaactgaagatgcaaaagaagtttcatgcctcaattcatcaccatcagtcttctgtccaacaagaccatctatgttctcctgttgagaacatctactaggaggagtcctaggacgcatttgagcaacatctacatccactcgcagcagatcttttttccccatctcaatcaactgctcacaaagctcgttccttctctttaaagtagcagaggacccatcatcactcgaaacgaaaaacttttgctggatttgatcagacccagaactcaaatcaactgaattttcagattctaaattcaatccaagaaaagaagcgagcccagaagccgatggacaaccagaaaatacttcaacagaagttaactcgttaagacaagaaatcgaacagttggtgtgcgagtcccaattacaatcatggcaaagcaaaaccttgttcttcgagcaaacaacagagacgggattcaatccacagttatgacagatccaagaacgagagtgcttatcagagagagtattagcggagtgaacacgacgatcacagaacaaacatagattagcagaatcagcttcacaaaagagaagcgcaggcttcgaagaacaaaaatcacaaagggaaaacatggtttgaatcgaaagatccaaactttgttgaggaatgaaaaaagggtcgaaaagattggaggaaaaagttgaagctttaaggaaccaacaatggaggttaagggagaagaaaaagtttgattttttttttttttttcagttttggtttgaagcagaaaatatcagagttgtgaagatatgatgagaaattgtacacgtaaggcttttccattggacaaaaatatataaatatataaata

SEQ ID NO: 187040 - DNA, 3495 bp, Cannabis indica
agaaagtgatacacatgattggatcagattccaatgacgtgacctgatgtcaatacaaggtggacggaaagcaacacgtatcaaattactctatttaatactaaccaactatctatgccatattaacgttttttttttaaaaaagaaaaatataagagtatttaatcacgtaaagttatttatgccactacttaacaatttcaattttttttttcttctaatttttctctttcctttctattaagttttctttgaatttgactgttataactatttattgcttccattaaattaaaacacacgtagttgcctggaagtctcctcaaagtccactatttaggttccattcattaagcgccgtttacgtgtcaaattgagatagccgaatttcttgactgttttgtggtacacatacatacttgcacacatttattcaattttaaaattttataattatcttttagttattttcattcaagagtttacttatgaatcactattaaattttatagataggatcaaatatagttaagtatatattatatttgtatttaaatttgaaatagtacatatataattgactaataatacaatagcgttttttttttctttctccatttctgtgtatttactgaaaattttgaacaaaaattattcaaaattgaacaataagaaagaatgaacttggtcgtcaagatccttacaacaacaaaacctatgaacatgttatcttatcttgtgtactcgtttaaaccaaaaaaagaacaaaataatgaagaagaaaattaaaaaaacctaatgaacaactgaaacaattagaaaacacaatctctaatttcctggaaagttgctgatcattttgttgttgttgtttgggttgctaattggattggcagtggaaccagcggcattaatattattattattctgattatttccattatttccaatgatcgaggagatagctgcagcaagtgctgctgtgaaatttggatcagctgtgatagcagcagtagctgcactgaccgaatcagccaaagaaggctgcggatgagtttggtgggcttgtaattgggcagctgaagaaacgttctgcatatgattatcttgaccgccagctgatgagagctgaaggcctgaaaacttggactgattgtatagaccttgtccaaaaccattgtgtggtgtggcgaagttttgggattgtcctaatggaacttgaaattgggtttgatgagatcttagcatttgtagtgggttggagttgttggttaggtccaatgtgactgtagggaatggagccgaagctgaaattgtggccatgttggatgagcatggaagaatggctctagctagtaaatttgggttcattagtccatcagcactagacatagaaccagacaacaacatgttggctgctgcagtggttgtcgaggccatcgccatcgcagctggtgggagcgggtggatgtggttcccttcgtatgttgtgatcaaaatggttcgatcttcggcacaacgttgaacctataaaaatgagaataataaagaatattagatacttattcacaaatttttatttgtttatttagttagataaattcaattatattaattcaagataaaattaacttacttgtttgcgaacgggacatccaacagccattgtacaacgataataggcacgaggacaaggattccctttggccattttttgaccatattttctccattgacaaccatcagttatctgaaatttcgaatttaaaaaataaaaaataattagtactgttaatcataatttataaccaactttttaatcattaattaatgaaagaagtaactatacatatgtactaaccatgggagcttctgatcttgctcgaactgatacacgggctttcctcatggtggcatcaggagattgctcgatgggcttggaaggaggatgattcaacttaggaaccttgttattattagaagcccaaccttgggactcagattcggggctctcatctctattgacccttttacaatctctataactagcagagctgtgatcttgattatcaaaaggggtaccatcttttaatgtagttgtactattattatatttcacatcttgtacaatattattattattgttgttttgaggtgttgcggaacgggttctctcctctgatgatgaagagttgttagacacttgatcatctgtcgtctctactgtggcagtacttggtcccaaatcaaggaattgtctctcatgtttgacttcttgatccttattattattcatctgataatcaattatataaattaataattactcacgatcttgaaagttgagctatagattattataattaaatgtaaaataaatcaagtacctgatgatgttgtatgagctgagcagtgtcggttctatgattttgttgctgttgtagttgttgttgttgttgttgcataatagaaaccacatgcatttgtaaagcactgtaattattgctcacctgagcaagcatttcttttaacttttgattctcatcattcatgttttggagctctacttgtaaacgaaccatcttaaacaaagaaaataaacaaaaaaaaaaataaattaataaaattaaaatataataaagacattcagtactccgtaatttgctgagattattaaaattaccttgtttttggttagcttatcctctatatcagattttacaccatcatccaccgttgattcatcacttccagtattggcagttcgaagatgcaaatttaaaccagtctaaaaaaaaaaattaaaaaaaaaatataattaatttacataaataaaaattttaatttgatcagatagtgaaataataattaagagaatgtattgtatactgatacttacatttaaattcgaaggtccaggagtggcctcaccatgggaactctctttcttgacgcttactgctgcaacggctttggaatcatcgcgatcgttgactgttctattcttctccgagaagaaatcgaccacggaggtagcggcccgattctcgtcggaagaaggcggtggcatcgttagggagagctgatcttccctgcgaggaaatctaacggctgaaagctcgacgccggagaacatagtcatggtcttaggtgaatcagtagtgttacagaagatatttcgttttgaactagtgtggtcgatcacagatggtagctgcttattaaggaagaatccgcgggagtttcagaatcaagtgtgagaccccatcctttttccataaaaataccgagaaagcgcgagaaatctgaatctcaatggaactggttctagagagagagagctaagaaggggtgggttgtgtggtgaagtcgtgtgaagtcgttttaccgctgctatcggttcggctataaaaagggtttggaaattggaacttagaccaaaaaattggatttgatttttcgtagactaatgctattttttcttttatttttttt

SEQ ID NO: 187041 - DNA, 1141 bp, Cannabis indica
atatattttatattattttatcatagtattttaaatttgataagctattatataagagataattataagtgaaaagattattatatctacccataaacgatttgagcttaaaaaaatatatacttatacatcaattcaagcctaaaatcttgctgcaaaaaaaaaaattcaagcctaaaatctaaaataagaacaaagtcaactgttatttaagatatgttttagtgggtaaaggtcatatatctttaaaaaaaattgtcaactatcacaaagtcaactctttcttatcatacaggagtgcgatgcattattagtgatacaaatatacacattttccaataaaaagttagaagaaaatcattagcaactttagcaaaaatttaccacgattattgctgtaaaaattaaaatataatgcaaagaataaaatttacggaactagcagaagctgcctaaatatgttagttttggtaccaaccgcaaggaatttagtgtactttgtataaaatctttcaaaattcaattaaataattgcataacctaaatttagatcacaagacccgttatgttttttttttttattcttttcactaagaagctttaacccactttttttcattattttgtatccaattttttaggagcacaaatctcacataatctactaatagagactcatttattagctatgtttttactgtagataatagttgcatatagttggagaatactgtagtctgtagtctcctccactaatggttgttgttgtctaatcatctgtcactaatatatagtagactttcaaaataataataaataaataaataaataaacaaaatatattttttggttggattctattattctgaactttgtctataaaaggtatagattaacgatctgattggagataccattcaaataagcaacaaacatgaagaagtcagtatctactttcatctttatcttctctataatcgtggtaagtatgtatcttcaaaataagcttcatcagtttttcacgtaattttgttatccttagaaagttgtactctttgtgttcaaaaactttcatattagttatgtattgtagaatattttgtaaaagatgagatacaatttgtctaagatcacacacaca

SEQ ID NO: 187042 - DNA, 4604 bp, Cannabis indica
aaagaagtaacatcataaccttgccacttaaattctgctcgtttcgattccacctccacagaaaatgaagggcatttgatgctaatgccaagatgacagaacccgagtttgtgtaaatcaaccttgagatctgcaacaattacaaaagagaaattataatcctttttcatttatgatgttttttcagttggcaagcaatattgcaataagggctgataagtgatatcttctcttgttgttggtaagtctaaaaaacatggaacaattacaattaaaagcttacattgtctgtgttagccatagttgagagtcttaaggactgaagctcagaatttacactgatctcagtatgcttcctcattctcgctgacttggcttgttcaattaatcttggcatcacatcctccatgcttcttgtgccacaatcctagaaagagcatcaacctcattagagagataatgatagagataattatccaattagtttgaatattcctgcttataatccaagagtttgaattgttaggactagtgttatcagcttttatatactagaagcattggcaagagttggaagttagaattttgaaacatgatggttctccaagcatttagagcatcaataacaggaaaagcttaccatcattgcagtttcagatgcaactcttgaggccagtagtgactgactttcatatgtgcgcatcaaacgaagaccatctactgctgctaagattttgatgctgtcatttgcagaaactgctaagagtgatccctccttgttgaagcggatacgaggactcgccttaataacagaaaagtaataaatacattaataaataataccagctaagaaaagtttcaagtatacgaaaatttcatcaaaaggaaaacttactggtaagtttccctcagcatcaataatggtcaacaaattgttcttatccatatcccatactttgatagcatagtcatctccaacagccaagaaccggttcttggttgtgtcaaattgaataatacctaaagaatgtttgtgaaacccttgatagtttctttttattgtaccttcattttcattccattcgaccacatgagattccccatctctgtttgtcccgcatgagaaaagtctacaaaaattgttttccatgtaagtatacttcaaattaccaattttcaaaaccattaaaaagtcttaattaattgatcaacctttgtccatctgtactataaaccaatgttgtgcatgatcggccaggggcatcataatcaacccgaggtccctcccggtcatataaccatgcttttatttttccatctactgatgttgaaaagacaaactgaggagtaaaagtcaagagcagttctttagacaaacttatagtatataagccaactgaggcaagagacatggaggaaaatcaaatccgaaaagccaacaatctaattaagtcttcttccttacatgaacatttgccttgttatgaggacacacagaatgaacaggagcagcatgaccttcgaaggtgaacaactttacaccggtagctacattccacacctatataaaggatccaataaaatctttaaataaaccaatgtttacactcatcaattaaacaatctgtttctctttttcttttctaaccaaccttaatggtcttatcatcaccacatgttataacacatagttgtttggatggggttggattagagaatgcaagatcatttacactcccaacatgggcatcaatctatagaaaatataacaaacatattagaaaaagagaataaagctttgatacaattgataagagagagatagtaatacattcaatgctctacctccaagtgttgcctaatgtcattgataccattataacgatacagatgcacgatgtttatagagaatgcaactcctgtcaaatgtaaaattgataatagagtttagtttaactgatgcagaatatgaaataatgatcaaatgctccaaatatatcttcaaactcaccaaatacactaccatcatgggtccataaaactcgcttaaccataccagcctgaaaagtccataagaaaaggtgacacaatctgttatgccataatagttgtattctaattgaaaaaagaaaagactcattttatatatcattgaactggctccaatgtcctcaacctgaatactttgtgacatcaacttttcccttgagccaacttcccacaagcttatatctcccacaatatttccaactgaatgaaaaaagaaaacaatgaaaacacttgacaaaacaacaatttaagataactgtaattcaaaggttaagctcacaaaaaatggacctagaagtagtgtgtgttgagtgggatgaaagtccatgctggtggtaaccgatctctgatctagtgatcttgcagcagtcttgggaaagtcatcggtcagattcaaaatttcgttgttactttggcctggaatatttcctgggaacatagtctacagaaaatgcataagtacaataatgttttgaatcaaaaaccagattgtttagtccttattattatgctttgagaccttacctgttctgaatttcgagggggcctcattttcattgcatcttcagaaaccccaggaccctttgccattgaagctgtaaaaaaaaattatttcagaatccaaaagtatattgcactagattttaacctaagtaacataagatctttaaccagttttttaagagaaagattagaaagtagtacaataatctggattcccttgagcaccgaagccaatgccccctcctgaaactcctgggtgatttacatttggttgcataggcatccatgtagataatgattgaatcgatacaggtgttgcaactgatgtagttggtgaaagaagaggctggtaagagtgaaaaaaatttgacaaatgagaacactagttcaacttattttgcacattttaagaagaaaaaaaaaatcaacagcaacaaatatgtcagtaccccatgtgcagccattggatgaaagtaatcggtccttggtgccgaacttatcgggtgattgctaggattcacctgtggaaactggtcattggaacttctacaactgtgatcaataaacagggttctcatatcaggattctgactaggatttgagcaaagtgaatgctgccagtttaagctgtcaacaaaattagtttatttgttatgactcatgcattacctatatgttggattatgccctttaacatgtaataaaagataccagatcaacaaaatgcattgatcttaaaaatgatactgaactgtcactattattttacctctggttggtgagtacttttagccttgaagtctttatattggggaacatcattttatcttggaaaagaggattcacatccataagcttcttaagttcaaccaaagtcatggctcttgcagtcctggtatccctataggcagagagttgagcattttgtctgccataccagatgtgttttttttatcaacataataatcaaaacaacttaattacaaactgaagaaaaattgaaataatgtgatgatagtatatgaaaatgcgcacctgaaattgtctaatgtgagtagctgagtaaactctttgaacaaatcctcattaaaattagagaaaacttttaaatctttcataaggatttccactgccttaactcggtcaagcctgaaatattgtgattgatttagcatgaggaaaaagttgttctttaataaagtaatactccaaaaacaccaagacataaaatctttacctatccaatgcctcgaggtacttttgctttcgaatttcgaagtagatctttctagaatttttgttgtcatccattgtggtgaacccagaaagatacttttcaactgcatcccagttcccactcatcaccaactcctcaaaatgcttgaaattgaagtacaaacccgattcttgctcaagtctaaaaatgaaaatgagatttagataatcaaagctttaattgactaacacggacgattaagataagaaagcaaaattgggttatttgagaattacgtatgaagagcatcttcgaacttttcttcatcgaggaactgaagaatcagatagatgaggtccttgctcaatggtgacgtcatcacgatcaatttgttgttatctccttagtctctgcacaatgaaacaatgtcaaatacttaacagagagagtagattcatgaaaaaagactccaccaactcaattctggaagaagcaaacaacaaaacccagaaatctttctttctttatttatttattattatcaaaaaaatgactgcaaaacttgatgtaccaaaaagagcttcgatgaaagaatttttttctcgggaaaaggttttcccggaaaacaaaattttcttgaagaaaatataaaagataacaaacaaataaatgaataatcactgctgctgcttaacgaagggataaaaaagcatgaaatgaagggaaccacaaccactcaactccattgaccgaaacaaaaaaatatctttaacatttcagaccttcaaacaataattcgcacatccaatttgaaaaagagaaaagaaaaaagaaa

SEQ ID NO: 187043 - DNA, 4656 bp, Cannabis indica
aaaaataaagtattacgaaaccaactttttaatatttaaaaaaaaaatcaaacaataaaaaaaatagagagtgtaattctctcgcaaggaaggtactagaataaaagttgaccaagtaccaagttacaaaaatagtccacaccacaaaggtcttaaaaagagaagctttgagaataacagaatggcatttctgaggtctctagctaccacaacaactgccattgctgcagccatacctcttgcttattccctttcttcttcctctcaatttattccattttccagaccccaaaaccttccttttctctcttccaccgtacccttcttcccaaatcaattgtgcctcgctagaagctccgctccgccttccgcagctctccaaatggctggtcccgcctccgaatcctctactcaggttcgctcaaattcacggaacccaatttttgttttctgttaatttttcttctttctttgatgggttggaatctgattgttgatatttcttaattttgaaacgcagaatgatgctgtcttgccggagttattagtgagtttgagtttcacgccactttttatcttattttgtttgttgggttatccccagaattgtgattaatctatttctttgacgctgtttcatttttatcctttgtagtatctaaaaattaaggtatttgtttaactgaactagctctgtttgtgtaaagaggaaatttttgtgggattgtattaaagctaatatatgtcaacaactttagtggtgatttgaaaattcatttaaggggttgtgctttagtttgatgaaaacttacaattgttagtttgatatggagacagacagagtacatggtggatatgaagtgtgagggttgtgttaatgctgtcaagaataagttgcagactgtcaatggtaggtttatagtagtggctttgtaaacctttttttttttgccctttcttgttgtagactgtaaagttcaaatttgtttgtattttaggggttaaaagtgttgaagtggacctgagtaatcaggtagtaagaattcttggttcaacacctgtgaaaaccatgacagaagctttagagcaaaccggtcgaaaagccagactgattgggcagggtgtccctgaaggtcggttgttcaaacttctctattttctgttttgtgattcttaagcaacttactgagttatttcacaaacttcttgatttcaataaaaattcaaataagagttatttcagtaacttcttggcttcaatcaaaattcagtgttcacatattaatacttgagttatcagggcttgtagcttatcacactcagttctagttgtgaggtagtcatagattaagtatactacaaaatcaagattgtaatttgatagaggctaaattcactgaaaccactaatggtattttgggatctaagcattaagaactactgcatcattagctttttggaatgaatatcctaaagtgaatgagcttacatttacctgtttggagcttctacaaaatgataagagttggctaaattattataatatgtacacacacgccccttgaatagggcactagcatacaatcagttctaaaaagtgaactataccatgttggatttatagacagcttgcagtgtttcttctcttcatgaattggtttcactagatgagaaaaggctttattttgatatattttgatagttcgataatagaaccgagtacaatatctcaggtacttaacgacctcctttgcttggcagatttcttgatttctgctgctgtggccgaatttaaaggcccagaaatatttggcgtggttcgcttggctcaagtgaatatggagttggctaggattgaagccaattttagtggcttgtcacctggtaaacatggctggtctatcaatgaatttggtgatttgacaaacggtgctgcaagcactggaaaagtgttcaacacaccaagagaaggacctaccgacgaggttggtttctggcctttttagttatttgattattcaattataatttatataactgtttaagctctttgaatagcacagtaattgcctgcgattgataacaaagtgatcaatatattaacactcacacttatgtaacttgtatgaaaatttaataatgtccttattccaacttgggtttgctcggtaattttcagccagtgggtgacctgagaacattagatgctaatgagaaaggtgaggcctttttctcaggtgtcaaaccaaagttgagagttgctgaactgattggacggtcaatagcaatctacaaaacagaaaacagatcagattctggcatcgcagctgcagtaattgccagaagtgctggtgttggtgaaaactacaaaaagctttgcacctgtgatggcaccaccatatgggaagccaccaacagcgactttgtcaccagcaaggtctaaagatttaaggcaaacagttctaatgcacgagttgaattttgataccagcagtggaaaaatagttcatgtagcctgtagtcatcgagttttattcattgaaaaatagcaatgtatttttttctatactttactttattcaaggtgataatagatgagccgagagctcctgctttgtaagatttgaatcagcatatgttatgcgcgaacaataactaatctgaccctgtcattttctagaccaaaagtgtctaaagttctgcttaaatcatatcagttttcatacagaaaaacagattattctttataaatttcactggaagggaaaaacaagttctactttggaggagacaagaaaccttctctttttgccatttcatacagagcaatggctgttaaaacctttgcatcagctgttatgcgccatagtttagcataaggaacaacacgaaccttgatcagctccccgtgatcacgaagacctgtttctttgccttccagctgtgcaataactcctttatcaactttccctctatatagaaatatgcttaattcttcatcgcaccctccctgatcatgggaaaagcttaataagaagagagtttattcacaaaccatgtcaactgattataagttgcattgacattcttggtcattcttaagaaatttatatttttgtaactttcttgtcgaattcattttctttcatagccaagggatataagcaatcttaatagcctaacaggcatttgtgcagctgagctcacatcctatcctcatgaaagaaaaaaaaatgcaaatgccaacttaccggagaaggaataacactgcacccagtagatggatcaaggaaggctgtgaggtctatcatgtcttctacatttaattttataccagtttcttcttcaacctgccacagtcaagactataaaaatacgtttaaaaaatgacactaacaaataccactaatcaaatagacgaaagacctcgcgaactgcagtcccggcaaaatctcccttgtcgtcatccaacattccagcaggcaattccaaaatgagcctaccaacagggaccctcaccttgagaaaacataccagaattcgcaacaatattttagcaatggcaaaagtttataagtcatgctttcctttaatttcactctctttagctgagagagaacagcataagtcatggatcaaacctgttcagtgagaacagcataagtctcatcttctgagtccaaaagaatcagaatggccacagccggtcctcgggcaaatactatacctggaacctaaacatgttttagtcaaaacagaaacgaagaggaggagatgattgaaagcaggcatcaaagaagtaatggaatattcagagacaaatttaagaccaacttgttgaaaaaatacatgggatggcattgatcatgaagagaagaaaaagataattaaaagctcaatttggctattgcgctttaagaaaataacaaaatagactcaaagtacatggggaggaatgattataatatataccttattgccagttgatttgtcaaaaacatctgctttgaatttgagaaacccaatacgctttccaaacatatccactccctattatgaaaaaaccatcactcaatgtcagtatactaaaagaaatgtgtttcccaaagtaaactctttgtaagatcattttgtaaaataactaatttaacaatccattgcaaaacatacataataactattttgataattctttgccaaatatattttctatatacttaacatcagtcatacacattcaacatcttgtcaagaaaagtactttgttctccagtaaaataaccaaaagaaaaaaaaaaaactataaaaaaggtgaaatatcacctcccattttagaaaaggtgatttattcataatcaaaagggaattctttaattgttattatctgtaagtatgtcttgaaatggaattacacatagacgaaatgtacactttatatttcaataaaccaagcaaaagaatacaacaaaatggagttataagaacacctgaatcaagacttgtttcagagacaaatcacctccagacaaaatcccagtctcactttccatgttcttcaaccactgcttgaacaaagatgaatctatggcgttcctagagagtgatcaaaaaaggaaaaatcagaataataagaaataacaataataaataaataaa

SEQ ID NO: 187044 - DNA, 2041 bp, Cannabis indica
agtcagctatcgggaatcaaagtcggtaaagaaacccagcccataactcatttgttttacgctaatgatgccatatttttttttgtcgtgctaacacagaagagactgagcacttgaaagcttgttttgagacgtacgagaaatggtctggacaaaaaataaacaagaggaagagcgggttagtgttttctcctaaggttaagaccgaagagaaagcactcatacatgggattctcaatatgcaaggtcttattactaaggaaaagtatttggagaacccgtttttctattcggcaaagaaacgagatgacttcaatttcctgaaagataagattctatctcggttggaaggatggaaagcgaaacaattatcgatagcagggagacaaactctcatcaattcagttttacagagtattccttgctatacgatgtccactataaaagtgccggtaacaatttgttctgagacggataacattattgctagattttggtggaagggatccacgcaacatagggagcgttaccatgctctgagaagttggggggactgttgtcaacccaaaagaaatgaagggctggggtttaggaagttcaaagatataaacatggcactcttggcaaaattggcatggtatatgcttgaaggagaaaatagcagtagaccttgggtccaacttttgaatgcaaagtattgcaaggtccaagatttctggagtgttcaggaaaagcaagatgattcgaaagtgtggcgaggcatacttgcaaatcgagacttgtgtatcaaaggtgctgggcttttagtgggagatggtaagattgacatttggaccagggtgtcgaggtatagcccggaagaggttcgtaatgcattctctaataatgtcgatcatgccttcacagtagtttcagatctatttatccctggcactcatcgctggaatgagcatttaattaatcgatgctttactcctgaagtggcggcagccattgttcgaattcgaccccttgttggaagcagggacactctgttttggcaaggcagtagcaaaggaactttctcggtcaaaagcgtgtactggtgtgcgcaaaactacaggtttcaggaagaaaagctagtgtggaaggatctttggaagttaaaaatccataatagacagaaaattttgctttggagaatcttaagtggctgtttaccgctcaagaataggctgggatatatccttgaaagtgacaatgtctgtggtctttgtggtgaagcgtctgagaatgatgtgcatctttttagggactgccactttgcccgttgtttatggttcacctgcccgtggggcatcctcaatagtaacctgggaaatctgaatttcgaagagtggttactgtggttgttggaggccgggaatgaggcactaattctgtttggagcttgtgtattggagcacatttggcaatgcaagaacagtctaatcttcaaaggagttaaatcgaatttagctaattcgataagactactgcagcagagattcaaagagttttgtgaggtgcttctgttggaaaatgttcctgtcgagcgacacccttcgaacccgcattctcaagtgatctgggacctgcgtttgaaggtggatgcttcggtttttgaaggtagtgcggggctttgtgcaatgcaggtagtggacactcaggaagaaggcatggtgcttctgcagaatgtagtagtagataatgttttggaagcggagtttttggcaattctaaaagcgttgatgtgggcagaggagaaaaaggccactgcagtgttggtggagtcggattctctaattgcggttaaggctttggcagcaaaagctttatcgtttgcctggggttctttccctgcgtttatagaatgctgtaatttggtttctttgtttgatgtttgtgtagtttcgtttatccctcgtgttgacaactctttagcggatgctcttgctcgctatgctagagtgtcttgtgtgaattcgaggtgtgtgttgagggaggtagccccctttgtggc

SEQ ID NO: 187045 - DNA, 1124 bp, Cannabis indica
aggtgtagaaagccagtagctgcaactctagggagagaaagcatatggagtggactcaaatacagagctcattctttaacgaccatatttcctctgctttctcaggctacaaaatttgctaaaacatcaaatgaccaagtatttagcataaaacaccaaaataagatgcatgagctattgtagttgcaagagcaaatatttatgataaaatgaatattacttgaagcaaaagaattattctgaatacaaccttacaatctatttttgctataaattttcaatatttacatattaactctttttttttaatattattactgttattctaattggacatttttagtattgatgttgtagtattaaagctgacttaggaatatataaatgcagaggtttgctaacctttttaataaagatgcataatctcgttgagaatacaatatacccaaattctgaaagaaatagatatgcaataactatttaaaatcagtacttgaagtctagaacacaatgagtatgtgatatatatatatatataaaaacatgccaaaatacagaaagaaaaaaaaaaatcaataacagagcacagctgttctatataaaaaaaaaaagccgatttgtgacgtcataaagaaactagactactggtattagtatcaaactatcagaattgcgattgaatcaaaatggcgaaattcataaaccctaaatctaaggtttcctataaaccctgccccataaatccctgactacaagcaaccgagtaatattgtactgagagcatttaaacaatttcttattatacccgaattctcaaccgtcaaggatcaaacttcgtgtaaataaatccctgattacagtgagaaaaaaagaagaagctaaaatacgaagcacaattctccgcgggggagaaaaacaaaacaaaaaagaaaaggaaatcgaaggaatgatggtacctagagtgaggagcggaccaagaactgtggatagtgaccaagtagggagcagagctgctgatcaagtatagattatggctacagttagaggaaaacgaagactgaagatggcagagatgactgaatcagtcagactgatgaggttgggtctagggtttagggtttagg

SEQ ID NO: 187046 - DNA, 2752 bp, Cannabis indica
agttgtgaaatgacttgtatatatttttgttcagtataataagatgtcatgtaaataaaaacatgttatattatttacgtattaaattaaattttagttggtgtcaacacaagctaaaaagactaatattatcaagtttaatatattttgtgctttggatcgagctttgtgataatgaaccatgcatgtttccattaattagttctattcttattaattattattagacattttaaggtgtgtctaatattataccaatacaatgaaatatgtgtaattaatgatattttatattatttattaaattaaaatatataaaatacaatttaataataatatatgtgcatctcttaatgcatgcaccttaatcttcttaggattcaaaaaggattaaaatgtaggccaatcacataggtaatgggattgattgatcatatatgaaccagaataattctacttttgaatgtctatatatagacatagtcttctacgttactcattacaagagcacccattagcagtactggtccaaccacgaactgcctaatggctctaaagttaatcctatttgctatatatatatttatatatatatatatatatatatatatatgagataaggattgtatcccccaacaagtgggagagagagtagtaaaaagtaatcatattttaggcaaatcattacttattacttattacaattttatatttactcatcattattatcatgccattttatttctgacaagataattaattttttaatatcttcccacgtgaactggggcatatttcaatcaagagaagcatggaaatacatactcaacccaaactaaatcataattttagtattttttataaaagatttatgaacaattttgatacattattattattattattattaatattaatggtttgcaattttcatgacgaaaattattcattaatttttgtatacaagctaagttcaacgttatcaatgcgactcaattatttgggtcaaatatggtaggcatgcaaaacccccaaaaaaaatggtaaaaccaaaaacaaaataaaaaaagagataattattaaaaaaaaaaaaaaggtagaaaatgagtggttgaagaaaaactaacccgccgccggcgccgccgtcaccggaaaacacttcaaggcgtgaggcctatcagggcaaaaacatctgaaatgatagatatcccaaaggaatccacacctcccaccgctttcctcacatacgctacagttactagctatccaattaaccataaacccactcctcaccacatctctcatcgttactattccaaattcattactctcatcaaccaccaccgccgtcttcgccgccatcacatctccgttcggaccaggtacacacattctcgacgcctcaaccaattcatcttcttcgcttcataaaaagccaaaaccgaattcgtttgattctctccataacaaccgatcctgttcttgagaaaatcattgttcctctcaatcgaagaaaatcgacaattataaagcaaaaccacactgttccgatcatcatccgtatcggcgatcttgaaatcaggtgagagatcagttaagttccgtataaaaggtaaacaagcttgttcgtcgtcaagatccaaaaacgcagcgtttgatacgataacagattggttttggtaaaagatttgtaaaacgacgtagttttgggaggagagattgataatggaacggccacgtgagtcgcacgtgagattaaagccagggtaaccacaataaggttcttgttggccttgaatgaagaaagggaagcttattgtttggtttccacaaaatttggggacaatacaagattcgtagtgaggatctgatgcagctttaactgagtaattatagaaaatgaaattgaaattgaaaagtagaagaaggaataatgagaaagagtttttcattgggaaaaatatcaaggtgtggtgtaggaattagagaaaggaaaatggtatgagacattaataataagagtgtggtgagtgttgaatggtttgacttggaggttggctgggttggattattttgtatgtactgtattttttgccatggactttagagtttagactattgaatatgtatgtatatatatagagagatgggttgaaagtgtgaaaccatatctgcaatttgcattatgtgcaaactcaaaatgggtccatcttctttagtcctataagagaaatgctagaaggtactaatagtgtcaagtaccctcttacgtatcaatattgttattggtgtaatttagtatcgggtctcatatagtttaatataataacttttaggaagtatcgctagccaattgtaaaacgacacatcttaagggtactagacactactggtactcaatagcaatgctcgtcgtataaatatatataaactataaaaagtaaaataattaatttagtccaccaacttgaccaataatcacattcaactttttctctttcaatagatatggttataggcttatagttacttggaatcttggtgttcatattttttggcaaaatttttaattttacttatagttttatttataattaaaaatataaaataagtataaattttggtttttttctttataactattatgtgatttttttttaatgaaagatactttttgaaattgtttgaatattatatttttaaaaaaaatgagtacattaaaaattatataatttatttttaaaataatttt

SEQ ID NO: 187047 - DNA, 1018 bp, Cannabis indica
ttaataattttaaataaatttaatatataaaatcatgaaaaatatttaaattaaaattgtcacttaaatgtcaaaccactagaggtgtaccaaaaacacgtctctgtattataaatttacccaataaaattatttatatttatttaagaatatatatagaacaatttaattaaaaaaattgacttcaaggtacttgatattaattttagaaataaaaaataaagaacaacaaattatatttaaaaaaagcaaaagggaatttatatcatcataaccaaattaatttcaagttggtcttaaataatattcccatgaatgatcaatacacttattattagcatatataggttgtgccacgttgattatacataaattaaaccaatcaaagcttttaaatttatttttatccaatcaatttatataaatatatattattttttatttaattaatattttttcatctagaagtagaataattatatgagacaagatctgacctattttttcttttaaaggtgctgatacttattgcctattcatctctatataatcatcttgaataaattctttaaataataacaaattaacctttatttttgatgccctaattaatttattacctttttttttttttttttctctttttctttctataatattatttaattgaacttagttgggttgtacagtcaaaccatgaattaaactatagatttaattaattttcgaatacctccaaaagattaattaattttggatgctcttcttttcttttggttaattttatttccttatatagctaataatattatctaaaaagagaataatatatatatatttgtagagaattagagggtttgattctattttgagttaggatatatatagcaccggttctaaaaagatatttatacctgatattcatacaacacccttgaattagtgtaccttcttatctatttaacttttagggaaaaatcaatgtttggttaattaacagaaaataagataaaggcta

SEQ ID NO: 187048 - DNA, 1108 bp, Cannabis indica
taataatgaagaataaaccaaccccacattcaaacgaacctcaatatatttatttgttatttatttatttattttttttgaaaattaacaaacctcaatattaatttgaagcataataatagagtttaacgactctgacaaaatcgaaatggacaaagttcaaagttgttaccgctttgagattctaacttgtgcttcttcattgaaaagaatagtttactgataggagaaccagctacctgatggtatctattgtaaactagtggcaaaaatatcgatgcatttttcagtaagtaaaccatgatttcctccccaacctgtcatattggaagatttacatttacacttattttgttgttattattattattattcctttttgtgtgggcgtgttggatatatagacaatgacataccctctgtagcaaaagacaccaagccggagtagttagaagctccaccaatggacttgactgagtatactgtcaaatgtatacgctcaaattcatacgtactacgtatatatataattgttacaaatacacacataaacaggaacaaaatgtgaaaaaaaggaagaacagttgagagtaccttatcgtaaccgctgcaaattacgtttgaagtcacagaatggccaaagatgatcatttcaatggttcttgcaacaatctgatgctggggccagtgcgacacaggggagaaacgagagattgtaatcttaggcgtattctccgaaatgaccacgaagcatcggtctagcagctttcgataatcggaggaatctcccggtcgaaggaggaacgacatgtcgtcggagagcgtgggagtagatgcaggaagtaaggaaacgatggtattggaaagcgtgcgcgcgcggctcccgaacaatctccatataacatccggaaccctagtacgtttcttgggcattttctcgggaaagttacgtgggaaatggaaatggaaatggaagtggagatgtttgcagggaattttgagggactcctcctgacttccccagcacgcagtcagcagtgaagtgacctggaaagtcaacattttaaactctctctctctccctaatactactctcccgcgcaaaaca

SEQ ID NO: 187049 - DNA, 1366 bp, Cannabis indica
aataaaataatacgttagtatgtcccatttatcatattgctagtgtctaataataaatgagcttaaaacatttgctttcaaaaaaaataataaatgagcttgaccaaactccaacttaactatttaaacaacccttgatctctcacaaagcaaccactactttcccattttcagttacagctcaaaaaagcaaaagctataaatttttttaagaagaatcataatcataataatatatagtttgctttgcttcataagaaagggtgaaaccaaaggtaagaaagatcgagttatagagcttatttttttttcttttggccccaagtccccaccacaaaagagagaataacaatcataatatcgttccaactttaccttattctaaattgctattattatgatataaataaaatctcatatatatctgaagctgcatttatggcttcaaagtttgttgcttcattgggttgttttatttgcaatgagagttggggtcccacatcgcctaggcctcactatccttctatgcctaaatatcccaaaggccagtcccccggcgatgaaggtgcagaggctaaagctcttttttcagtctccggactcacgtgctctgcatgtgccggctccgttgaaaaggccgtcaagaggcttccgggcatccgtgaagccgccgtggatatcttgaataacaaagctcttgtccattactactctaactttgttacggtaacttcttttctttcgatcgtttttagaaaatataaattggattaattttttttttttttatgtaaatatgtggtttccagcacatacatccacttaagaataagaatttttcataacatataccagtttatggaataatatgtgactttggttagttagtgtttttatatatcttaaagggccataatgggttttgataagattatgaaaatatattagatatgctttgaagtagtataaccaatcaataagttattatattagttttttttttttgaataaaccaataagttatatagttgaaagaagatatgtggtatttttgttaattattccattgaaaaagtaaagtaaggtgcttatataatgcattctcttaaaagagattcattgatggaatatgtaccatttacctatttcggtatttaaaataaattttagtctatcttttttttatattcgtgtacaatatttaaacaatttattttacatgcgtataaaataaaataattatacgtgttgtttcttttcaacgtgatcataataaaaaatttgaccaacaaaattattttaaatactaaacaaataaaaatatatcaatgcatccgttttgtaaggtgcattgtagaatttttca

SEQ ID NO: 187050 - DNA, 2516 bp, Cannabis indica
agagagagagagagagagagagagagttagggtttttaacttagagtatttggaggctaaggattaggcttagtgactttagattttttaagctagagttaaggcatttatataagagacttaaaaccctagctgacaatgaaattcttagatatttacatattaaataaataaatacaaatgacttaatttccccctgaaagtagaaattttcgtagcttttttattaggttgacaagggcccaattcgcaggtggcttgcatttcacgtgtagagttgtacaaaaaatcctatcatgtcaatgctggccggccatgctcctgccaggatctggcaggtcatgttcttgtcaactttaccaagaggaggccagcctttggcaagtggaggacaactttgtacatcgtttccttatagaggccagattcccttagtcgaacgaaagttgccttggtccggaagtcactttttggccggccagcttgtgcccagatcctgaccggcctatatgctcactctggctggcctataggcttctcttggccagctaaggatgtttgtacaactccttaaggattcgcttcactctatttgattgttgcttgacgatttcgctatatcttgcatggaggccctattatgctactggcaggactgtactccacttgtactctgtctttagcttacgtagatatgcgtggataaaatttagaataactcatacatataagaaaaacaattagatgtacaacaagatatttaaacataattttcaacaatgtaaactatttaaaatttttaaaaatttacaaatggtaaaaaataaatataatgtattgtatacaactataaatattattagacatgtttttttgtaaataccaaatcacatagaagactaccgaaacattcctttagcgtggtgtactataaacttttccttatattttattccacagattattaataataagtaataacaccatttaaatttggaggcagagaaatccaacaagcaggtacaaaaatggtcagttcctgctaaaacagaagaaaaagatgatagatatgatggccaccactactcatgatcaaaagaatcatgtgacttattctatatattaaagtttttttgatgaataagtagatcttaaagttgtacacgttgaagtttcattaaaaatatgaactcctttaacacacctatattcaatattagctctgtcaatgttttatatgacaacaatttgaatatcctttgaaataaacatggactgctatggaagggaaatatgagcaagatggttgaatagtaatagctaggcattgtaaaagaccaaactagaattttgaagaagcttaacttataaatctccaaattgggtttattctctcaatcaacattacacaaagcccaagcccaatcactactattatgtaaatgacacatcaaaagtgatttgatgagagaccaatcatcactattcataatttactttagatggttgttttcaattttttataggcccttgcttcaaaaagtgacctttagatttagatggaaacaattattagcaaagcaacaatttgttgctgcttttgttactacatttatacatcaattacagctttctccaatatcatatctcacaaatcccatcagctcaggtccttctagtcttggattgtttttgaaactacattcaaacaattttaacaaggatcaagttagtaacaaaaatatcaaacaaatcaatttgtttgtttaataattattattgtcccaaaagttacttttaaaaaaaaaaaagtaagaataatgattttgattttacgtacttttcctctgagaacttggcgaacgagccctgggtcggaaatgtaccgcacaaatcattatttgacacatcactacatataaatatatatataatgattgattaggctaacacaagtacatctatattatcattattaagaataatagatagatagatagatagattggcatacaggatcttaagatttccaagcttagtaagttgtcttggaatctttccactcaatctgttcccattcaatcgcctgcattaagtttcacgtgagcccatactaaattaatgaactctttcacaatgagtgaaaagtgaatatatagtacagtacatggttaatattattgtataatttattacacccaaaagaacaaacattatatacttacaaaaatttgagatttgaaaggttagatagagaagatgggattgatccagagaggttgttatggtaaagatccaagctaacaaggcttttcaatcctccaagttcctttggaataggacccatcagggaattcatgtacaattccctgtaaacacatgcaaaacaaaaagaagaaaccaatatggttgtggggttaatattattaaatgcattatttgacttgagcttcatcatctacactatacatacatctatatttaatactccatgccaaaacaattgattttcatcg

SEQ ID NO: 187051 - DNA, 1767 bp, Cannabis indica
catcatcctcacaaaagattctcctaatatattccacatcccattctccgttagcaaggcgaaggtcaaccactttggtattcgtaggtatatcggggttgataagtggtttgaaacttaagggtctaggcagccacctatccttaacaatatcaatatcttcccctgacccaactctccatctagctccctttacaataatctctctaccccaaagaagagccctccataccgaggatgccgaagaccctttcttagcatcaaggatgttggaatgggaaaaatagttgttctttaagacccttcccaccagtgagttaggattccttagtatgtgccgcacttgtttagccaagaggactttgttgaaaagctcaaagtctttgaacccggttccccctttctccttaggtgcacacattttgtcccaagatccccaatgagttttcttcttctttttagatgactcccaccagaaatgggctgccataccatgaagctcatgaatttttttttttgggagccgaaagacccccatagtgtagccaggaattgcctgaataactactttaattagcacttctttacatgccgccgaaaatagacttctcttccacccacgaactttattccacactctttttttaatagcatcaaacaactcacatttcctccttccaacaaagattgggattcctagatacttatgaaaatactccactgccttaaatctaaatacataaatacattccttcttcgtagcctcgttaaccgtcttcccaaaacacatctctaatttttcgaaattgatagtctggcctgatgcaacttcgtagctagtaaggatctttttaatctgattgcactcctcacggtttgcttccacaaatatcaaactatcatccgtaaaaaagaggtgagacaccgagagatgacccctcccaaactataacccatgaatatgtccctgatcttccgcatccagaataagattggatagagcttcagcataaaaacaaataggaaaggtgatagcgggtctccttgtcgaaggccctggttgggaatgaatttacgcgtgggttttccattcagcaaaactgagaaagacactgatgagatacactggtagatcttatgaacccactgatcagcaaaccccattttatgcattaccgccttgacaaaattccattccactatgtcgtaagctttcgacatatccagtttgaaggccacctttgtcccattacgaaatctattgcgcttcatacaatggatgccttcaaagcccacaatggcgttgtcatgtatcatacgacctccaacaaaggtgctttggaactccgagattgtctcatgcaaactagtttttagacggttggccaagcatttggagattatcttgtacaccacattgcatagactaatgggtctgaattcttccatcttcttaggtttgtcagtttttgggatgagcgcaatgagagtgtcatttagatgctccattgggaaatcctgattaaggatgtttaagcacactttcataacatcctcttttgtggtctcccagtactttttggaagaaaaacgctgggagaccatctcttccgggcgccttaagggggctaagggagaacacaacttcagtaatgtcatcttttgtgaacggtttaaggagctcatgattgatgtcctccaaaatagtatgtttcacctttgccaccacatcattaatggccccctgatatggtctattagaggtga

SEQ ID NO: 187052 - DNA, 893 bp, Cannabis indica
agctggtattggaagcaaattggacgacagtttcttggcaaagagaggtcgactttgttctaatgttgtttgtttaatttgtggcaatgatcaagtgtaaaatcaccaccacttacttcttgagtgttacttttgtcaatgtgaaaccttacaccatacaaatgaccaagaattatccaactctacctcattcaactccaacactgtcaaatgttttgcactctctactattttgagaccatcctcacttttctgagagtggatacatctgaagcttaaaactagttatggctgaatcgacaatgaaatatgcataccatttttgtgttgatccaaacaattttcgacaaaattgaacaagtcttctgaatcttttagattaccatttcaattttgttactcttaaaactgttgcagctcacaatatagataatttaagatgttgaaaatagatgtgtgaaaatatgtatacaacaatatatataaatcatattcatataacactaaaaaaaaacagatgcacaaacaataacaataacaataactaaacaaaagaagaatgttgagtgttactaacctcttcatctgtagattaatcaaaatgatatcaaaaatcaataagaagagcatgtcaagtaatggaattgtaattatgtaaaattgcagcaatatgaaataacaagatctacataaaaatatataatatgatcaataaattaatacagaaatgaagaaaaatcccattttcttatgcaaagtagtcaaatgcattagtacaaacataagctaggaattaattaacaaaacacaatctgaaaaagaagtaaaagacactcatctatactcagatgttccaataataatgtaaagatactaaaatatgacatttccat

SEQ ID NO: 187053 - DNA, 2464 bp, Cannabis indica
aataataccaaggaaaaaaccaatattattattcatttaaaaagaaaaataaacagacaaaagatgtagaccttgcatataaattataatgttggattgtttacatttgaagaatgagttattagatcttgaaatttgcaataattggatgaatatgtgttaatgttatgaacaaagaagaaaaaagtaacagctagctctctatgcgcgcgttgcgtggggtgacctgtagaaatgctcatgattgatcacacagtacagacaccacgtgcacaccccgtcggcaaaataaactaacaatttctccttagaacggagtacgtggcccaatagacacagcgttttcaataccataacacaatttgccatggtacgggggaaaagcctcggttaaaaccaaaccatggagaaagagaagcattcacaaaaagaaaacagacctcttccaagctttttcttttctttttccttttctttttcgaataacgaaccttctatgcacgcgtttaaagaggccttcgcacgtgctcactatgttatagtcagttatgtgcacgtgtcagcccagcccccaaggtttactccaggtgttatgttaatatctctagctactcatccccttccttgcctgggcctgtcctttctccattttttttatttattattattttctcacttttcattcacttcacttcctcagtcaaaataaacaaaaacaaaattcaaaacgaggccgtttccctaccctccaacccgaatttcacgtcacgattaggggaattctaatttttatttttctcaaaattatatatatatttaattatctagctataattcttgaaattcaccgacgacgaattgatgcagtgagagaaaagcttgcacaattcaacttccatcgatatggaaaatcacaagagtttcacatatatgggaaggactttcagtgatctgagcgtcggtgacaattccactgctttcagcgactgcaacagcgacagatccggcgaattcccgacaacttcgtcgcagagccgccggctactgctcgcttgcgcctccgataactcggatgagctaattcatcaactcgtttccgacctccagtcctgttcgattgaggagcagaagcaagccgccatggagatcagactccttgcaaagaacaaaccagaaaatcgccttaagatcgcagaagccggtgctgtgaagccgttgatttcgctcttgtcctcttccgatctccagctccaggagtacggagtcacggcgattttgaatctttcgttatgcgatgagaacaaggagcttattgcttcatcgggagcgattaagcctctggttcgagcactcaggatcggaaacccgacggcgaaggagaacgccgcttgtgctctgcttcgcctatcacaggttgaggagaacaaaatggcaatcggacggtcgggagcgattccactgttagtgaatctactcgagaacggtgggtttcgggggaagaaagacgcatcgacggctctgtacacgttgtgctctgtaaaagagaacaaaatcagggccgtacacgcgggaatcatgaagccactggtggaattgatggctgatttcgggtctaacatggtggacaaatcagcgtacgtactgagtgtattggtatcggtaccggaggccaggacggcgttggtagaagaaggaggaattcccgtactggtggagataatagaggttgggtcccagaggcagaaagagattgcggtggcgatcttgttacagatttgcgaagatagtgtgacttaccgtaccatggtggcccgcgaaggagcaattccccctttagtcgctttgtctcagtctggcactaatcgtgctaagcaaaaggtaacataccctcctcctactgtccaacaactacaaccgtttcccttctttctctctctctctcttggctttgtcagtttggtcgcctgagcctgtgagacttttgtgctccggtcgatgactctgtccagtgacgtggcacggcctttttataatatatatatatatattatattacaaattcctgttttaatggctgttttcattgtttcattaatggaagtgaacgctgttgagccacgtcataatgcttatcaagtcggccatttgttcaattttgaaaatataaataaaacactaattaagggaaactgtagtttttagttaaatttaataagaacattaattcatcatgatatatattaggctgaattaccattttaccacacctagacattttcatgtcgtggataaacctttcctatttttccaatatgcgaggctagacatgtctttttggtcggtgaagtgccggtatctccactaatatattaatatactaatagagttttgccaagtcttttgattagataaatggttaagtcgaattggtatgtttttgttgttgttggttgcttttttaaaa

SEQ ID NO: 187054 - DNA, 1711 bp, Cannabis indica
aatccaaatccttttcctcatagaataaagtaaatgttacctaaataaccatagcatgtttaccaaaaaaatctaaatctttgtcatcattgcgtaaagcaaatgcgaaacaaacgaagggcaagatcttgaaccagccagaatgtaaacaaggatgtgaaccaattagtgacagaatttatcacatgattaaaaattatctactggtatccaaagactagtatctcaactcttaacccgcaagtgcccttttctggagagctatatattcaagtatccaacaaaacacaatatttaagatattagaatcatgcccttttccctttttgcatcttcaaattcagacattcaataatcactctaaatacatttaaatttaaaaccagcttaatgaactgcctacacttttaatatgagaagagcaaacatattagctccaagctatactatttgtttccttattagaaatttaacataagtaatgaacttaaaaaaccaaccttagacgttgtgtaaccagccgcaagagcaagcacagaattgacagcaatgtaaagcccgggaacattgaacgtctcaaacataatttcacccgtatactcacggctctccggtgcagtcaatgggctctcagtcaaaagaaaataatggtcctctggatcacaacgcaaataattaaatatacactgctgccagaaccgctccattgcatcccaattttcaacttgcccttgtctaataggatgggtaagattatatgtgctgctagatcgagattttgcaagcgcctcatccccaataaagaaatcaagatcggccataacaccagcactatgttgcgctaaccaattagccttcgaggaagttctcgattgattcaaaaacgattcatttacagcaacgacactagggacaatgaaacaaggctccacatttccagcaaaacccatcttagtatagctgcaatcacaggaagaacaataaaaacacaaacccaattgagctatttcatcaaacaggttgtgtgcaatgcgtaatacccacataaacgaaaaatcaaatataacccaatgaaagaatttattcaaacacttatatagggttacgggaataattttttatatatataaatacccggtgccattgtcgatcaccacggcggggcgtgaagcggcggggtccataagaaaacgagattaagcgatgttggtttcggtttcggcgatgaaaatggatctgcaactgagatccttttaagggtgtaagagaaacgatcatggtcgtgaagggcgcttagagaagcgcaaaaacaaagaagaagaaggtgattgtgattgtgacagagacttgaaactaaagcgaaagcaaatactcaagggaaagcttggtagcttagagtgaataacaggttctccacccattttcaaagacaactgcataaacagactccaccatctctaaatgaattcttcatcatcattggttcagttgtttaattttctttgtatactcttcttgagaaacaaacaaccacccaccaccgactgaggcctctctctaatctattatctttggcttctctcgttttagatcgatttggtctgttctattctattctaatctttcattcaatgtttttgagttttgacgcatacgacatcgttttaagtcccttctgatttggtacccgagggtgatcagcaggtgagga

SEQ ID NO: 187055 - DNA, 3115 bp, Cannabis indica
tttgttcagaatacattggctactatgttgaggactacctttcggaagaagaaggatctctctaggtgggattttactttgtatttagtgatttaattggttaacatttttgttccatctaaaagtttatgctaccttaatgtacactacctatgattatgcactctagtaatatttctagtagcatgttccaaaatacttatatgttgatttgattgctaatttttcaggattctttctgatatgcggaccctttcagcagattggatggcaaacacaggcaagtctgagtctgaaatgcattctttgcagcatggaggagaagaaagcaaaggaaatgtatttttccctaggcctgttgcaccaactgcttctcaggtttctttcctctcagttgtctttgtgtttaattattacatgttaactcagtttctattatcatagcaaacttatgttcgagtgaattggactaaaggaaacacttgtggtgaattggttcaatttttttcacttaactattagggatatatgatatccttgttcatatttgcttacatgtgtaataatcaaacatgatcatcattacatacaataccgattttctactcaggcgtgcaaaagacttgtttgcctgagcttatatacataaaatgcagacatgaattatgcatccttgatttaaatattttacgcatctatgaaaataaaaaatatccaaacacaatattccatgagaccaaggaggtgtagttttatattaaactttatatcatctaagcttttgggacagctgatacttcggttgatgttgaactaattaacaagtttatttattttttatttttttaaaaaaaaacagggggaagaaattgataagctttcttctatatttaggtccattgcttacagtttctgatatatgaggtggtctctggtggtaatctgaggaagcctggagggctctttgggaatagtgggtccgagattcctgtcaatgatatgaaacagttggaaaccttcttttacaagctcagttttttcttacatatattggattactcaggtatgtttgctttgtcctctttggcttcatttttctaagagtgtcaaagttgataagctagaccaactatcattaatattgccttataagttataagcgatgtcttacgctcatttgatttaatctgcagcaacagttgcaactttgacagaccttggcttcctatggtttagagaattttatttggaatcatctcgtgttattcaggtataaacaactttgtaacattagaattggagtcatctcaaacttgaaacgtgtaacagagggataattttaatgattttctaataatttcaccaatattcctcttgttttattgaaacattttaattctccttgttcagtttcctattgaatgctctcttccctggatgttggtggattatgttcttgagtcacagaacgccagtcttattgagagtattttaatgccatttgacatctataatgattcagcccagcaggcattaattgttttgaaacaacgattcctctatgatgaaattgaggctgaggtacggaagtttctgtagttcgagaaattataattttattcttgtatttccattcatcctacagggcaaatagaattcttttaacttgttttactgtccactttattttttcttcgatgattggttattaatctttgaaaatattttcctttagctaatatttagttcaaacatgttatgataatgataaatcatttattacaaaaagcagagttttctggaatttctgcctgagtcttgttaatctttcttcaatcaggggttatgcttttttttctccttcatatttttgatgatacatgttagtttggtccaataaattcccttgctgaatcgaaagcatcttccattgcgtatggataattctcttatactgccactcatggataaacttttttcctttccaaagttgtttcttgatgattggccatattgttttctttaaaatataggtggatcactgctttgacttatttgtttctaaactgtgcgacactgtatttacatattacaagagctgggcagcgaggtttgtgttttttttcctgtgccattgatatatcaatgctatcgttacttcttttacaagatttatgagatagctaataactattgttggccatatatttgcagtgaattacttgatccctctttcctcttcgcatcagataatggtgataaattttctatccaaccaatgaggtttactgcactcctaaagatgactagagtgaaggtgaataatatttttgagtttgttactttctttcttttggtatctgaaacaaaaaggcttttattactagatattagaaatttatgtttatctttggcattttgatatcataaaatcgacatttttaactttggttctctgctcttttatgtgcttattaatacagctacttgggaggacaattaacttgagaagtttgattactgagcggatgaataaagtttttagggagaatcttgaatttctctttgaccgttttgagtctcaggacctgtgtgctatagttgtaagttgattgactttatttacttttgtcatgtagcattaagaaacaccttgtttattatcactcatcaaatgtgattttatggtttcaggagttggaaaagttggtagatattttgaagcatgctcattgtttgctatcaacagatctttcaatagattccttcagtttgatgatgagtgagatgcaagagaatatatctctcgtgtcattttctagtagacttgcttcccaggtgtagtaacattttctttgttattctaatatgataggcttgccttgtgtcactcgaggagcagtttctttttgcttcaaaaatagaacgagtatctacacccacccacacagatagatagatgtgtatgagaatcttatttaatctgggaaaataaaaaatattggagacttattttgagtttctcttaatcaacttgtgtctttcagatatggtctgagatgcaaaatgatttcttgccaaactttatcctttgcaacactacccagcgttttat

SEQ ID NO: 187056 - DNA, 2954 bp, Cannabis indica
tttacagtcttatctattcacatatacctatatcttgaagcttgaccatttttagcaaaaacagttgcaaattttcacttctgtattttagttttcaaggtggaaattttcttttggttataggtggtagattcggaagtttctgaagttccagtagattgggaggctccacatgcttctagtccaattcatcctatttactttgccaagtgcttgacaaaagtatgcaaaacatatcttaagtattacataaattcatgatgtggagatttaggtaagattctgttgcttgctaatgtagctgcagtgttaacacaaccattcatctaaaatttaaaacaattttaagttttgttctgaagcacttattgcatgaatttctctatagttacaagactacatttaaattcagtggtacatttatcaaagaaggttcttttagtgtctcaggtagtttaatctcatttctaaactttacttgtgtgcgtgtgtgtatgtatcgaggtacatatatttttgttttcctgatatcttctagacttttccttgtacattgaaatttactctggctcacttttctatgtgcgtctgtgtgcatatcaggtctattcaagcttccaacaacgatgacattttaatctaataaaatttttaaaaatatattgtgtataatgtttattttctactttaaaggttaccattgtttcatgttttaattatttaatgatattattacttgttatcttcttagtaattccacaatttattctttgtatgctcattgaaattatttactttcaatgtattttcttctaggttgttaatatggaatatgatagggaaatggatcatccatcaaatggtgtttctatattgggatgtctcagaccaacttttgcagatgaagaatcatatataagaagattatttcgccacgtagacggtgatgaatacttatctgattggtcaggtattgtagagtgtgatacttaaagtaataatgaaatgaaaaagtggatttcactcacaagatactgagaggtttgttattgtgatggctagatggtgaaattttaagtttggactcaaaaggtgatcgaagcaacaatggatcaaccctatacaggttggagatattgagaatagagcttttctctgtatacggctttcaggcatgtatattttaccttttatagaacattttttcaatcgctttattcaagtagcctggaaagaaaatagaattctttagacgtaattattataatgggaattatgattaatttaccatttcagttacttttttattagataattcccacattgtcttcaggcactgcaattatgtattcctagtaactttaatttttcatagtatactattctcattttttaaaaaggatggataattataccttgcattttgacattttgttcagtataatcatgtattttaaatgaaatcaacattaacctttattgctttagaaaaaaaaaacattaacctttattgtatgaaagtcttactcaactatcaatttgaacaattagttaccaaaataccatttgtagaattttaactcatataaatatatattttaaataattgaaactaaatccaatatatgctttccctctctttgatcactttttcttcaacttattttgtcttcatgtttatttaccaaccaccagcttaggcctatgaacaaaactattttcaattcgaacagtattttcctctcctctttctgagttttttctcattcccgctgtctacttttagtcacgaattgagaattaggcattccagaattttgtggcctatgatgatgattatgttgagggacctagaggtggcaatggaagtaggattttttattttgtatgtgtgttaccatttttattttaatgaatggtttactgatagattattaccaagtagctgtttttggtctcagttccagaaacagaaagaggaacaagtcaatattggaggaaatagaggggaggaatgtgtacagttttttaagatggattttaactatcttatcaatttaatttatttttaaattagacttttaactttgaacatatatatattgaaatttgaaaatggtatttggtaataaattggtcaaaatagatgcacaaaatgcaaggttttagttatataaatttcaattcccttgaaaatgttggactaaagctcatcatttttgttttgcatattgcagtctgcaattagtttgcaagactttcaagatgcagagcctgattttcttgtgcattctacttcagcaattgtagagcgcttcattgaaagaggcattaggtgtgatgttgctcttaaagcgctttgcaaaaagaaaggtctactggttgaggtaaaacactgtgctggtcgttcttgtatgatagaggtgcactgccagttgttttattatgcttgattttcatacaggtcatttatacgctacaggttttcctgttatctttttgttttgaccttattactgtatatgtgataaagttgaccactcagctgccagcctatttccctatactttaattaaggtttgcggctgtttgtgttaaaatctgagatatttagcaaagcaaagctagatttttatatcataggattattgagaagcaagacgagtagagttcaaaataatgatggtgtttatactcttagtagaggacctaaactgccagacttggattatttgatctatgccctcaaacttttcaagatggatctgttgaagaagtataatttcatccagaagttgttttatatggtttggtttggtcatttccttttaaagaataaaatggattcacacttgtagtaaaagtaggattgtagtggatgaaataattaatgttgatttaggcctcttatagcttgaacaagttctaaatatataagctacaaaaatgggaac

SEQ ID NO: 187057 - DNA, 4379 bp, Cannabis indica
ttttttttttttttactttgtactaataataaaaacatcaaaaaagaaatgtttagatataataagatactaatgttttaaaagtaagttgatggaatatgtttagtgaattaaacatcaaacactccattcgtttaaattgagaatgaaatagaatatttcactactattagttcaaataagctaaaaacatattaaatccttggaatataatactaatagagtagttaaaccatggactcggttggtcttggtccatgacagctcgatcaacaacaaaagagccgccgtacacataattgagtagtgctactagaaccataattagtagtgctactactaattgttattttgaccagccaaactcccaagtcaataaaaattagctatggacttctctccacttccctaccccgattttctttcaacctaatataatttaattacaaaagccaaaaacaatacaaacgtgttttgaattgagttggtatttccctggtaggttccaaatagggtccagaatgaaaataaaaatgagaatgtaaattaaatgggaatgagattatatatatccatcaaattataaactttcctatatcttcctattctaattttcatcgaaaaaaaaacctctcaaaaactactactataacagaagaaattaaggcataaataagaatatacaatggaggggttgttgccaatggtttacaagtcaatgaagaagaacaagacaaggaggcaatacgagcatctatcgtctggttcagctcagagcaattacaacgacaacatctcatcagatctcagtagtactaatcgctacaactccaagctgcggcgccataactcggtagctggccttggccgtggcgccacggcaacgtcgcctcctcctagtggtgctaggttggtccgctttagaagtcaccgcaccttcatcttctcctgtgtaggctgtgcaccataaatcatttagatatgcaattcattattgggtttgatggaatggatagaactgtttttaatcattagatatcacactacatcaaaccaatatggggatgtattctagatttgtaaaaaaagaagggacaaatataattcttttatcgtgtactaatttatatgaaatacttgaatgattcgagttttttccaaaccaaactgttaaattggttaaacatagtcgtagtttcctctctctacattgattttgtcctactttgctttagtttcttctctatatatttatcatttctggcgtaatattatatttcatccggaaatgaaattcaattaaacaggacatacaatacaatattcaatcaacatttcaaatcaagaagtctagaaaagttgtgataatctaccgaatttccaaactgtaacacagatcagcctttttatcgaagagtcacgagagtttatcacagccattaaagacaaataaaaaacaataaaatattcgaaaacataaactgccaaaaacaaaagttagattcctcaatatttacattcttgaacagatctgtcttgttcttaccatgcttttgcaacttaaaatgagaaagttgaaagaatagggacatatcacacgaaatcaatgaataagtgaaaatagaattgaaccaaaaaagtaattgtgtaaagtaaaaaagtgtacaatactacaaattaaaagagaggaagacccaatgatatatggtaattaaaggaagagttgggaagatattgttgttattgcatcatatgtatcatgaaagtgtttgttgatggtcatctaaccataaagtgtacatgttaagtagtatgttgatgatgttacactttaagttacatgaccatcaacaaacatatccatcaccatgccatgcctgcaacagccaatatgatatatgtgaagaaacagctaataacaaaaaacaagccaatacaagtatatatggaccaattttcagctaaaaaataaaagctttactaatacaatacgggtctgtctctttaataatatgattaaatttaaccgagtatattcttggtatattcgtcaagtgccaaaagcatatacttttaggataaacccttctcacgtctctgggtagtgtagtatttgtttgtttggtaggtgataatagatttgggttctggtattcagtgttgactggctagtaaactgaaattgcaagagaatacacaactctgaatgagactgcaagcaatgaaataattgtgatggttaaatgaactgtatcagcattaccattagactattggataaatattgggttgcatgagtattgggaccagtacatagaatttttttccttcttccttgaacgtaagaggaatatatataaatatatcatatactattttcaagcatcttacctgtccatgcagggtagtgcagaagttaacatacctgttatgtttacatctaaatatgtttgtaagtgaaaatatacataaagatgaaattttccttgataataattcctttatttaagaaactcaaacaacggatcctccacaaagaatgttctttcttcttcttcttttttgtttttttagaaaaatcatataagaatccgaaagaagcacagcttacaaaatttaatcaaacattaacaaactccattgaatgtaccgttttcctttccacaactgctggcttcttctaatcactaaacttgtgccaaaatacaccttttcctgcaacctgaatttcctatttaaaaaatgacaagtctatagaagaaagaaaaacaaatatcttgaaaattcaacatccacccgatacagcaatttagggtttatgttgagcaataatcgaggtatgcacagcttgttggggagacagagcctttccattcacaacaatttgttccaagaaatccacacgaattgatttgaactggtaagactggtatcacatgcatgggaacaaagtacttgttaacaaagagaataatttaacaaagctcagtcaaattttttttatcaagatattgtataaaagtctagtgacaaaggcagtaccttccctctccaagaaaaatcggtgtgacggtaaaagggttgtaatagcacaacctgatctccttctttgatctgaaaagaacaattttcgggtagttccaagattactaaacaggatattttgcaaggtatatatgcatatatgaagtcaaagactgccaaagaccatctcaattattatggaggcctaagtgcagaacttattatgcataaatattaataaaaaaagcttctgatttttatacttgtattaattaataagctgctgcacccaagtacgtaacagaaaactgaaaagttgcagtcacgttcaaaaagagcgaaatctcatagatctctcagattattaaatgaagagaactgttgaaatagaaatcaaaagggaagtcgccatctcttaccgcatcatttcgtagaccatacactgatagaataaagcatgtcttgttcgagtcacaaatcacatagtacctgctaaagaaaaaggacataataatataaattaatataaatagacaaaagcaaaacaaagaacaaaacatgtggaagtgaatccataagtcgtcttaggcttagcctagaggttcgaggaggtcaaaggttcaatctccccccaccctcttaggatagatatcaatgatgcaataaaaaaagaacccagcttcacaataactttacaggaacaagggtggtcaaaatattaacataaagaccataattttattctcaactaaagaacttacgagggagaagcatgctcgtgtttgatgaagaatagcacttttcccactagtgctacttctttgttaagaccttccagaagaagatctatagtacctcttttataagaggaatttacttaaagaaagaaagaggggtgaaagaactcagtattatgaagtaaaaaaaaaaggaaaaagaaaaaagacaatgctcgtctaaattcactatcaatcataaagtaagagtaagggagcttactaataacggtagtcagagacgctgcaatagaagcaagtcttttagctctagcatatccctgtcaaatgaactatatcaaaaatcctcacatgcctttgaaaagaggttaattaattcgtaagagacactaaaggatattataagccttcttaatagctaaccatacaatatatcgagagtatgaaaatgataatgtaaactgttcacaccaagaataatgcttctttaacaaataactaatcctgcaatgtagtaagtggtttgcaggataatataaaactataataggacatttcagccagtatattttagggaaagaaactataaatattattttattttctaaaaaattgcag

SEQ ID NO: 187058 - DNA, 4753 bp, Cannabis indica
tttaaggatttttatctaatttttgtaaggagagtctaacatggatgaaagttaagtgcacatgatttggtacatgtcaaagtttgagggatatgatttgatagatataaaagtttggagagcatgatttcgtttataaataattactgaattagtaaaattgaatgaaattgaatttttatatataaattaactaaatttttaaataaaatttaatttaaatatacctctttttatgagtattatattcaaattatccttataccctcatataaccaagataatatttcaaacataataaattgtgttctttagagatagatgtgcaagtttgtgggaaaattcaagcaaaattttagttagagaaataaaaactatcgtgaaatgataaattagtagaatgattgaaaaaataactaaacataataaattttaataaaaaaagataaaaattaaagacatcaattgtaaaaaaagatgtagtgtaatttcttctaacaaagagggttatgggagtgctccattgaagacattaacatattttttcagggaaggctaatttgtaattcaataaagattatatatagtataaatgaaatctggatcgtggtttattcttatttgctaaataaaacataaattgcagcgcatattggcttacaccactttaaaaaaaaattatatttttacatgtattattgaatattgagtaggaatgtatatacacatggaatgaagcaactccaaaactttaagcagcttgagctccatcagaggcatcactttcagagtcgtttgtaaggactagaagttccattagttgcactcgatactcaagtccccttaggtaatgtcccaacaacatgcaccttaacacatgaaaacataacccagctcagaacacaaaaaaattcccacagattgtgccctttgaaagtgtaagaatgggaaaatagtaatttgggatcaagttcaaatgataaattattggttgaatgggaagatagcaaaaggagctggcctaaccagaacaggagtcgggccagataatcgcgagtcaatgaaataaggggctgaaattgaatggaagtattttccacaatttcagcacaatctccattttcaacatttgctgttcctgttgaggaattctctgaaacaggaggcgccttggaatgcattctaggagaaagcgttgcagaagaccatgcacaacagagtagattgtttctttcaattcaggggatgtaggctccgataactccgccacctgtgtagacagaagatctatgtcagtatttgagaaaaattgaagaccatgcaaagcaaattaagcataactagaaatttaacatactgtaagtggcaaacacatcaaggatttcaaaactttatatccaagagataatttatgaggataaatattgtgaaacaaccatgcaaatctcattaaaaagtagaagttgctgtaacctgatataatttgcacaaagcagtccaacagtaaaccaaaagccacacctcattcctataaaccagtgtcataaattagactaaaaaatagtaaggaaaaaaatgtcaagatacatactagcacggacagaccggtggagatggagggatacaggcggcattagaactttattcaataaaattcgttgtacataacactgatgcgactggtggatatgaagaacgacggagggctaattaaagttagcctttgtgttttcttcaattaaatgtattatcatgcattcaaggatgaagatgaaacaactgtgaggagaaatggggtatgatcttattttgtaacctactaacttctaaatgcttctacataaataaggaatttgacaaaacaaaaacttctgttagagaggtcaaaattctcacaagatgaactaagaacattcaacactcaaattaacaaagattttctactttctacgtccatattaattatgggtcacaatacataaattgaatttacaacaattactagattgatgagtacaacagcatccactagatgaagacagcaattgaagatatactaaactcaattaaagattggattgaaataaaacaaactagtgataccttttctggttgtagtgatcttaaataatccagtaaatcattcttttcttccccaacaaattgttgcatctgaagagcagcagttctcctcttaacttcatggagttccttcagagaagagaaaacatacacaaataataatgaattaagaatagtgagaatcccaatttacaatattatcagggtaatgcaaaaggaaagacatggagagcaatacatgtactttgattggtagaaagtgaacttctagatctaggttaaaaaccaaaaaaataaaataaaatgaagaactaagaacacatgttatgattcataattttatccactaagtgttttaaaaacgaacaaaagccaaatcaatgattattttggacccaagttattgagccaatgaaggcattttcaatttatctgacaataacacaaatatttgatggtaaaaaaaatataccaattatacatttaggtagcgtttggttgaaaggaatgagaaactatgaataggaatgaaatcaaatcaaatttaaaatgcataaaaaaataaattgataaaaaaattattagatttttcctcatcttaattagaatgatctttccttccacttcaaaaaggaatagtcattctactaaatgatggaaaagtcattccattagaatgatattccaacactttaaaatacaactaaacaaaagaatggagtaaaaattatttcctttctatttcattacctccaaccaaacgccaccttatagttagataatttaattgcataaacatataggcacatgcacttaccaaatattgtagtagataaccagagcataactcaattggcacaatgtaaaataaagatatttatctaacaaaaaataccatcaaaaaattaacccaaccatgtttcacctctaaaaggaaatttaccaattcttaagtgcatacaaacacgggcaaatacatacgcacacaatgcatttgccaaatattgcagcgatgaccaacaccatacagtctatatcatactgcactgcactacaaagtacaaactgtaatctaaactatactgtaacatcattctgcttagagggtccattaaataaaaacacaaagacaaacaattttaataagtatatgaacacaacacaagaagtccatacagaaaactcaagtatgttgttaagtttcagtgggaaatactagtaaaaatactaacctgacagaaggaacaaaattttcaagttttcatgttcatataaatcctacatatgtatggctataaacaattagaattctaccgatttgaactaaatcagagagtaaaaccaatgaaatatggatataagttaagattttccagtctttgaaatcgacatacctttttagctgacgataagtgagactgtaactgacgaacatattcttgagcttcaggggacatatcaccaacatcttgaatttcaagattctcagatggttctacaaaggtttcttcagattcggacatgggctcatcttttcctgctaatttgattatattagcactatcaagcaacattccttgtaagtcaaacctacatattttaagcttctggttttcaaggatttcttcataatcatccatatttctttccagacaaagtctatattctgcatttcgtaaagtatacctacaatggaagagaaaaagaaaaaaaccacattcaataagaagttaaaaacgttaattgaattgagacaaagagaattgagcatacccagtcatcatagaagaaaccaaaagcttggaaagaggttcccacaaagactcaataagaacttgaaattgatcagatggaagtaaacccaacatgcccgaaatggttcttttcatagcatcaacagtagctggtggaacatctttctgaataagactcacatccaatggttcaatctcatgaatcaaattagagagaatcgatttctgaaaaaagaattaggaacaatcaaatccaatacaacacgaaaaatgattttaaaaagtaaaggattaggaagaagaaccttggaggattgaattcgaggagagcgggcattggagctgaggtcatggtgatgagaagcgagaaggagagagcgtgattttgtggaagtaagagtgggagtcagataatggcggagagggaaggttagagaaggaggaggaagaagagagagagaagaggaagagaggaaaggagtaagagttgccatggccatggatggaagaaccaatgaccactctcctcctcagtcctcacaactctccattctccaatccaattctctttgttttttcttaatttgactctaatctaaccacaaccaccaattgccaaacaaaaatataataatattaatgatgaaaaactaaacatcaaacgatgtcgtttttgtcttgataatatgaatgaagaagtgcttagtggtgggcaacatcccatctcatctaattgaatcgaaccgatcaaatctaattcaattacaaaaaattggatatctaattataattagattggattggattggatgctaaaagttagattctaattagatttgatcgatgtcaatctcaaaatccaattaaaaactgatccatttcaattacatttacatatgttaaaaaattatttatat

SEQ ID NO: 187059 - DNA, 780 bp, Cannabis indica
cgtattttgtttagttttttagttttttattttttttttttttggttgttttgatgtttttgtgaaggaggtaggtagctacagtacgtgagagattatgggatgacgaaagacatactttgtgtttgtgttatgtgtgtatgtacgtacacacactacatgactataatatatatttatattttaacacctatacgtcatggttgagattacattttggtagagttgcccaaccataccaatattggatttgattcattaattgtttattttatttcatattttgtgatttactttcaaatgagagtatattatagggaagctattctaagcaccaacttgattaatcaataaataattttttcagaacaaataatgtcaactaccattttctaatatgtgggtgaaccaaacacaaacactttaatttcttcagaaaattttgggtcatcaatgagaaaggcccaaataattttggtataaatgaagtcaaatttaccaacttatactgtatctatactatacattaggacacatattcctataattaagggtttattggcctcaaatttaaagatgaattattgaagcccaacatgacatggatggaagtgactttccactataattattaatcttgtcggattttattaagatcgatcgtgaatttatgacaagaattatattgctaatgtatgttgaaaaggttattttattttgcccattccttgaaataagggagttaaatttgacagagcagaaatacatgagattgctcct

SEQ ID NO: 187060 - DNA, 2546 bp, Cannabis indica
ataatacttaagttacatttaaagtttgtattttatagtgtttaatttgaaatttaaaatttatagttaataattttgattgtatttgaatattgaagttgaaatttagaatttacagaaccacaaaaatttaaccaaaataggaacaaatgctgttatatttttcataatacttttatattttatagatttactttaatatcttcaatagttgttataatacttataaaaataaattaacaactaaaaaatttggacaagttttttaacaactcaaaaaatattcactttgatattattattattccatataatcaccacttaatactattaacaacgtaatcaattttgaaagatgtaaattaattatgtaaatattgaaaaacacaacaaatcaattattcttgtattgtgattttagtttaccatcttcggagaacttccccttggagcctccagataaaatttttatgacttaatgagaacgggccgtgaatacttatgaagatttcctcaatactttaattgtggttaaccctatttaaaaagcgagaaataacaaaatacatagtttacttaaggggagtctgcgttggtctcaaatatgattgaaatgacctattgctctagttcttggttttatctaattatttgcttattttgggaaaaaaaaaaacacaaagttacaccaacataattttttttattaagcactaccaccaaattttcctaacattgtaaggaaatgaatgctacatataatatataccttatatatatatttccattattttcttactacttattacttaatttattctctattgtaagagatgaatgttttagcaattaaataaaaaactttcatttcaaaaattaaatttactttatttactgatattgctaaaagatatttgtgttgtctagtatatcatgagatattatatcgttattgttataatttattatcgaatcttaaaagtaattcatattattagacaccatacctaatagaaatgcttctataaaaaggaacaaataggaaaaaatatttgttttctacaaaaagatttttggatattacatggattgtgagactattataaacctttttttattattactttccaatattatataaaatattactcagaatgaaatagattttttgaccatgaattcaatatatatgtaaacttatacattaacagatgagtgtctaataattttatgttgattctcttctctgctggtaaagcaaatcaataatcatttcaatttcgaggaagacaagaatggcgtccaatgaagagaagaagggtatgtctattcccaatcgagccttgaaagccaaggagaaagagaagaagaaggagcctgctgcaacccaaaccaacaagcgtgatcagcagatcgcgagcgaggtaggtcgcaaggctgctgagattgacaacgaaggcttcctcgtgtattgcctcggggaccttaatgacgagattaacaaccttatactttatgataactaatggcttatcatgtatgttttgtaaatggatcttagcattcccattgcactgtttcagttttcaatttaaattatatgtatttgtttttgtttgaatgatatctttgtgttgtgcaagccttgcgaagttgtttttctatgattgtaagcgattgctcacttttttgagaaatgattctattgtctttgtaaaactttattagagcctctatattatattccaattgttgttttagtttaaaatatgctccaatcgatttgctatctagtttggtagcggaaattaatggttaataaagttaaattttccattaaaaaaaaattcaaacacctactttctctttttgattattgatatacttgggttcaaaaccaatatagaatctatacttattggtattgtatatatatacatattataaagtcaaggaaaattaatagagtaataagaagggaaaaaccagatgaatgcacaaaaactatggaaattatgttctacattacattctacatggaaaaataaacccaatgtttcaacaaaatcaacaaaaagaagaaaagaaatatcagagatcatattcggacatgaacatgaacagaagaggagtgatagctgcttcaaactaaaggttccgaaaactgtctgctttttcgagtctagttgtaccagaacttgacgactcgcccattgcttctggagaggcagaggctgctggtggctgtgatgactcttttttcagagaagtggacatccctgaaatctcctgttcaagtatgaaaaagttcactcaaaccatcgggtatgaaaatacgaaagagaagcagaaatgttgaggctgaattgctctactctctcttgttttcagatgggtttttcaattttcatattatccatggtgttaaacatgttttcctcttctgaatatgtcaaaattcttagtcataagttatttgactacgaacgaattagcgattttctcattgcacttaaactactctcaatacagcaaaaaagttgaac

SEQ ID NO: 187061 - DNA, 1240 bp, Cannabis indica
aaaatagttttattaaaaattacattcttaatgtttatagttttaagtccacgcttttttcttaattacccatagtctgtaacttttagtaccttcagaatagcctaggaacacacactttagagctctagactctaatttctcaacactttggtgtgcataagctgcagaaccaaaaactcttatatgtgacaaatctagtagtttgccagtcaacctctcttttggagttttgaattccacaacacttggtggacatctgttgatcatgtaagagcagattcttcctagaaacatattgctaatctagcttggaataacatacatcttgcttcgttcaaaatagtcctgttcatcctttctgccacaccattttgttgtggtgtgagccttactattcagtgcttttgaatacctatttttttgcaatatgtatcaaacacatcattgcaaaactgtaggccactatctatccttagagtcttgatctttttgttagttagattttcaattaagactttccattcctaaaacttagtaaatgtatcatttttatgttttaagagaaatatccaaaccttcttatagcaatcaccaacaatagatagaaaataactacaaccccatgggtagatacctttcaggatcccataaattagagtgaatatagtctagtatgtctttagattatgagttccaaccttaaatttaaacctatgatgcttaccgaatatgtagtgttcacaaaaatccactttacttactttatttttgtacaataggttattatgttccctcattacttgcaaccctctttcacttatatgtcccaaccttctatgccatagggtagccttagaatctttaggtgaatttatgctgttttgtgatagcttgaaactaattctctcattaggtagtagagacctccttctttatagcatttcgttatggtcatggaatccttgataagttttattgtacttgtttcaatttttctcgcaataccaaggtcatttagaaaactaatgacactaagggtaaagaatttggtaacttaccattaaatcaaattacacaattcatgtgaataaatatattattaagtatataattgatgatattaagggtctcataattttaagttgccttaggcgcgccttgttttcttaggcacaaccctagtttttagttgagccttggacaatcacggttggggctggagagagagagagagaga

SEQ ID NO: 187062 - DNA, 2808 bp, Cannabis indica
ataggtttgcttcgaataggaaaaacactaacaaaattaaccatcttttccttggtgatggcaccaaagtggataatgttgaagacattctcaccgaaattgagaggtactacactaatctcttcacatctcaaattctcacaacagtgctattgatgatacaattcagggtattactacccagcttaaccctggccagcaccagtttttaaagcaagttttttcccccgatgaagtgaaacaagccctgttccaaatgtccgctgacaaagcccctggaattgatggtttcaacaaccaattttacttaaaaaattggaatgttgttggcaactctgtcactaatgcagtgctcagttccctgaatcatggagttgatatcacccattttaatacaacactcatcactcttattccaaaggtgaaaaatccctctaccctaaagactaccgccttattaggcttcacactactatctacaaaattttctctaaaatcttggctaatagaatgaagcatgttcttaaccccttaatttaaccaaaccaaagtgccttctcaagggaagacttatatctgacaacattatgatagcacaagagctcttacatgccattaaagggaagaaaatatgaagcatttgttggatggaaatcaaacttgacatgatcaaagcatttgataaagtaaattggttttttttctaaataaggttacactgaaatcggttaacctaccacattcaattccctgattatgaactgtcttacaacaactttatacaaatttaacattaacggtcaggaccttggtcacgtcacccccacccgtggaattcggtaaggtgattccatatccccttacctttttctcctttgttcagaaggtctctcttctcttcttagaaaggcaaaggctaagaaaaatgtcgttgggatcgaaatttccagaactgcccctaagatttcttacttgctttttgctgatgatagcattctctttcgccaattaaatattcaagcttgcaatgctatcaaagaaatcctctcatgttacgaacgcatcttgagaaagcttgtgaattttaacaagtccactgcctttttctctcatatactagcctaacctaccaaacacccatccaagactatatgaacattccagccaccaatagtctggacaagtatctaggcttagacaattctttggccgctgcaagaagcactcttttaaccccttgaaggatagaatttgggcttatttggacaaatgaaaaggcaaattgttctctaaaggtactcctgaaagttgttatccaatctattccctcttatgccatgtttgttttcaagcttcacatctctttctgtaaattcgtggagcgggaaatggctaagttttggtggggatccaaagaaggagaaagaaaaatccattggaaaatttggacctccctctgcaactttaaattcaatggaggtttaggctttcaatccctaggtccttttaaccaagatatgcttgccaaacaagtttggcgcattcaaacacgccctacttccctccttgcaactctcttcaaatccaaatactttcccaattctactttccttgaggctaaattgggccatgcaccctcttatgtttggagcatcttatagtgggggaaagacctcctcaagaaagggctccgctggagaataggaaatggtgacactgtgaggatttactaagataactggattccaaactgctagttcctgccccgactaagtcccctagccaacctcgagtctctagcctttttcttgactcaagagactggaatgttaccagactaaatcatttctttaccaaggacattgtccttgatatcctctctctcccacctcccattatccataagcttgattctctcttctggaagtttacaaagtttagaaattacattgtcaattaaggttatcatctagcacagagaattttatgagaggctaagccaacatcttcaaattcaaactcgaatgttagttggtgaaagttcctttggaatctcaacattcctcttaaaataaaattgtcataatactctccacctgctaaaaacttgcgtcttaggaagagcaatccctcccctttgtgccctcgttgcaacacaactcctgaaaatatttagcatgctctctttgaatgcaagtgtgtcaagaagatttggacaggtacgtctttcaaagcactgataaaaagcaatgaaagcaaaacaatacttttgatgcattgcttagtgttaaatcacagttaatgaaaaatgagtttgaattgtttctttgtgtactatggaaaatttggaatagcaagaactcctttattttttagaaacttgcaggaacagccctccaagatttattaggaagctatagattttttctagttttaccaacatgctcaacaccagcaccctaaagatgccccagccaaggcctcaactcaggacactgcatggataccaccaaaagtagagcagcaaaaacttaatgtcgatggagcggtgtccctcaaaaaggagaaaataggtttaggtaacctagtctgaaactcgtcaggacaagttattgtcgctttcgcaaaaagtaaaatggacatgatgcatccaaaaagtgttgaggtgtggacgttattacattcattgcattggtgtaaagacaactagattatgattcatcatgtggaaaccgactgcctgacttgttcaggacattaaatcatagacaccaaccttaccgaatacggagcgcttgtggacgctct

SEQ ID NO: 187063 - DNA, 3328 bp, Cannabis indica
aatcttaaatttcccttactaaataaaataaagtaagataaccctatttctttctctctcttccgcccgttatctccttctcaaccgcttcttcttctccgttcaccaccgccggccatctacggtctaaaccaatccttgttcagaacacaatctgaaacccggtttccttcttcctcgcgtttttctctcgcccgacaccacgacccaagcggttagaggccaagaagatccgtgagccgtgagttcggagtttgctggaaacttagagattcgacattctaacgggttcgattcggccattgatcaggtggtttcgaattattttaccaccaactccttctattatttgtttcattctttgcaacgtgtgaataatatgttatagcaataatataagggtttgaattaacctttcgattgctctgttaaacttaatgagttgatttctttgccaaatagttcgttagaagaaaatgatttaagttctcagaaagaatttatatggtcacgattttcacaaaacccgtaaactgtattgaaatatgaatatttttcaggttttttccctatgtatttcttagttctattttcaccctctttgtctctcttctcatattttttgttcatctcatcactcatcagatcagattcagaccctcggagagagaaattgctcactcaacactcaagttcaacatttgataatttagattacagtaagaattctttttgtttataaatatatatatatttatatattatgtatgtatgaacctgattgtacatttaagattgttttgttttctatgataatctgagaatatgagaatgttatgagttttgatatatatgttttctttgtttctatcttgttaatttaagatgatatattatttttttgtttctatcttgttttcatcttggttagccttagttttctccatctgtatgagggtttttgtagaattgatgagttttatggtcatgatatgaactatgaagaaagctactttaagatttggctatatgtatataattgtgttcttcaaatctctcatttgcgttattctgttttcttactctttgtttttaagcaatttttttgattggaagtcaaagaactttaatttgttgttgttgttgctaatatggtagtttgtgaaaacatctccttaattgctcttcttttatgattaaaatgctagtgtttctggttttgctctaacttcaggcccctgtaatggatttgtagtggtaccgatctgtttgtcaaacagaactatactgctggtttgttaggttcaaatttcttaatagattttagtttttcattttcaataagagaaataaagaaagctatttgtattttctgttttacttatcttaaatctcttaacacttctcagaaaatgagaaatttgtctgacttctggtgaccttgaattagcctctattgactgattacattatactaactttactttatccattttttggcctttattatttgaaatatcatatatgagcactacatttaatctttcaattacttgtggtttacgtatctaatccctacaaaagcttttatctacttattctttttgcccttctagttgtagtatggaaactcaattcaatttataaacatgagaaagtagatgaggtactttttttaaattatatcttcttatgctaccgccaaactatttgagctggtggtcaaattgctgtgatggtcaaattggtttaggacgagagaaatagggagaaagactgatagagagaatgagggggaaaacaaatgatatgggtacttttggaaaagtggtaaacaatgacatctttttgttatgtggtaaacttatgagtatttgtttgttttggtattcactatgaagcatagaaacacaaatttctcatctgaaatcaaacattcctttaatttattttttaaacagacgatgggttccttagatccaccaaaagcggagagcaattactctaatgccgccggtaagtcggacgccatccacaaatccacaggtgatgatggtgatccgccagttcataaggaaatgacgatggagtacgactccttgaaaaagcgcaagaccagcatgcttcccctggaggtcggcacaaacgtcatgtgccgttggagggacaataagtaccatcctgtaaaggtcattgaacgtcggaagcttccttacacggctcccaacgattatgagtattacgtccattacactgaatgtaagtttgagcttatgcttttatttttaaaataaaagagttattttaggtataatttgtactcgactaatttggtttgcaacctcttgaatgtgttgtgaaaattttctcattattggaaatcatttggccggggtagctgtagtgctctgctctggatgataagttttagtttaggtagaacccaggattgtgacattgaagtgatgcacaagcttggttataaggaaatgaagaaagttgtttagattattataagaaatcattggcatttacatgtgaaattgaggtaatggtcaatctggtaaattttggaccattttaaatggttattatattattgatagtgtccaacaagaaggttatacattgaattgaagaagaaggttcaaaggtgtataaagaagaatattgtagaaggaacttacctattattatctcaaaattttggttgagataacagtgtggaacagttcttgtaattgctttaggtgtgaagaaattgacaaagtttctacttgccatagtgtattgatttttggaatttttaattaccagcttaaacaatttgtaatgttcattgagaataatagctgatatggatttgttaggatatgtcttacttattctattgttttaaaggagatctatgtagcgtgattgactgtaggatagattggttaacaaagctgggaaagaaaagatagatttgttaggatatgtcttacttattctattgtcttacttatttgctggttgatctcatttttgtttattatcttgtttacatcctactatttttaccactgtctgggaagggcaaaaactatattgaagttaaaattccaatgatagttagtgatatctcaatatgcctatttttattatggtttaataaggtcgtattgttcctatgataatttcatgtaatagccattcatatgcttgtttaattttatatgtatcttaatcctttattgcttgcattgttagttaataggaggcttgatgaatgggtgaagcttgaacaactagatctagactcagtacaggctgttgtagatgagaa

SEQ ID NO: 187064 - DNA, 1277 bp, Cannabis indica
aaggactcatttcacaatggtctatttccttcaaacaatcagatagcatccagaagaatacaatatggttcatattgctcaatgttgtatggaaatgttcattgaattagaaaacataagttggtatcagtagttttaggattggtgtgaggactgtagttgagttgtttatgtgacccaagtcaggatttttgtgaaaatcagtgaaagatgcagctgatagaaggaaattagtgagcaaatggcatcccacaacaaaaggaacactcaaaaggaactacagggtgccatctaaactcgaaggaaggcgacttctcaaagctattgcttccttattgtcagacgacgatcacttcgtagatgcatcctcccacaaggtagcacaattgtagaaagtgctaaatcatgctttattccatttgttctttttgtcttctctttttgcttaatcgaacgatgttgtgaacttgtagggttgtcaaattcgaagggagagcgcacatggagagagcgtttgttgcaacaatgtgagggccctgtttgatgaactcccaactccacacctaattgtggagatcacaccattccctgaagggcctctcactgaaaaagattacaccaaagctgagaaattggagagggtacttagaactggcccgaacgtttgattcttctctcgagttaaatcatcgctgtctctcgttagaactacagcttaattgtatgtatgttttgagccttgtacatattgaacagaaaagtttgctgctccacattttacctgaactgaaaacatagcaagcttccttaaattgacagttttagttttctcgactttcagaattggtagtagtagaagtagaatttagatacttttagttgctgtcttgacaagaatgaagagataatactaaagggtattattgaatctatgtagatcatgccattggagttgagtttttaagattgtgaaattttctgaaaatgatcataagtaaataaatgtgcacataatacaaaagtaatcaaaattcagaaaagaggattttggcaaagcagaaagttaaatggtaatagtagagcctaaggaatctggtgcaatcatttgattcttaggtgaaaagggtattgagttcccagttagatctgtggcaaagagattagcaagggcatatgatgagattgaggttggcccatgtggttgttaggttgagaccaattgggcattggcattcctaaaggctggtttgaatagttaaatcttatcattcccaact

SEQ ID NO: 187065 - DNA, 2277 bp, Cannabis indica
agataaaccagaggctgctgaggaggaaaaaccaacaataacacggccagagtaatcttgaactattgcaccataaccatgtaattttctctgcatttgcacagcagcatccacactcagtttaaactttccatgagggggcaagggtggggtagtggggttgtggtccgttgagtcgctgccaatgacaatttgatctggaatagggagcacctggtgttgagcttcagagtattcctgcaagtaagaaacaacaaacggctatatgtcttggaagacaggatctttagctgcaaaaagagatttgttgcggaaattccaaaaagcccataatatgccaaataaaatgtggagatcctttttggaaaacttctcaaaaccatgcaaaataaattccttaatatcacaatatctattggttttaaagaagtcaaaaaaattggtatgtttccaaaacttacctgctctggaacactctaaaagggaataagagttggagtcaaccttgttatgacagatggagaaaatgggactaggcaaaaccttttgggtaaaaagattaaggtttgatgggaggagatcgttgaaagccttccaaataaagtgctttatcttgggaggaatggtagatgaccaaacagtcttccaccagcccttgaaggaggtaggattggaggatgtgggtgaagaatggttagagttcgcaaggtgataagcagagcttactgtgagcatgctagaaggacgatgcccctaaatgaggctacccttgttctgaggattagtgggcacaacaagaatggattggacaatttcagtgtcaaagtagaagttgagtttagggatatcccaactaccattcttgataaagaaagatagaatactaacaggaggttgagaaccattcttataagtaatgtgtctatgattaggcaaccaattagggctaaggataggaatagcagaaccatccccaatcttctaaattaaactagtggtgagcaaatttctgccccaaagtatgctttttcaggagaaggaggggctgtgacccagggaagcatcgaggagggtattattctgaaaatatttggcttttaagatagagtcagtgttgttgtgaattctccatgcttgcttagccaacatggcttgattttgatggatgatagatctaaatcggacccctaaaaatcttggatttgcaaagcttgtgccaggtgttccaatgaattttagagttgttattccctttggagctccaccagaaattagccatcaatttctccagttatttgcagatggatataggaattttgtagacatgacatagaaaggtatagcttggatcacagctttcagaagaatctctttgccagctttagaaaaacacttgcagttccaagagtttagctttgagttagccatttgaaggatgaagtggaaggaggacttctttgagcgcagaagacattgggggacccctaagtaatggtcaatgaaaggtttgtcctccatccccagacaggaaagaaaagagtgtttattaagggaagcagtgttaggggaaaacagaacggaagaattggttaagttaatagactgacccgtggctctatgataagtaagcaagatatctttaatggtctgagagttctgggggtcacatgagtaaagaggaggctatcatccgcgaaaagaaagaaagatatagaaggggcagagcgacagatggaaatgccattaaccaagttaagttgctctttagaatgaatgattgcagacaagccttcagcaacaaggaggaataagtaaggggatatggggtccccttgcctgattcctctggtggggtaatagtggatgaaaggccagtattaatacaaagtttaaaagaaacagtagatatacattaaatgatgagggaaaccactttatcaaaagctttctccatatcaagcttaagggaagcccaaccaattttgcccttcttacgactgttaatagtattgatgacctcattagcaatgaggatgttgtcaaagatgactctattattgaggaaagcaccttgattatgggaaacgagaccactaaggacaactttaaggctattagtgatagccttagcaacaaccttgtagattgtggagcacaagctgataggtctaaagtcgcgaaccttggtagcattactccttttaggaataaggaaaatgtaagtttttttgagaggagtaatgtccgcatccccatttaaaacctccaagatagccc

SEQ ID NO: 187066 - DNA, 5481 bp, Cannabis indica
ttctaaaatgaaaatttgaatttagttactgggaacatatttttgaaaatgtgattagttcagtgtttataaattattttagaatttttaaaggttgaatatgtgattgtgtgataatttataaagtagttctgaagatgtgactgatgcactactttatgtaacatttttagttgtccctcctttttatctcctccctttctctcatagcattctttttttttctctctctctctttctattccttattatgaaattcgggaaccaacattggttcaacatatgtagattttcctttttttttttttcttttgatgcttactttagatcttattcttaaaaaaaataagaaaaaaagcatgtgttgttttaatgatttatttattattgaattgttgacttgagtatgaagaatcagatcttttagaactttttgtttgttcgttagattatctcttcaatacattttttcaacctcttttctgttactcatatgatattgatttcagatttgtgtacatcttttcaacctctattttctatgcgtattctaccctcagtttctatatatcatttccatgaaaagatattctatgcggtttacaaccaacacaccccacatcatgttgatattattccatatgtgaaattaatttttaaaaaatttaactcttgaaatagttttgtctctgttgtttaatttttatgattcttaggaccaaaaaattaaaggaatggagcccctcaaatcgattggcctaatgcatgctttgacaaaatccccactccatgaacaaaattaatgcattttattctcttttagtaattgattttcctggttggattggagcatatttactactacatttctttttagattattcattataatttatgtactcaggggttatcagttttgtgattatgaatcaattttattgatttattattttattaatttatggttaactagaccgatttacaatttcagagtaaaatacaatttaaacaaaaaaaagtttgaataataggataaacaaaacttgtatatgaaattattaattataaaactagcatttacttgatatattatatataattatatttaatctaaaattaaaaaataaaaaactctatatataatattaaaaaacttgtaatgtccacatgaaactattcatgacacttgaattatcatttttgcagtagtgtccatttgatatatattcattatgcacatgtatacaaggtgaagaagtcttacctttggttcttcttggtgagatgttatcgtggatcgatttccagataattgtgtaacgttatcagttggtgaatcgtctgacgtaatcaacgttacgcataaataagtaattacgaaaaaaaaaagttatactgtaaatttttatactaaacatagctaaaatgcattaattttggttaagatcattccagtgactacttgtaaatatcgaactaatctgagtttagtagaaagaaaaatgcatacacacacttgcttataattttgtttttggaacaatcacaaagtgttaaagattaatttagtttaataaacataggagaaagaagaatacaaatattgaaagaaatacataccagcatagggagtagaacatcgcaagcaggctttacggccctctttgatctcataactgagacaatccttgcacatgggaaaattgcactcatgacaagccacaaacacttcaccatttgcatcaaccccgagctgttcaccacaagtgttacaaacaggaatcccagattgcatcatttttatttcaggttcctttggctcccccaaagctctctctctcttaatattggtgattgttcacttgatttttatatggaaacccccaaaacacaccaccaaaagggaggggcaagttggtcttttttccctgacgagagggtggtggcggtggtgttattatagaagttacatgcaagattggttgaggtggaaaaagcttgggttttgtctgttggttgaagatgtagtctcctcaaccgaaaccttccttgcaattcccgcaatggctttgtctgtaaggtttgttggttgaagtcttgaagatgtagtctcctcaaccgaaaccttccttccaattcccgcaaatatttcaaggtagagagagattgcttgtcatctttccatggaagaagaaagaaaccaactccctaaccttcaaaaccaccgttattaattctccacattctttcagtaaagatataatatagttttcttacatcgccatctttctcttcatctaatgttacgacttacgagtattctaatttctcaaaatttcaattcatttcctaaagttaatggcaattgtgggcggaattttgttcttttgttctcagactatagatcgactacgcttctcggaaattagatttttctccgacgcatggaagattctcgatgagtttggttaaatttaggtgcaatatttgattttaaagtttagattactttttcttttttagagattccaccatttttacttgccctgccttatatttttttcctgggtatagaactatagatgcttgtatttgttgaaattgagaatccttgtgtattttttatctttctaattatttggattaattatatagttaatgtatatactattgtattgtacccgaaggtatccaggcccggtaaaggtatagtgtgtaagaacactcatttaggttcatgaagcaaaatagtaaaagacaaggaactttagatgtatatgatctatattttacaaattctctgtttctttcattcatttctgtcatagctcatcgatttcaacgaactttcttgcgatctcaagctctttttgacactggtaagcacttccctaattttatctctaccatcttaatccaattttttgtgctgtatattattctatgatcaggcaatgaataagagaaatgctgaaaatcttttaacttttacaataaaaatataacattaataaagaattattattacaaaatttaaactacaaaaattgtactacatttcaaaatgtttcgcaaaatgaactcttccccttcgggtctttgactactttagattcaaaataaaattcccaagttgctggaatttcgtttctttatcctctcatctcacgccaacatctctacttacattatttttagttttatcttttatcaaatcaaatcaagaatctcaaacttctgcacctaaaatcattaaccgaatgaagatcttgcattgttgaatattgcattgttgaatatatgaagatcaaatacctgcttagctgagaccatactattctgtgagcaaaaattgatgtatacatagaacagtcttcacgataaagagatacttttccagagtcagataagagtttttgaccaggggcttacgttcgctaagtccgaaattggccagtagtgacctaggaaacagaatagacctttaccaccttggttgtgtcacaaactatgacgttttccgattcggttggagtggtgcagagccaatttacctgtcaatgtattagggccatgttaagaagttaaatatacaattgagatacatacaatcaaagaacttggacattgaaaagaaaaatgtgctcacttttttgcttaggctaatggtggactgtaaaatatcactgctgcaactactagtttgctcagtatcaaaatatctagaccaatcccaaactttaattgacttatcatttccacctgaaataaggaattttcctttctcaccaaaaagggaaaatgacctgataattatgccaatcaaataagtgactaaactttcaaaattagattatctaaacttcccttcaaataaattacttacacacaagacactgcagaagtatgacctcccagggtgtaatccaaatgtagccttggtcttccattttgttctgtgttctccacatctttcaagcctctgttcgtagatctagattgagatcctttatgggatattttagaagatcttgacttgatagcagcaagttctgtttcaatgttaataacatctacagctccatcaccccttgcaaccacacaaatctttccagttatgtttaacatatcaatatctggaaccgctattgcatgaatgaaagccggattaaagcattggcctccactaccaccattgcttccatcatgtagaccttaagccaagaaaagtcatgaacaccaaattgaatcaaatgaaagagctaattgcacggttacactgaagagcatgtaactcggatggtagagacaaaaaacaagtgcttactaaaatccacaattttgtagggtcgccctttggaaaagtcccacatcacaagtttagaatcaagaccaccactaataactggcaaaacatacaaaacataattgtttcttaaatgtcttgatatatatttatatataattgtcccaaattatggaaaacatgatgagaacagaaatatctattcactaaacttgtacaagtcataaaaataccatcttcagtccatcaaaatatataaacagcaatgttaacaaagtagatggaaaacatgacaacaaacatcagtggaaaagaacatgaaatatacagacaataaaactattagctatgctactttctaagcacttcctcagaagcaggactgcaacacctaagcaaaagccaggggatggtactctgcgaagcaaaagccaagtcttgctttagcatcctgttacatcttaatactagtctcattattataattgattaggattttaaagggtgagttgtcaaattcttagtggttttaagtgagcgaattattccatagtcctaaggtgttaaaacagttataaaggagacttagtataaatagagggctgatcaattgtaagaggggaaagaattgtcttttaacaaagtgagtaagggaaaacacagggagataccaaactgtcgaaaagtttggaactttgtaatttctttttgataccaataaaatgcctatattctaattctttcaagcactgacttggaacaatagtgtatcacatccagccaaaaatcatttagaccagaaattcaccaaagaggcctattaaaaaatctacttaaaatcagttatattattgaactccatcaattcacactgttcatttcacaacaaatcagttaatgtatatagaaggctagggccattttctttttctaaacaaattgcatataatttgtaacatgaacaccgatgagcctcagctgtaccacgtaaatcaaacattggtagcaccccacagttcacaaactcatacaaacagagattaaagtaatccaaagttcttattgaataccttcccagggtctccatgaaaggaattgcacactgctacagatctatactatagttaaggtgagaggtatgagtaaagatttaaaatagccattcaaaagtacac

SEQ ID NO: 187067 - DNA, 3067 bp, Cannabis indica
gaatataccctgtaagctcctctggatgtttctctcattaagattctcctttcttgtaagtaaatcggcaatccttctgttgtggaagaaagcaagaaggtgagactgaatgcgaaaaaccctattcgggtttggaataccactctttttggatcatgatcatgtgcagatttcatgaaaatattaccaagtacgaaccctgcaagcaatgcctgaattattctagcaacaaagagctgtttggtcctgaaaatgttgctgaagaatctttgactcagtatcaaaacctctcgaaagggtgtattcgcgtagagaaattgattcttttcgatatcactagctgaaagtggacttgttctgaatgagtcattcagttcttcaaattcactatcatctatttcactttcttccatgactgaagacagagtttctgtcacttcaatggcgaactcgagcacgttaacatggcgaggaatggtatgaccagcaatgctaagcctctcctccaacatatggagagagccatggtgaagaagaacaccatttgagagcaagagaatatggtcaaacagctggagaattcgaaaacccggttggtgaatagtcaacaagatggttttcccctgatttgcagccatggttttgagtaacaaagccacatggagagccgaagcagagtccaaacccgaagttggttcgtccaaaagaagaacatccgggtcatgaactaaatcaacaccaatggaaacgcgtcgtttctcgccaccagagattccccggctcgattcactaccgattctcacaccggcaacgtgctccaaaccaagcaccttcaacagctctttcactctgctcacggccttctcatacccaccatgcatcctcaaccgagcactatacataagcgtttcttcaactgtaagaagagcgaaaagagcttcatcttgagtgacatagccagaaactctcctgaaattcttgacattcattggctgatcattgaccaaaacatggccactgactctgctcaaagggatcattcctgcaagtatttcaagcagagtagtttttccggctccgctcggcccagccacggctgtgatctcaccaggtctagcttcacatgttacgttcttcaaaatataagtagttgggctcacttctctcttgaaaaaccaagtgctgtactcgtcaacttggcgtgacagcttgtaggagagtctttctgttcgaattctgtaccgggttttctcgccgcctccagcgacataaaccgagttcttggctggcgatgagtgtgagtccatgaagaagtagctttgagactgtgatatcagatatatgatggaatgagaggaatgagtagagaggagaagatgaactaattcacaccaaactgactctgctttgaacacgcaaaaccttaaaaaggctgcaagtgtatattttgataacgtgtgcatgcattgaaaattttacaactttaataagcctttgttgtgttccattctacggttggattcgatctcctttaaaaatctatagaaatcatttataaaaataaacaaaaggtcattaaaattgcgtgggggagaaagagaagagaattgtttttagggaaattattttggtaacgtttcatgatagaaaaaaaaatactaatcattctgttaaatgtgattaatatttattacttgttcgctgtattgtgtgtcttttatagtaaatatagaatccataggtagtagctgctatctataatcatgtgataatgcattaagtacgttagtctttttgttttaataataaaaatagtactatttgtgaaattcatgatatatagtaattaatgttttgcaacgagagaaaaatgtagttttttctaatttcaatcgttgtcatcaaattcataattatgttactaaattgtcttgcagtatagtacttacgagtaatatacatgtgaatattattaaataaaaacggtattatttaataataactgtactaatactaaactaggcgataggctccacttgacaacaacttgagagtttcaaaccacttgacaaaagatactaaaaacgctattgtttaggtaaaagggtaagtgaaatgttagtttgaaattttgacctagtaataatataggaatgatgaaagaaaattttggtttgagtagaatgtttcagccatatgtgatgtgtgtgagtcgtgactattgaatttgcagttattagctttgttctgaaacggtcgtcaaaaattgaatggggttgtggttttggtaaaaccaaggaaggaaggagtgatgactgatgaggataagtcttggatttgtaaattgtaagggcaatttctaggtcacacttataccttgtacatatatatgtatgatggccaaatggctgtgtttcttcactcaaaattgcggtctctgttattagtgaaaatgatgaatcactaatttcatccttgacgtaatcaattattaatatttttgatgcagggcacactttttttattttttttttttttttagagtaaatactaaatagtatacccaaagttttaagtttgtaagtgacataatctcaatgtttatttttagcggcataagtacccaatatttataaaactataatttttttctaaaagaagtgaagatctgtgatgtcatggcttaaagatagtgataaatgctctaattgatcttctttatcactcctactatcaatagtaggagaaattccatccataacattctagataaaaatagtacttggtgcactagtaggagtcgtattattcaggatttcaccaatttcttgataggcatcttttttgaaaccaacccaagtactcttgcttgccttgatcatttaatccatgaccgttttgtcaggatttgaataaaattatttatcccttgtccctgatagagagaaaattaaaagaactttataatttctctactgggagtgataaagctccagggcctgatggtatgtttgtgctgttttttaaacactattgagattcaattagaaaggattcttgtgacttt

SEQ ID NO: 187068 - DNA, 3113 bp, Cannabis indica
ttgtgcaaagacgcattatgtttgtgggatattgttacaattttttttgaatcataaatgtacaacatgtttactttacttgccaatatatttgtctcatcaggtttcttttgttggttatagctgagttttatcttttatttctcaatccagacagataactttaggcttttgcatttttctgaaaacttactaaggaagaattacttaaattctgttttgcttgtttttatgtgaaggtttctgatttctataaacgaccaaatttagaaagtccagcaaaagctgcactagaagacacctcccatatgtttgagaatcgtggtctgcagctgttggggcaaataaagcatggttcatgccgtcctcgggcaattttatttaaagtcttagcggatactgtagaacttgaaagtacgatcattgtggtgagtttaaactttgtttggtgaggtggggtattacttttttttccttgttttattggcttttgtgtattatcacgtatcagtgcaactttgactacagtttgaggaaaacaaatttgccctgtgtgattaattgctgataattttagctaatatttgaaggttatgtttttatcagggtttgcctagtgatggggttgttgagtattcagactcatacaagcatatgtctgtcatagttgaattgaattctgttgaatacttggttgatctcatgcggtttccgggccagcttctgcgccggtcaacaaaggcaattttcatgagccatatttctgcagctggggaaagtgattctgccgaaaatgactcttgtgattcaccaatggaaccaaatagtcctctatatgggttctcagatagggttgatcctgataggttagatggttgcatatcttgaacctacatgtgattcacttcattcaaactgatgattctagtcaatatttgtctttgcttcataaagttgataacaattagttattgttttgtcaccagtgctgaaaaagatgaaaatgctcaacttcaaagaaggcttgattcaaatgtaccaggtctgtcattgcgaaatatgatgctgcgatctgctacctctattgacaggaaattaaagtaatattattcattctttacctttacattttcatgtataatgatttttgtgattacctttctatattcttcttaactttatactccctgaaagtacatattatgatccttattgaagttatttcttcaatttagcagtttatctcatagcgaacctaacattgcaactacattttggcggcgtagtcggaggaaggtcattgcagaacagcggactgctagttcaaggttttttctaattttatattttatatgcgattcgtctttacaaaatgggatcataatgcattttagaagttaaatgttacttatcaagatgcatttcagttatttattgaaatggatttacctttggaatgactttaatctatttataattttgcagtccagaacatccatcttttcgagcccgtgggaggtccatgcttagtggtgatagaaaatcatttcgagattatgctgatgacatgtctgcatcaaggtctttatctgtgttttttatcctgttatatcttttacaatgatagtttatcatactagtaatgatatgtacacaatttttacttgcctatgtgacaatgtgttttaatttagtgggacacatcttaaatcaatttaatttcttgaaaattcgccatgcatgtttggtttgttgttataggtgttgtaatggaatcaaactgcccattacaatatttggttcacttagtgttgtaatgggattacattgtaacgataattacattatatacgtgaatgcttattacatagctaatgtaatgagaagtacatcatgaaggatcaaataaagctaaaatgattttactaccctctcttttaaaatataaaaattaaggtggagagagaattttgtcaattttaatttctatatttattccaacaacaaaccaaacatagtaatcaattctcattactatcattattccatttttataaccatgactattacattccaccaaaccaaacacctagtgttttggggtaaaaagtgtgtgcacatatcattacgattattatactcctaaattctattatatatgctacgtttttagcagcaggtacacaagcatgaagtgattaactaggttcttttttgtctgattcactttttctgtataggtatttggaggaatgttaatcttggggctttatttcatcattgaatttggtatttgctataaattatttgttttctgaaacttcattttgttgattgtagttacaggtcagatggtgcatcgacatcagaggctcgtaggattagaaggagaagcattagcatcacaccagaaatcggtgatgatatagtgaggttggtgtttgtttcattatgcttagttatatttattttttttaatagtgaattttccggctttttattggacaaagtgcattgattgcattctttctacacaaatttttatttagttcaggttcaataatccttttatctgtttctctgaagagtctcttcttgacatttgtttgctttggtttattggtggggtaggggatgactaatgggaataagaagtgcattataattgaaatagattgttatactaacatggttttggtaagaatagcaaattgaaagttggacatgatcaagagaggttgtttactaacattattaagatacgacaatgctgttagtggtcataaaaagtgaagaatgctaggtggtcagaagtggatgattaatttaggtgagcaaaatttgaatcttggaaggaaggtgtacagcagtcaaggagatttcagatgtcattcttgtattttatgagtggcgaaattattgtaaattcttctataaacagggaatcaatttaaaaattcattcttagaaagctttttatcatgcaattgatctttgttgattttgttatggagaggaattttaggagatggataaaggaagacttaagaaatcagctaatttttcttgtacctgtagcactatgtttgggaagaatggttgagaggatgata

SEQ ID NO: 187069 - DNA, 3547 bp, Cannabis indica
acgacctaatacggcgttccaatcgagccctaaatttttacattatcaagttgtgtctcttatagtatacaaattattataatatcttcaaaatataagttttgcagtaatatataactcttctatcacttcacattttattatgaaagaagtagtagatgataactgataaattaatacaaatttaaatatctttaactatttttatgttaataaatgatagaataaatatattttttcttttataataatttattttttatttttaatttttaattattaaagtaaaaaaaaatgtaaaaaatatttatttgtatttatttatcaaccattattcatatatcttatttcataataaaattgaaaaaatcacattactctaaaaattatattttatattattaacaaattgtatgatatacagtacacaaaaaacaaaaaaaaaaaacagggtaaatatatttacatttatgattaatggcagtaagattggattgtgctcaactagatttatgggtcatcctcccactaagtgtacatgtggaacccacaatatataatattgtagtggctataagcaaggtatatatatcagttgatcaaagcaacaaatctgcaaaggagtagtaatacaatgcacttagagtatatactcaactatattatatattattgtaattaatatagttttaaaaagtagtgccattgtattgtttgtttatatattttaggtccacttacttttttcaaaaaggaattatgataccttaattcaaaaatatatatgtattaaaatatattacacatatataattgagtctatttttcttataaaaacaattaaattaaatttgacaaattaattatgactaaaatataatatttaaatataaattatcactaatttataatgtaaataaaatttaaaaaatcgtaaaaatattaaaaatttcgcgtgcaaaatgtatttttgtatttttttttattatttttgttgttttttttttaaattatgcccattaattattgatgatataatatatatgcaggatgcatggggaagcttggatagaaacattaaggatcatcatcatcatcatcaaaatcagcagaataatcaaatgatgatggtgatgaagggtgatcatcatcatcatcatcaaaatcatcaaaataatcatcatgtaaagcttgacctgaggagtagaggactttgtttagttccattgtcatgtactccacaagtttatcgtgacaatacaggatctgactactggaccccaacctatagaggctgtttgtatagatgatcatcaataacttataattaaatacctctcctctcctcatctcatcccatccatatataaatattatgtacttttattttcagaattgtatatctaattaatcacagtacttattatattaatattaattataatcagttaaattatagagctagattattgttaataattaattattatatatgtgtgtgttgtgatcgattattgtataatactaattttaattaacgttcataatgagatcttgctcatgcatgcatatgcattgttttacactacgagttctttgtgtaaaattggttttgttagaatttgtaaccaatagataataaagagaaggtatttgaagaattaattaatatatatagtactacttttctagaagcaacaaattaagtggagaggtagcagaagccaatgcaacagtggtcaaagggaagatcatatataatcgtgcacttacttacatatcttattggtgtttttctcaattgagagcccctatgactttttattaacaaaagtacttgatgtgccatcctttttttttttttggtattggctgcttcaaccaaattgaccatctctagctaattaattgcacaatttgagttttttattattagaaatatttgtggcatgagagcttgttgatcagttatatgtatttggttccatagtttcctcctatcaatgtaatccactacaataattaagttaacttttcataattaatatataatcatcacaccatagagaaaacaatttaatagtgaataaagttggttaaggtattttattcctctgctagggcttgattgttttcttccccaattacctaaacatcaacctttctcagtcaccatgctctcctcgaatgagccttctatctaagtattgctctcgatctcgaagccttccgtccatggaggacattctggatattggacccgcaatctcactgtcgttgatgaggaagtttgggaaatcaacaattaaaggcaaactgaaattgggaaacgctgcttaattggtcgtctacgtacacagtaaacattttgtcgttctctcctcaagaacattttatgtcggctttggaactcagtggaatcagactgggagagttgataatcaagaaaacaacgaattcaacgattttcttagtgctatctttttcacaagaagccactctggtgtgctaaaaaggatgttgttgacctcgcttttggctaacaacactgagtctttaaagtgattgaggataactaaattcaaatagaatacgaataatatagagtaaaataagaacacaaaaatgttatagagattctgtcccttgattatggtaatagcttacttcccttatacttttgacaagcttgtaagatgagaagcaaggaaaacttgatctctctcgatagtgtttacagagaattcaacaacgtaagtgcactatatgaatgaatgcattcgaatccctaaatagtgaaatgattccactatttatagagaataattacatcaataaggtttctcaaaagaattaaagaataaaaaggaaaactacttactttcctgaattacatcatttacgtgtagaaattttaccaaaatagggatttgatttatacgaaaaagaggagagtaactttgttaatctgatccttgcgtttaccctggatggagaggcctgaattgttgatgttggttggatgacatcgttcatccggcatgatacatttactttagtcatcaagcaataattatttaatgtcatatcccatgggtggccttccgaggatggtatcctctgtcgaggtcttggaaacaacacatgtcacccagagaagtaccacatcatttgtgtagatttttggttaacatttgcctcccaagttcacgtgaagaacttcagtttgtgcgtggacttgcctggtaaatgtactatataggtaaacggggtgacacgtgtccgacatgcgaggtgggtggacaaatccatctttttagattttcaagatgtcctttcatacctcaaggcatggattattctgacattgggaatcaagcttttgggttgtgcagggtcggttgtactcttccttgtattgattacactccttttttagggaaaaatcccaatttgaaaatcaaattatcgatataccccttaagcagcctataaaagatggtaaaataaaaaatgataagaagcaactaaaaataacagcagaaca

SEQ ID NO: 187070 - DNA, 2746 bp, Cannabis indica
tggttttaacctctttatttgttttgtagccaatgtagttaatttaagctgttaacaggttttacattattataattattgtgtcaatcagacaccggtattcagttacaagtttagtaccgaatataagaacttaaaaaagataggagatcaatccaatccatacccaaatattaaaatcaacgataaaaatcactttttttatttatcatcaaatagtcctggaaacctagaaaaaagccaatcacagaaatataaattaaaggaaaattatgtggagagcatcattatcattagttgttctaataacacatttaacaacattccagtagtcctagcaatcgggtatttgcttgcccttaatactatcttgagatcttgttaaaactcaaaagtagggtccaagctattaggtatttgcatgtcctttattttctcccaattaaagtgctagtcttccttctgctttgatttgaagaactaacctagtagtctaactttgaccatttaccttgcattgtgctgcatcattcttgtaatgggaaatcactgcatctagaaacaagtacacttatcagaaggaaaaaaaaaatgtactcatcgacctaaaaagtcacagtattcttactgatatgaaagatatgaacatcaaaaaaggcagcatcatataaaatcaagttaggcatacttgagtcaataagcattgttcagctgaagcttgtgaagtcctttggtggttcgatccaaatattctcgaaagggttttgctctccccaatcgtaacattgcttacgggggtagtatctacaatcattgagagagtacaagatgcagcgccttccatagaaccgaactttagagaagtagacgctgtttctcaatataccaaggagatcatttctagaatgggacgataagaaactcacgaaaagtgtcataccttggagattttgcatctcctcccaaaccatgtcagctcgatcaagcttaaaaacaatgggattttcactagaacaagtataaataactaataagttcccgttatgctcagccataaacttgcctttccaccaatttttggcaaaaaagttctctgggcatttggggggaggaacagcaagaacgttccaagtgcgttccatgggatcaaaaacccctagccagccggtgaggctcagacaataaaagagtccattgcagaaaacaagcttattccaaatgctactgacaaagggcaaccgattttgatagttaacagtaacccacttcgttgctccagcgtggcaagtactaatagcaacaatcgtgggactgatgtgcttgactgtgaaaagtatgcagctggaggatgttggtgcacatgagaatgccacaatctgataagtcaactcaaatttcggtagttttatcacctttcgagtgaaagggttaaagaagaaaacacggtgcgatcttggcctgtatagtaacagccaaccatctttggtgtaacagaccctagatccattcaactcaggtaactcaagggaatgagtcttgcgctttgatggatcataaaactcatacaagttcccaaattttggaaagtacataagccacggtgattgattaaccaccctcacagatatggcagttgaatgccaaaacttgcataccatagaggcgcggatattgtcaactagagtcaactgggacaaaatgagttgcaaaatttccatcggtagctcggaccaagtctgtagttccaatgtctcattcttctccttggttctttttctttcattatctgtgatcgtttcatctaacctatgcaccagagaatcagggtaagttcaaacatccagcactcaaacaagaaccattaatgaactgaaaacgccaccatgaactaaaacttgagtatcaaaatgtaaaatataaacagaatttgcaacaattaaacattaatcttatgcatcaacactatattttaccctcaattaaaatctgtttgcatataaaaccaaatctccaaccccatcatcttcttatctacatattgtactgtgcatactgatttaatgctcaaaaagatagtaccccttgtgataatctaaattcttgaaatcatcaagtatgaaaaagaaaaacatttatcaaataagcaccccctttgaattcagacttttactccaaaactcacaacatttagtacaaaattgtaggattcaaccaatcttgtacagaaagaacacaatttgatcattccaaccacatagtctcgcaaatcctaaaaaaccttaaaaccaattcttacccaaatacaaaatactcataaaatattgggaattgactccaattttccatgggttcaaaagcaaaactcataagaagtaaacacatttgctttaaattcacaaacaatgactgacccaaatcctaaaacactcaatttcaaaccaaatctacaaccaagtaaacattttatttctaaataaagagagaaaaataataatgaaaatatgaaaatggaattgcgagactattttgcctagaaaaaaaaaataaaaataaaaaaaagaagtaagagagcagagaaagagagagagcacaagcttacaatttcatcttcttcttttttctccaagccatggccaactcaacaaggtagtctctcaagagagagagagagagaactacagtgggagagaagatattgagaggttattagagagagaaagagagagaatcgtgtaaaaaagcaatt

SEQ ID NO: 187071 - DNA, 3550 bp, Cannabis indica
aaaaaaaataatcataaaataaggaaaaggcaataataacttatgaactagctctctcttgtcatagactttacataaaagaaagcttgaggattgttatagtaattgagggaacaactggtttttccaccaatggattattcccttataaatatcaaaaaatgatcaacaccgaacaacggaaactcgtcctcatgcctggaggaaacccttctcttccaagaaggagatcacttctccagccatttcaataggtgaatcacagtcccctcctttgtgtttcaaaactatctgaaaagggaacaaaagagtttccttattaaataaacttacattttagattacaacaaaaaccaaaaaacaaaacaattcatttttttaataatgaaaaacccaatgttcattttccagaattgaattcttgtagatactagaatattatgtaatacagctcatggacttgaaaaattggtgcttgcatagtgagcaaaaatacctcaatctatcttgtctattatagtattcaacgattatattcattgacaagtttgtcatctttattaaaacgaaaagagaataacagtacacaaacctcagaatttaatggttgctcataaggatcatcaatcccagtaaaacctacaaaaaaagagctggataaataccgcttgcgtatgtactatatggacacgaatctcagcagtaacaagagtcaagaaaataatactgctgtccaatgcagaatagtattcaatgtaaacaaacatagagaaaggcatatattacagaactgcctacgaatattatgtgagtgtctgtatgcaggtataagaagttcaaaaggatgacaataacaatgcagcggatgagtcgccattttttattttaagcagaattagcagtaagaatatccatagacgatagaccggaaccttgtatacatctaaaaccaaataagtcagaagatacagagaatgacagaaccacttaggtatcagcaggaaaatgaatgcaacacaatattcaaaatcgacaccattgtaaagtgggcacatggaaaaaaacttatcacatgccaaactcaaaaatattttgacaattgaaaggatgtgttgacatatagttagattattgtttagtgtagatttcattaatccagaaaaataacaagatagcctgagattgacctttgatctttccggcacgggcaagcttataaaggcctttagggtctctttcctcacaaacttggaggggcacgtccatgaacacctgttgaataaaagtttcctcaggctatgttgtaaactatcatctcaactttccttttccaagaaaaacatgtttaaaggcagcaaataaaacattgatagtacaaagtacaaacctctataaaatccccttcaggcagcaatgctcggcaggcatctcgatctcttgcgtatggagaaatcaaactagcaatgcaaatgaccccagcatctgcaaagagcttagccacctcacctacaatacagcacataaagtagaacctctaaatacaatgtttacccaaatgcttcaatgtatgcattgcatatcatgtacagcattgttcctgtaattatcaataaatagagtaatagactcaccaattctccttatgttctctgcacggtcttctgctttaaagctaaggtcacgattcaggccatgcctgacattgtcaccgtcaaggacataagacagcttccccctgctgtgcaagatctgacttaaagcacatgccacagagctcttccctgatatttcagttaaagttaacagggatagaggaaatagttgttgcatgaaaatttagctaacattatgttgttagttaaatttacatattaaacagttcaatatgtcaatactttatatttcataagcatcttctcatcaaaaataggcatgacatgaattcaaacagtagcataattaagtgtaagattaaacttaaactaaatctcacatgttggtatgcataaataagtttaaaatgtaactcattatctttacaagtaaatatatagttcctttctaactctataaagatcaagctacaaatggtgaggagaaccaagagggtgataggcctgtgctccacattgtaagagcaaaaataagaaatctaaaaaatgctttgcacaatcctctcatctagtcttataaaccatgcaacgaatatagttatccaaaataaatcatagtaaagccattagagcgactttacaataactatgctagttgatataaaaaacaagacacctaagctaaagggccaccaagtaacaacatccatttccaatatcaaatatttaattgtttttatttattttaaaacggcacctttgtctaaccctacaatataaatacaatattaaatacttgaggaacaagaaactataccaatttaaacattggacttgcaaccgatctctaatcaataaaattaattgtaagatcataaatcttatgtttcttgtacctttcactgcagatcactatgcattgtgcattaacttggttcaacataaatggttccatgaaaaagcaataaaatgaaaaataatgaatgaaagcaacaaacctgaagcactaagaccagtgatccatattacacatcccttttgtttcagtagcttctgtctttcaattttgttaacagaacattcatgccatttaatgttggtagaatttccaatgctagacagtagactctgattctcatctatcaattgggaaaagagaaaaaaaaaaacatttaaccatgtgaaaaatcatccttagttaatccatactacaactgcatctataattcataaaagggctatttcaataatctggtccacatataataaatggcacaaaaacatcctcttttaccatcgagccactttcccatgaaccaatcacgccacaaaaaagaaaaagaaaaagaaatgggtaaaaggagaaaaacaatacccagattcccaacatggccattggtgttgaagtcggtctcattcacagtaacagttgtggacccttccatggagttgattcgaacagacccctttgaactatgcacagaaaatcccaaaaacccaggtttgaatgaggaagaagaggaagacaaaaacgtggaacacggtttgatcccaacaccaagaccccgagacgatgataatgatgtgcccccagccagtgttgctgatccacctccaattgcaatcattttctcatagaatcaaaaaaggaatgatatttaatttccacaatatggcaaccccacaaacacaagcggcagtaaaaatcgtaaatttaatttccaaaaataggggaactagtatatatatataggcgaatgaagaagcgaaaatgtggggtttccgttttttatttctttatgggtttttggcggtgagagattcaatgagtccactcgcaaacgtgagagaatttatgaatttgtattgcatcagtggttttttgtggtggtgagggagttaaggtagggtctatgtctctttttatttatttattt

SEQ ID NO: 187072 - DNA, 1346 bp, Cannabis indica
ttaattaattattattattttatgtaacagatacaagtgccaaaagtcaagcttggagatagaatcacggctcttcagcaaatcgtctccccttttggaaaggtatatataattaatgaattttcattaaatttatgttaatgatttaaaataaagttatataattaacattataatgtataccttaatttgttttcatgatctaaattataaaattatttctctttttttttttggttgataatacagactgacacggcatcagttctatacgaggcaattcaatacataaagtttcttcaagagcaagtgaaggtagttatattttaaaaccttgttgattatttgtaattaattaggatgagaaatgtatatagtttattcaaaaaaaaataactcgtgtcaacctaattatagtttattaattaataaaatcacttgatttattcaaaaaataactcgtgtcaacctaattatagttgtgttaattgcatgtgatccgcgaattttttttaattacaccaaatataatttttacctatcatccattattacctgtaattaatattaaaatataataataattatagtattgttattaagtaaccgtattaatgttgcatgattaattaatggtaatttttaaaatatgcgataaaatatttagttgtacaatatataatatgacaccgataaaaataataaagcaatattaccttttaacatttgtctgtattattgatacttgtggctccgttcccaaggatgataatgcctatatttataaggataacattgactttatgtagtgcttttattcttatgttcacatacatatgatttcataatcaaatggcaaaaaacagaaaaatagtagctaggtatatgtcaaagttggttcgacttcctctaatataaaattataaataacacacacttttacaaaagtattaattattatctttttcattataaagcataaatatttctccttaattatagtacttttaaacaataattgtaacaattatttagtacacaaatgaatttgagagcatgacaaaaatccagcccattaccatattatgtataagttaatttgttatagtgactttttcttattaatatatatataagtgcatataattgatatagtaatgcaaaagaagttctttcttttatatatgctcaatacttggatatcatattcatagttattgtttttgaatcaacacgcactactttctgaagagattaattaaatgagaacattttctttaaacttttttttttttttttttttttttcttgaatgtcagttgctgagtaatccttacatgaaaact

SEQ ID NO: 187073 - DNA, 3458 bp, Cannabis indica
aggaccaatataggagcggcggtcgtggttcgggtggtggtcggagtaggagggttgttcgggttggttgaggttggaagagaggagaataaggagaaagagtgctgaaacaatgagaagaagaagaagaagaagccatttgtgatccatgtaatgaggaaactggttccttttcattgtaactctttaaatttgttacagttctttagatttagatttaggacttggatttgttgcttcgagttgttgttggtgtcgaaactttagttcgattgttttttttttgtttcttattatttattattatctttttgtcggtattttattattattttgtaaaagattatttttaatattggagaggttactggattggacttttggagttggcgagagggaaatgataggtatttaaatacaatttggaattttctttttgttgagtgtttcctacttcagtgatcatccaacttggttgtgttatttcatcttgatcgtgctgtactatctttttactttatgtttcaatcaagatgaaagataataaatggtattaactaccctacaagcccggaagattaataactaagcttttagggctactttagtagaattgatactttttcaacaattagtttaggtacttccaataaattgctaaaataatacagtaatatagtttatattttcacaattttgagaaaaatagttttcgaataggaagttaaattctgtgctaaatttaacaaatgttaaaaattaagctaaatttagcttaagatataatattttgtaaaatttgacaaataataaatatatatttttttattaaaaaactcagataaaaaaagagaaaataattttcattgattgaattaattggtacaaagagaagagtaaatatatagtacaaagctacttgagttgtacctaactaatctataacagaataatttaacagacttaatagtccacctcaagagagagtgtagaaatttttaacacccatcttagacagaatattgttgaatggagcaggagagagaggctttgttaggatgtcagcaaggttggctttggatgatacatgagtcaacttcagggaaccatttgttattttttctctgacaatgtggcaatcggtttcgacgtgttttgttcgttcatggaagactaggttctcaaatatatggattacagcattgttgtcgcagaatagaatcgaaggaagactgatgttgatgctgagttcctagaaaatggacgtgaaccatatgagttcacatgtagcattggaaatggcgtgatactctgttttgcctgatgatcgaaagacagttggctgcttctttgatttccatgaaatgagttatttgcctaagaaaatacaatatcctgagattgattttgttgtgtcgacccatgctccccaatctgcatcagcaaaagcttggagcagaagttttggtggggggaagcataaaaacagaggccttggccaagtgaattttttaagtagtgaagtactcttgttgcagcaagcgtgtgaggtagtctagtgttatccgcgtttctaggagcggacacaaggattctatgtcagtattccagatccattagtgggaccctcatcaatggtaaggtgggccaagcccatcttaatatgtcttttctgggagttatcttggttccgtactcgagataccttcttccttctacatatcgatcacgtaagacaactctagagtcgtgaggctgaaaggggaaggcgcactgttcccagaagactcttctagtttccctatttattctctcctataaataagggaaaaacagttgtcagactggaaaataatatcatatcgcgatgaaagaggaaacttcccataataagtgcaagaacagttatttcagaatattctcccattataatcggatatggttttgacctgatcaactcaagctcgattttcctaatagcagattgtatccttcaatggctggacttcatgagtaagcccatggacattgctcagttgtaaactccctagtaaaggaaaaaggaaaaaccttaatgtgattctccaactactataaatacccaactaatctcatggattaggagttgaattatcttacatacttttgtttaggcaaatatacgaatatacactctgcgtgcttgtgagattattacaagtgatacactactgaataaaactgactcgtggactaaggctcgttcatgccccatccacgtaaaaacttgtctattatactttctttgtcgtttattatttcttcagttcttattattttactctgtttccaaaaatcttgggaaacattttggtacttttattgagagctgaaggaagcagtgaggatgactctccaattacgttcacgacgttatggccctcaccaaaacctagtctggccttcattatactgcccctggtactagagcaggagatatgaatgatcccccgtaagtcaccagtcactagcaaagccaacagaatgaagactaggatgttgacgctcctattatggaggatgcagaggaaagtagttctgaggatgttgaggtgaacagtgaaggtaaaactgaggataggcaagaggatgtcccctaagatagaaccactgagactgctgatggaggaaaaagccagcttgacgagtcaaacctcgtggtcatgatggtgcgacagctaaaactgaccgaacaaagattatctcagcaagatcaattcaatcagatattgcttggaagatgacaaggatggaggctacaatgaccatattaactaagatgactcccgatgtggtagccccaccatcagtaaatgaacttaagaaggtagatccaagcaaacctggaacttcaggtgtacataaagataaaggaaagggaatttccatcgaggagccaaagaggacttcttctacgcagtgacctaagaagtcaaaggctgctgatcaacctccaccaaagaggaacggaaaccacacttcaaggcatggagaccaacccaattctagaggcagagtcatgtaaaaggtacaaccatgaagaagaggttgaaaaactgcaacaagtatccgaagacagttgtggaagtctgtcgactaacgaccttcagagaaagctggatgtaaagaagtgaaaggccaaggccaaaaaagctagaccccatggaaacgatctgaggaaccacctcaacgatcgtgttcgcagaagagaatcctctagcgataaaactcaacgtctcaagcgcaaagttgaggagttgataaagatcactgagaagatctctaggaagcaaagtggtgttgtgtctgatgctgaggaagaggacataagccttgtgaagaattattatgcaccattgtcagagcattttaggatgccctcgatggaactgtatgaaggaagaacggacgccagggac

SEQ ID NO: 187074 - DNA, 3060 bp, Cannabis indica
ccattctttttctccaatgtttatcaaacataattgataattcaagaccccaaaacaatatctaactctaccaaacttaacaccacttattctcaaaattacaccaataaaccaagtttttcttgaaaattcaaagggagaaaggaactaagagcttatggccttgatcttgattctaaaaatctcttgaaaattcacactgagaaccttgttgaatgatgaagaattgcttgatttctcttggggttacttagggcccaaggagagagaggtttagaaaagaaagagttgtgtactgatgatttggtttctatttaacttcatgactaatctaatatattctgaaaacttatctaatttactaacaattaacttagctaaagataaaaataaaggattaaactaatcctaggaaacttactaaattaactttacttaagcttctaagctatccccaaaactatgggtaaaatagtcataactaaatacctcttatagttcttacattttaattgtccataaatcttgcactgctctaagatactaaaatgtatcaaagtaacactctttaccaaactgccaacccgtctaatttccactattattaggcataaaacatgaatatgttaaatttcatatataacatgtatggcacacttagaatttaataaattcttcgtaattgagaaattatatcactaatgtttatttttagcaatatgacttatttttatattaatacacatataataataaataatagtttaattactaataaattgttaattatctgctaattgtcatatttaattatgcaattattataaagaaagtaatattagggtttataagataaatgaatatgttaattataaaaatacaattaataaatatttgaaaattttcatatccatatagaataggtatgattttgtaaggaagtacaagagaattaaaatcatacaatatgaataaaacaggtcgatagtgtattaaaatataatttttttttaatatggaattactaattacggtttactaaacactatattctagtgcgtgtggttttgattcaaatcacatatgtgggtagacatttagtaaaagtactctgtataatttaattatacatgattggactgatgtgaactaacatcttttaacatgtcatttatcataaataaattatatattacaacgatgaacattagtagattagtataaatcctaagtattcatgaacttttgtttatattaaattatttgattcactcgttaaaatttatcgaataaaataattttttatataaaagttcgtttaaatatacttaataagaaaatgacacgtaaatattgacttgacacttaacgcttaggtacctacggaagtcttacaaatataacttaagtattattattattaaaaattaaacttacgtacgcatgtataatcgagaattaaacttatatatttaaccacaaattactaaaaaaaaaaagtatgggtttcatattttagtttggttccatagttcttgacaacttctctagtcctaatgcttagctaatatttggacacaaagcttatgatgttttcaacatggcaaaactacaaagtggcatggaagctcgtgtattggccgatcgatacgcagcccaactccggttctgctgtcgtcagaatccaccctcatactcccttgctcgaacccttcatgcccacatcataacctctggtttaagacccaagcatcacatattcaaccttctcatttccatttattgtaaatcatcaaaaatcagttatgcccgccaactgtttgataaaattcctgaagcagatattgttgctagaacaactttggtttcggcatactctgccaatgggaatctaaagttggctagagagatatttaatggaaccccattatgtaaacgtgatgttgtttgttataatgctatgatcacaggctattcacgtaacaatgatagtcatggtgctattaaactcttttgtgatatgaggagagaaaatgtcaaacctgataattttacattcactagtgtgcttagtgctttggcacttgttgttgatgatgacacacactgtcagcaaatgcattgtgcagtggtgaagtcggggacggagttggttacttcggtgttgaatgcactgatatcggtttatgttaactgtgcatcttcactatcgacatctttgtcgtttttgttgatggcttcagctaggaaattgtttaatgaaatgcctgagagagatgagtatacttgtactacaatgattactgggtatgtgaagagtaaggattttgtcacagctagaaatttgcttggcgagatgactaataaagattctggggcatgttggaatgcaatgctttctggttatgtgcaacatggatatttccaagaagcatgggaattatttagagagatgtattcaatgggaatatcaccggatgagttcacctacacaagtgttcttagtgcttgtgctaatggtggattctttcgagttggaaagcagattcatgctcgcgttttaaaaatgacagttgaacctaaatcaaagttctggttgtttgttaataatgcattggttacattttattatagatgtggtcatgtaaatgaggcacgctcaatttttgataagatgtctgtaagagacactatttcttggactgccattttatccgggtatgtagatgcacggcgtcttgaggaagccaaatcgttttttagtaaaatcccagataagaacattcgaacatggactgtgatgatatcagggttagctcaaaatggatttggagaagaggctgtgaagttgtttaggcaaatgagatcagaaggtttggaaccgtgtgacttcatattttcgggagcacttacttccagtgctgtgcttggagcattggaacatggacgccaactccatgctctattgatttccttgggacatgattcaagtgtctctgctggaaatgcacttataacaatgtatgcaagatgtggtgttgttgaggatgccaaacgcgt

SEQ ID NO: 187075 - DNA, 2331 bp, Cannabis indica
atgttaaatgcaggtatccaaccgaatagggtagcattcttaacaatcctctcagcttgtagtcatgccggtttagtaaaagaaggatgtcattatttcaattcaatgagttgtccccatggcgtatctccagatgaagatcactatgccatcatgattgatttattttgtcggtctgggaagttcttagaagccgataatttgataaagtcgatgccttttgatccaggtgcccacatttgggagtctgttcttggtggttcctggattcatgggaatatagacttgggtataaaagctgcagaacgactccttgaacttaaaccagagcatgatgtaacctacattatcttgtccaacatgtacgccaatgtaggtcggtgggaagaagtagccaaggtgcggaaattgatgaggaagagaggagtgaagaaagaacctggttgtagttggattgaggttgacaacaaggtccatgttttcttggttgatgagactatgcaccctgaaatcgaagcaataaacaagtttttaaataaactgggacttgaaatgagaaaattgggatatgttcctgagactaagtatgttttacatgatatggaatctgaacttaaggagcatgcactgtccactcacagtgagaagattgcagttggatttgggctcatgaagctccctctaggagcaacaatcagggtatttaaaaatcttaggatctgtggtgattgccataatgcattcaagttcatatctaaggtggtgaaaagggaaataatagttagggatagcaagagatttcaccattttacaaatggtgaatgctcttgtggaaattactggtagagttgagagctgtaaatttaactcaggaagctgcaggactcgctcaaagtgtttatgcttatgcagagaagatgatgaggttctacctgagactccattaaggtatggctatcacttgataaagaaaatgataaatagttcaactttatatgtgaaatatctttgtggaacttttagactttctgcaacttgtacttcatattttgttttcataaagtaaaactgatgtttctctgtgagttaatctcattagcttgtgaacaatgatatagtgctactgcgagaattgcatttgtgtaggtaaattaggctgtgtttttggagaagaaaatgactaaatagaatcacatggtgcttctcagcaggaactaatatgtagaaacatttattctagcaatggttataactagttgccatgcacttggtgttaggtatgaggaaagcaagtttggacaaaaaccactaaaaagcaaaaaaccaaagatttctaggcactgcatttcatatgttgcataaaacggtaatggggtaagatagtaaaagatataatgtaatgggaaattgaatatcactgtatttgaatttgtgttgcttttatgagatataagcttttatatgtcaaaatttaagtttgattcagttaaagctttataggtcaagttcttttgctgctagtcccactaatggtactggcataatgtttactgttcagcattatggttaaacttttatagctaactactactttgtcaaatcatgtaattagttcttcaaacggcatggaaggttgtgaactgagttgaggctggaaccaatttagtaccagtgagttttctttgggaatttgatttgaggtttgtgtagctctaatcaaacttgcttctctttatctcactggcagttgcaatacaaagttcggtaacattttcaagttatgcttatttcattaggctttggtaccaagatcactagcaacagtatctacaatggcaatagttggctttgactgtttcactctttgctctcaagtctttcatgtcgacagatttgtttgtgctggtatgttgaatatttcatttcgagttatactgctaatacgtgtaaatttacaaagaaaaagagtgtttgttcttcatgttagaattttggatttttgagtgtatatcggtgaatataaactgatctttggagaataaagatggcattatgattagagaatactttttcagtgaatttataacaaaagaagtatgtcaagtaaggtgaatcatatgtagcactgtttccattaggcaagcttatatatttctttaatggttagaagaatactatttaaattaacatatcaataacagctaaccaatactgaatgtcaggtgagatactcctaatgaggttggcattggaaaaagaagtgaagaaaagatgggaatgagaagagtcacctcaattgactgtataataacttcagagaatagttgatac

SEQ ID NO: 187076 - DNA, 4412 bp, Cannabis indica
tatttttttttatatattgtataatatagtaaatttgctatataaaagtgaaaattgccaaaacaaaatttctatgttttttttttttgggcattaattacaggaagaagactttgattttcgatcaacacatatatagcacaatacccactattttcttgctactaaaaattaagattgagtggagttctgtttggttggtggtgttgggaaactacaccatcttccatgagtgcagatacatgaacatatgttacataaacacagcaaattcttgaaactgatgcttaacctaaagcgaaagtataaaatcagatttacaatacggtttcgttgtagatctcctgtcaattcaaaggttgagcatatatttctgcatcaactcaaataggagtgttgtatttttcgtataattcggccgcctgcagcattgtattagaatttcttctagtagattattatgcctttgttattattaaatcaaaagcatgacacgagccatcttaattatgccatagaaacatatagaactaattgaaatagagcattattctactgcttctatttaaagagtgcgttgattctcccagttttcaaccaaactttagcagttgaaatgattagacaagattccgactgcccttgaagcctcgattagtcaaaataaaacaatataatacacttgagacacacatttcgtaaaaaggaaaatgatcttttgacaaaataagaaaagagcacaaataccagtatcctattcttaaagcagtgagttaaaatattttggtgccaaaggcaatcaaagatttgaatagaggcaacaacttaacttattcattccattagtatctgtctagtttagattaatggtatatctctacgaatccacatttttcaaatcttctgttttaagaataaccgaaagattaggccatcaaattttatttatttttacttcttaaacaatactttaataaatgtatataatagaatctagttcccctcaaagcccacctacaaattcccaactatgttcaatttccaagtgtatcataatgattcactttcagtcgacttcatatctttacatggtcaactaactttttttccaaatgatattgttttctagtagtatagtgcacttgttaaaaccattttgtagtagaactaacacagttcattgattgtactattagtcattatcagtcacgaagaaagtatatagtgcatgccactaactacggttcacacttagaagcctacattcctattactaaagcttttggtcagctaagattgtaattttaagaataaagtaataagttaccggcaatctgagcacattaataagcatctgcaaattagggaatttattatgttacgttagcccctgggaattctccaattaaaactctaggcaaataaattagtttacaaagagtcaaaaaaatttgttttgttcagcacattcgttgtagagtgtacatggagattgaaaccaagaaaaagaaggaacaagatagaagagccagagacatcgtaaccgggcaacgtacgaataagattgtgtgacatacctactgcacccatctgtatgggttgtcagcctttgtcttcttcactatctgcagatacttcacctgtatgagaagttcaacttcttatatgttcttatatgcttacctgcagccgtgaagcattgtacatgggtatggtaaacgtcatgctatatacatgtcatgttgaaataaagcaattaattaccatgcgattcttgggaaaatgtcagttttgcacgtagtgtatgtttggatccaccaacaatctacaaggtaaaacctttgtttctatattcatgaatttaagcaatcctcaaccatgcaactaagcacagtgagaacgattgtagataataactatatgtaaacaacaagaatgcctttttttaaaccccactgaagtctcttatttgcttccttgaaatcagttgtgtttccaactcaaaacttaccctcgaattatttcgaataagcagatgagataataatgaaaaaggcaaaaatatagaatgaagtctcctttcccactgaatccaaaatgcaacctaagaagcttacgaggtgtttggtattgttttctgttttcaattttcaaaattgttttcaaaaatcggaacagaaaagaatttttgtagttttcaaaatacaaaatgtgtgtggctattgctttctaaaaactatttttaaatcttttctattgaaaataataaaatatttcaatataccacagctcgacacaaaccaaaccctaccccaatcccgacaaggactctggatgtcagccttgatctcgatccctaactttgctccagaccctaacttgaccacagactatgaccccagcccgactcgcaacccaactcacaccctgaccccgaccccgacctaaacttggaccctaacttgtccctcgctcagacctgaccctagacctagctcgaaccttggccccgatcctaaacttggactcggacccagacccaagacctgagccccgacccatgaactcgggtatgtggacaaaatgtaaaaaaaaaatgtcagacaaaaaaaaattgatttttagaaaaattgtttaattctcaaaaaattatttttttttaaaaatgaaaacagtttttaagttatgaagccaaacatcatcttaatttctagtgtaattctttcatcgtgttgattgtgaatttagccaactaacgcggagtctgactatgactagattttgctcatgactgtcatgtgaggaatgataataaatgtaaaagaaacaagcatttatagaagtttgaccccttttattaagtaatagcctactgcccttctgttgtatttactcttgagataataccacgcagattacaggctgaaaccttataatttctaactatgactctcttttgtgttacaataatgagaatgtgtgctacagataggaagtatgaagaaaatttacaaaatgatgagaagaagaaagagttgaatgcattagtgcttctaagctcttaagtgcatgtgtagaatgaatgaaaagagagaggtctctttcacgtagggctaagaccctttgtataattttagagtttacaagttattgtacataacgaatagaaaatatccctaggaaatagggaagttacattctggtgaagctttcctattttcgtgggtagtctaagtcgttttaaagttgtaggggcaattgaaagtattttagaaggcccatgaaaaaactaatgcatgtttaggttgtcatatataagttgcgagttggtcggccaaccttatttggaagctgcccgacttgtctttactacacctctagtcgaccaactaatggtccggccagggtctttaaaccttactttcagcttatgttatctctgtcttgagacctcgaggcttggcagtgagggagttgttcggcattatgccggctggttcatggcgattccctccatgtgtctgatggtctcgatgatgtggagatgccacgtcactatggcaaaaattgggataacattttcctctagtccctattcgaacatttgtctgaatatggagtttacactctgtccggtcttgtgatgcttttgtcgtgcatctatgaatggtcacactttggtctcttcaattgattagttattacgttagttgcgattaatgacaattttatgccaatcaatgtgggaaattatatgacgagtgcacactatcccatgtttaaacctttggtcttctttctcccatgcatgcctatattggtgaaattaactccccattaagttttcagggggaaattaattctttagaaactatataagctagtgtctcaccgaaaaagtccaagctaccttcgcgccgttcttcagtcggtaagttttgaaccccccatttttaggtttctgccatggatgagtttctaagcttttgaacttttttattctcatgttatggagtagttttcatccgttgtagtttgttcaatagctttaggatgtacaaggcatggcttgttgataaaaaagagtgaatcttgcactttattttgatactttgaacttcagggtttgaagatcacgaagaacttagatttaattttgaaaaggacaattttgatccgttaggactctttcctggtactttgggtttgactgattatttgaatccgtttggaaaccctgttcgattcttattaaactaattttaagctggttggttgttagcctgtcagttttaggctgctcagttaatgatgttttgtcttaggttgtccgatgaatacccttaggttttgacctgttaacccgcttttttgttcaagtcttttatactctttggttgttcacctccctt

SEQ ID NO: 187077 - DNA, 3634 bp, Cannabis indica
tggttcaaaatgcacacatttagagcgtggattgggctaatgaaattaacatatatataaatattcatatttgtgataactaggataacttgctgcttgctatgcttttaaaaatgttaaatgttgttaggttttgactgatagtatgatgtaaatgttgcaggggttttatcggcatgcctcgccagcttgctctgtttgggtttttagtcgaatttatccttctcattctctgtggtgtggtttcgggactgtcctgccccaacaccagttccatcgttgggtttgaatctgaatttaatatggttcaacaccaacttagaggttctcttaaaataatggatgattgttcatttagggtttctaattttgatatgatctcggggacggaggtctactggtggggtgcaaatggatccgatttcgaaaacctgacctctgggtttgttgtctctgatcagaagttgaatgatacgtataagaattcctcatttgttgtgcatttggggaagaatgtgacttgggatgggatccaagttcttgctgtatgggatcgtccaacagcatcgaattttgggcatgttttgctgaaaaacgtcagtagtaatgagtcacagtcaagtggcagcagttcagggacgtgggttggggtcggggtcagtgtggaacccactagtgtttgagaactgttaaagtttgtctgacaactataagggttaggtggacattgaatgctgatgataatttgattgatattgggttggaggcggcaactgggatgctgaattatatggcgttcgggtgggcaaacccaaagtcgtcttctaatctcatgcttgaggcagatgtggcggtgactggtttcatggaggatgggttgccatttgtggatgacttttacatcactgagtatagtgattgtttagtagacagtgatggttctgctcatggggtttgtcccgattcaatttatgaagggttggactctactgcttcagtgaataatacaaagttggtttatgggcataggaaggatggagtttcgttcatacggtaccagagacctttgaagtcagatgataaaaagtatgatttaccagtgaaccatacagaaaatatggcagtcatttgggcaatgggtaagataaaaccacctgattccatccgacagtactatcttcctcaaaatcacgggggacctcgcgatgctacgtttgggcatttgatgctgaatatctcagaacaggttaatgattgtgtgggccctttggatgcagaggacaaggaagatcaagatgtcgtaactgctgatggaaatgctgctcttgtagtcacttctggcccagcattacattacccgaatcctccacacccttcaaaggttttctacattaacaagaaagaggctccagtactaagggtagaaagaggggtacctgtgaaattttcaatacaagctgggcacgatgtggcactttacattacttcggatccacttggtgggaatgcaacattgcgaaatactactgagactgtttatgctggaggagcagaagctgaaggagttcaagccagtccaacggaattagtctggttgccagacaggaatacacctaaccaagtttactatcaatccttatttcagcagaaaatgggatggagagttcaggtagttgatggcggtcttccagatatgtataataatagtgttttcttggatgatcagcaagttactttcttttggactttatccaaagattcgatatccattgctgctcgtgctgagaaaagagtggttatttggccataggatttggtagcggaatggtgaacagctatgcttatgtggcttggattgatagtgctggtagtgggagagtgaacacttattggattgatggaactgatgcctctagtgtacatccaacagaagaaaatttgacttatgtaaggtgcaagtcagaaaatggaattattactttggagttcacacgacctttgagaccatcatgtagtcatagtaaggatccagtttgtaaaaacatcattgatccgtctacccctctcaaagttatttgggctatgggtgctggttggactaatggatctttgacagagaggaatatgcactctgttatgagcagtagacctgtaagagtgttgctcatgcgtggttctgcagaagccgaacaggacttgcgaccagtgttagctgtacatggattcatgatgtttcttgcttggggtattttgcttcctggcggagcagttgcagctaggtacttgaaacatgtgaagggtgatggttggtacaagattcatgtttacttgcagtactcgggtttgtcaattgtcatgcttgcccttctatttgctgtggctgaacttcgagctttccatgttggttcattacatgtaaagtttggaattattgcaatttttctgggttgtttgcaaccagtgaatgcgtccttcaggcctaaaaaaccacttaatggtgaagaggtatctccaaaaaggcgtctctgggagtacttgcacatgaacatggggagatctgctattgttgcaggtatcgccgcacttttcactggcatgaagcatttaggggatcgatatgatgaaaatgtacatggtctgaatttagctctaatagcttggttcttgtttggagcattgatggtcgtgtatttagagtacggtgaaagacaaaagaggaaagagagagtttctggaagaggcagttgggtgctcggtaatcctgaagaagatgattctcttgatctgttaagcccaagcgggagacatgcagaaaaagagtcacaaatgtcagggagaatggaagttcagctagcacctttgaacaaatagatatggttggtacacaccatcttcatcaattttggaacttctcgccccatcaagattcgatggaggaaagaaaacacatctgttttcttgctcggcggactttcatttcatggtctaagagggttttctttttcttgcggtgatcatcgttacatttctactccaattcattaattagtcttgaagagtaagtactcatcccctcggttatagacatatacagtttgtatactagacacattctatcattttctctgcagccatgcagattttataggtttaggtaatcaaatcatacatgattttgtcatactacttttcatgcccttgacaatgagctgctctagctaagttctttctcttctctttttcacctgtaaattatggtggtggtggtattcagtgaaaaaaaaaatactgatatattaacattttgttcttactgtaatttcaatcctactacatttgaattttattaccatatctataatggcattcttttcaggaacataaagtgaaataatgggttgatatttttcaaacaagcatgtggaatattttgtgggttttgaaaaggtgtctcaaattaatactttgatgcctctgaatatcttttttgagatgggtgtggttgattttcagggttaatttattggtctactggtttgaccagatctaaaataaatatataaatattaagagaaaatgcacaactaattcaatattggattgagttgtaggcattctctttagctattatttt

SEQ ID NO: 187078 - DNA, 1031 bp, Cannabis indica
gtagtagtagcactatccctagaagaatcatcatgactacaatcagcactcacctgacgaggtgaaattagctccttacaatcagacaagtatgtagaaccatggcgattagttccaaatcttctcaagccatcttcagaagagcgatcagccatgactaaagcagtttcagtacttgtactagttaaccctgttcctgttctagcagaaaacgaagattcaaccctggagttatgaactccatggatttgtgaactatgtcctgaagatttaactacacaatcagctgaatgatcttccatctacaggaaaaaaaaattatcttggcacttcagcaactaaaggagctcaaaacccatgtaacaaaactaaaaacaatcaagaaagttctgaaatccaaacaataaaaattaaagtgggagtttctggcttaaaagaaaataaaagaaaaacaaaaacttaattatactcataatcataataaattcaagctgagaaatgaaatcgctctcttgattgaatttgaagacccaaatatatctgagaagccataaaagtaagaataggacagaaatatgagaaatggtcacactgacactgaatttgaacaaatagaagcaaaatattaatttagtagaggaaagaagagagtagagtacctcatacgtagcgcgagaagacgagccaccgcaaattaaggaagagagtctggagcgattcgatgaaccactgagtcggggacgagatgaaccggatcccaatcgactgctgctggaacccatttgagagaaaatagcttacttggagagattcagtaagagaaaaggaagaagaagaagaagataactgagaagagaactgaaaaggaactaggaagcatacaccacaatcccaaactcaaaaccttcttttctaattttaataataatatatgatataataattaaacagaataaataaataaattcaaaactgttacattctttcatatccataaattaaaataatattattacaaacaaaaaaaaaaa

SEQ ID NO: 187079 - DNA, 4425 bp, Cannabis indica
attattatatatatatatatatatataaatggatatgtataaatatgttttttcttaagattgagatgacagaaggaagaataaaaaaagaaaacttttcgtgtgattgttgattgaatgtgtaaaccgatgctaatatctgttaggttcattctgaatttcaaatttgttcatgtaattacatactctaaatttttgggtctttgggttttttttttttgttctaagaatgaaaattggtttattaatttagttggtgttttgtaacacttttgtttttaaactttttaatcatcaaaggaaaatttttgtttttaaaattttgtttttgaaaaacaaaaatgtgtccacaatgtataaatacatgaatggaaaaaggaaacacttttcttatatccatgtcttttgctctatattgtggatcagtaattatggacttatctttgttagataagattgattttagatgatgcaaagaaagattgcatttttattactgtctggcttattgattatttgatggatgattatgatcatttatcatgttttgcagaattatttgtgagtgataatgaaaatgaagcctgcagagatatgtatggttctgctttgtttgagtctgctgacctttggagtggtaaaaagaaatcttacattaaaatacattacatttttttttccttcctttttgaaatggttttgaatttttgagtattgtttgtctcttattctattctttttgtgttatttgtttgtggctttcttcaattcagattggtggtccacaaacatgcccagctaatttggaaagtgattgtaatgattctggtgaatggaaaggggaatttttcccagaaattccaaaaattaagtatgaggtaagattatgttaagtttcaattgtatcatggatgggacgtttagggttcgtttgatacgctattttattgtatgaagttggactgtattgtattatattaatataatttaatataatattatgtttggtattgatttgtattaatagattttgtaaagttataatatatttttaataaattcgaccccaacaccaactctgggtcctagtccaggctggtacaggtgtccgagtctcggtcctgggttcgtctggttctaggcccgggtccgggtctaggcccctagattcgggtgggagattggggttttgtaaatattataatacaactcttatacggcttaccaaatgagctcatatgtaattatataataagacattctgtaaaagttaaacctttattttaatggctattgataaaaattaccattgtttgaagttggcaatgctcagtttctgaaatttactatgaagttgttcctttctacaaatgaaatttacatgtgctgaccatataatcctaattttcagggcccttctagcaagaacccgcttgcgtttaagtggtttaatgccgaagaacttatactaggaaagaaaatgaaggttagactatctctttctctaacttattttcttgtgtaatgtttcaatttagtaagataacaacattttctaacctttccaattcttgttacaggattggtttcgattcagtgtagcattttggcacacattccgtggaactggagctgatccatttggtgcaccaactaaatcttggccttgggaggatggaacaaactcattggctatggcaaaacgaagaagtaagactaaatattcattttgtgttggtagtaacaaatgtgcaatatgaagttcaaagaatcatgttttacttgaataaaaattgcagtgcgagccaactttgagttcatcgacaagcttggagttgatttgtggtgtttccacgacagagatattgcccccgatgggaaaaccctcgaggtgagtaaccttttagactctttcgatttgtcatgtgatcgtttaccttatagagaaaaatatacgagttaaaagtttctgttttcttttctctctgaattataaggcaatgcaataagaaaacattggttccatgtcttttctgtaatgattcattagttgtggaaaacaattcattgatgtgttgtgttgtttcaggaaagtaatgctaacttggatgaagtggtggcacttgctaaggaacttcaggtaattttaccttagaaatatcctgtgtatttccatgcatagatttcctcattaaatgtgacctctttaatgatgataatttacattcgtcttgtgctcattgactgtacagggttctaaagttcaccctttgtggggtactgctcagctgtttatgcatcctcgctacatgcacggtggtgccaccaggtaatctgcaaacggtgctattatggtactatgtttatttgactctctattctaaatactaactttgtgaatgttgtacagttctgaattaggtgtatatgcatatgctgctgcccaagtgaagaaagctatagaggttacacattatttgggaggagaaaattatgtattttggggcggtcgtgaaggttaccagagtctcttgaacaccgacatgggacgagaacttgatcatatggtgcgctcatgtcataaaattttcctacaatttgtggccttatttttatagatatcggttctgagtatacagtttatttttttgactcgcaggcaagatttcttgaagccgctgttgcctacaagaagaaaattggattcaacggtacaattgtagtcgcctaacctgttttgttttctatttcataaagagttccgataagtagtctgttatttttaccgagctaaagtttctaccgggaactaatattttttcatctgttgtgctatttagggacaatgctgattgaacccaagccccaagaacctactaaacatcagtatgtctattacctgtttactttcatctatgatttttttccctcactatgttcacatggcgatattattatctcaggtacgactgggacgctgcaacatcagcaaatttcttgcgaaaatatggccttataggtgatctttctttctaaccatctcttataatttatatgaacatctcaatgcatttattcagtttaccatactatactcatgaaccacataactagaatatgagattgcaccatttaatttttcaaccaagaactaactccattgtttttgtaggagaattcaaactcaacattgagtgcaaccatgcaactctatcaggtcacaggtataatcgtgttttacgttaaataaaatcgtaatttcaacttctccgtagatgaaaatgtgtacttattcttcaaaattatgtaaatttttcgctctgcagttgtcatcacgaggtcgaaactgctagactcaatggtatattgggaaatatcgatgcaaacacaggcgatcctcaagttggtatgtcacggtttgttttccctaatatgtaaacagtaacagaagttgtaatttgtaacatgaaatttgtttcgatacaggttgggatacagatgagtttcttacagatattggggaggctaccaaggtgatgctcagtgttgtgaaaaatgtaagaaaatcttctctatcgatttctttttcaacctcaaatgtgttctctaaaaacttgttagtgaatctaattatatttttcaaatttcacagggaggattagcaccagggggattcaacttcgacgcaaaactgttcgttctcttcttttcttatgatttgtactttacatgattatggatgtcatgaatgcctcttaatttttgttttcgatttgttactgttagacgaagagagagcaccgatgttgaggacctatttattgctcacattagcggaatggatacacttgcccgtggacttcgaaatgttgccaagattattgaggttgcatgtctatgttcctttctcttccttttttcttatttttgtgtctacaaaaatttgtttttcaatatgctctctttttctttttggcctgtgaattaggatggttctcttaacgagcttgttcgagaaaggtactcgagtttcgactctgaaattggggctctaattgaggtaagtgactcctaaagtgttctatttgtgcttatgttttaacttttaaactcattgtaacatgtattgcctctttccataggctggcaaagcagatttcgaatttctcgagaagaaagccatcgaatggggtgaaccgaaagttccatctgctaagcaggtaatttagaaaatctctgagaagtattaattaccatggacaagtcaaattcattagtctaacttaaaaataagtagaaaaagtagtttaagtattaacattttcatgtagtgaaaagttcatctgagggtgttcaaaacataatcatcttcaaattgagattaagttcattgctaacaccatcaacttatccttagaaacaatt

SEQ ID NO: 187080 - DNA, 1298 bp, Cannabis indica
ttttttaaaaaaatctcgaatctcatgagtatcgaattcttttgcatgtactatgaccattgttggcatcacaaaatgttgtgttctttccgtcttacgtgatggctttatatctcttcttgtttacaggggatatgtatttgcagtaagtgtccacagggttcaacttcttcttcaagtgcttagcgtgaaacgattccatcatcagcagcagcaacagcagcaacaaaactcaaccactgctcaagaggaattaactcaatctgaaattggggagatatgtgattacttcagtcgccgtgtcgcatcagagccctacgatgcatcccgtgttgcatcattcattactcttcttactttacctatatcagtgttgagagaattcttaaaattaattgcatggaaaaaaggtttagctcaggcacaaggtggagatatagcccccgcacagaaaccacgaattgaattgtgtcttgaaaatcatgcaggcttgaatatggatgagagctcagattcatctgtagccaaaagcaatatccattatgatcgacctcataattctgttgactttgcactaactgttgttcttgatcctgcccacatacctcacattaatgctgctggtggtgctgcttggttgccttattgtgtatctgtgagattaagatattcgtttggtgaaaatcctaacgtcttttttcttggcatggatggaagccatggtggtcgagcatgctggtttcgtgttgatgattgggaaaagtgtaaacagagggttgctcgaacagtggaaatccattcaccagcagatactactcaaggaaggttaagaggagtcgcagacaacgtgcaaagagctttaaatgtgtgccttcaagggttgagggatggtagtggggtaacaagcactggatcaacgtgagtagtcggattgcccagagttgtatattgtttttactaatttgggttatgttggtcacatatggatgtgtagattaatcggggcggttttatgtattttcggttctgcaaatttgttgctggaggagtttgccagtgataaaggaggtgaatcaatcagagaagtaaatcctgggaatagggagatgaagtctgaatgtcttgcagaaatagtgggggcatgtagagctaaatggggcttctctctttcttttgttttttagctgacttagatcttctgatgcgtagagtgtaaaatgtattggagatagatggtctaataagtagtaggtgtacaatgttttgaagatacaaaaggggtcccctatgtcagaaaa

SEQ ID NO: 187081 - DNA, 917 bp, Cannabis indica
cccttgaggttagtcatgcatgatcaaaaatctacaacaatattatataaatatatatatattaattatagtttatagattattattgatttttgtctctgaattatgacctatatattattgtatcctttgaaatattcagttaaaaatagtactctccgaactatttacagtgttgtaaattatttattctgtcaggttctatcacatgtggcaaacaaaatgattatatgtgactgtttaataacaattgtctaaacaatcacatcatcattctgttaactatgggtgaaaatttaacaaaaaaattactttacaatactgtgaataattcggtaactatttgtaacaagttgaaaaaattatgcatatgtcagagaaaaaaaaaaaaaactaaaaagcataatttatgtctaataattctttcataatatatgtctttaatatttaatatttctgtgctttttagggttcaaggagaagatttttcagtaccactcagtaatgatagtactaaagatgatgatgatgatgtattaataattccatgggtaacaacacacagagtttggaataagatattcttggcttcatgtgtaattggagtcataatcgatccattgttcctttacattccaattgtggatgatgatgaaaagtgtcttcatatagaccaaaatatgaagaacatatcacttgttttgcgaataattaccgatttttcatatattttacatgttatttttcggcttagaagtgccctaaaatactcaaagacacatcaagtatccattctcatagggtttccatggtcttatcttctaattaatgttttgtccattcttcctattcctcaggtatataaatatatctaaactttatcgttttttttttggattatttcatatatatatata

SEQ ID NO: 187082 - DNA, 762 bp, Cannabis indica
aaaaaaataattagtaattttaaaccaaatttttttataatatgaaactgtattaatatatgatatactaatagttaataaaactcttctaaatataattttttacagtaatgtagtaatgtgatccttacagtaatgttatctgtggtcatacttttacactgtttttatgtttatttaaaatgttcttacaaactaaaactacatagaatcacgtacgtacggtatagtagtgttaattttcatttggcttacaaaattgtctatatcttgtcatgtgacttgattgtatttattacagaaatataatgggaaagagtaacataataaacagatggacagcaaaaatagggtactaaaataacagcggtcaaagttattatatcatgtacaaaataaagccattaattgcaataatatgatacgtgtgatatgggtacaaacatagagcataggcttcagtaccttgaaaagataggtaaaggaaatcaataaattaagtaactaataaatatataaataaatatatataagaccttatatattgactgagacatttaaaaaaaacaaattaacccttatatgtaaattcatacagacatatacgtgtcatatgtatagctgggtaggttaagaataacaagcaacacctagctagggtgttacgaaaggtcatctctatattaaatatctcttatgaaatgtaggatgaggaatgaacaaaattttgaacttttagggcatgttctgtatttttttttt

SEQ ID NO: 187083 - DNA, 4208 bp, Cannabis indica
tttttttttttttggtcaagtttatctgtgatttaatctttactgtgtttccattttattaaagctatatatgtttttctaattagtaatataacagcacaggggtggaaaaagttgcttgatatcttaagtatgtgctcgatgatgtttatatttgatggagtaataaaatgtataatatggaatgcttttttgggctgaaaaacattatctttttagtaagttatgttgcctcgctaagaatataactgactgaaaaaattcaaaatatttctctacaacactaaaaagtgggtaaaattaattggatattgtattttgaaggaaaattggcacgaaatatggtgacctgattgcacatgtgcagaattatctatcagattggatctttctagtgtaaatgatatcagccaacaatttgttttccttctatatcttctggttcttactatgatttatttgggtatgatatgactgattcacaacggtatgactaattcacctgcttgcgagaaaactgaggggacattgtttctaagggaagtttgcgatttaagcaaccaatgcctatttatatacactgatggtggtgttcatagtgcaagtggctcttcttcctaattggattattaaagaaactgtaaaatcgatttgatttgttccaaggaaaaaattctgtttactctgtattagaatgcatttgcagtttcttgcaaaggatggacataatatctccttgaaattttgttctctgttgtgtttccaaaaaatgacattgcttagattgaacacatttttactcctgttccgagataatagaaccatattaatatcttttctttgcgcaaatattctttttatggatagttttcgtgaccatttgttgtgctatatatttttcaggccaaaattaaggaaactttgttgattgaaagacttaagcgatatgaggttccaaaagtcgaaggtcctgttgttgagccagtcaccttgacaggagaggaacgtttttatatgaaaaaaatggcccaaaaacggtcaaattatgtgcccattgggagaagaggcatttttggaggtgttattcttaatatgcatatgcattggaaaaaacatgaaactgtaaaggttatctgcaattcctctaaacctggccaagtacatgagtatgcacaagaaattgccagactgagtggcgggattccaatccagataattggaaatgacaccgtaatattttataggggaaaggactatgttcagccagtagttatgtcacctatagatacactgtccaagaagcgggtaagtccactcaaattccaatttttagtaaagtaatacaattaactgctttcaactaattattgcatttatcatttagaaccttcttaattctctcaggttagaatgttcaaatgtgttcccttaatctagagatatatccttatgggttttatgaaataactatatcttttctgataattctctctgtttgtctcgttggccattttattcttttgataaggaataagatatattaacgaagagaacaaatttcagaaaagatcctcaaagaaatgaaagcagaaaaaacaagttaaaataaaagaaaatacacttgatatgttgctcaaaactgttcaaaaatatttttgttactattttatttttcattactgctgtcctcaaaaataaaaaagagaaagaaaaggatctcatgaagtatcggcattctttaaatgcgtgtggttaatgataatagcatgttcttatttgtaatgttgtgttgacaggctttggaaaagtccaagtatgagcaatccctggagtccgtgcggcgattcattgccattgcagagaaggaactagagctttattacaggcacatagcactttatggtgatccaaatgatagaaatcctatttcagttttggatggtccaagaaaagacaccaagaaacctaaggaacttgaaaacgaaaagaatgattactcttcttcaggtttaaatctaatagggatggaagctaattccatggaatctaaactctccagactggatggtgatggttttgaaagtgaagggttgtccacacttgaatcagaatcagaatccgattcctattctgattccatttcttattctgatgatggagaacattgttctggtacgcaagagagctccactaggatagttcaatcatcaacttccgacttttataatcaaaggctttaataaaaactaaaatagattctacagacatgaatgaaatgcattattatgtcctttatcaatcttagctattgtgtagttttactttatcaaaagtttcacaggttttgaatggttttatttggagaatttagagggggcaaaatagtttaaactccagacaaaaaattgatatttcataacaggatctaacaagtatgtaaaattgttgtaataaaatatagtgtaagactaatagtgcacccttttttatatactaccatagtaaatcatgcaattttacatacaggagtgacttatatcctttttttttattgtataacaagtttatattgtagtttattcaaataaaaaaagtgttcattggcattgtagtcatattgtaccgcataaatgttttcagacaaatcttgaatagtttatggtgtcaaaacataaaacataatgtaaaataataactacgagtgcagactgtattgaaagtttgaattttctttatttgttttttgcaaagaacttttataactcaagaagctaaacatggaaaggcaaatttgcaggaataactccatatgcacataaaggaaactccccaaaccaagtttggttacacttagaagtcaaggtcagtttggctaaaaaatgagctacaccattacaatactttttaacatgaaaaatagaggtacaatgattgtagctggccgtctgcattaactgttcaagaaagaagctccaatccgtcgcaagagtataagagccctgaagaaaatacaccacctactggcaatccgattgaatgataaaaggagagagttagagcctatgagcagggtgaatccccattttgattgccaaactttcaacaagctcgactgaaacagagcccctgtaatgttgaatcttaacagccataacctctcccttgtggttgtgaatgatattgcccagatcgcaataggtcccttgtaaaggaaccccaatatcacagttaatgtagaataggtctttagggggctatttcaatgctaacagtttgacacaatgtgagtggcttgagggaaaggaatgtatctcgaagattgcagctcatcaagcatcacatgggcccaatcaattcaagcaaaggacgaaggcagatgtaacttcaatctctttttattttggcgattccagatgagccaagagcaaatgataaaggtggtgaagtcatacctggatatctactcgtgaatatagagaatgaaggccaaggggtcagtaataaagttaggaaaagcaccaaagatcgaatgtcctccaaacaggccttgccgtcgggcagtaccaaagggcatgaacaatagattccacagttgccccgcattagcagcaatgggatcagtttcatccctcttgagcaaagaaccaaaccaaccgcgagccacccttgataagcacaccaacaaaaattacgcaccttgggagaaatttcagtactccacaaatgcttccaccaacgatgaattgtctcagaagaagagttgctagcagcaaaaggagaagcagccgccactttatagccactacgaatcgtatacaattagaagtgtaatgccagaccatatcatcttccactcttgaaagaacagtagcaagaccataactaaagggatatcatctgcatggaaacaattctcaatggccttgacattccaagagccatcctcatttttcaaagtggcaagggcggagtttggaggaaccaccactgggaggcgacgagagaaagtagcaggctgaggcaaccacttttcctcattaatttgaacaattctccccaatttgatgcgccaacggttttaatcattagacttcgaccccaaagaattccacgctacataaaagagcaataatccctggtttagcctaaaaatatatagtgtttataaagtagcattcttttagaacacgggctagcaatgtctgagg

SEQ ID NO: 187084 - DNA, 868 bp, Cannabis indica
gtcattgattaggggatccataagggtaatcggagataggacacgaacagggaattgctactccagcaagatagcagcaaggcgggaacagttagcaggaaaacaaattaaaaaagatgaacagaaggagcggttgaaggatgaagaaaacaattcaaaagttaagtggtagttaaaaagaaaaaacaggaaaaacggctacagacccaaaacagggcaccgctcttattaatttggtgatgaaggataatttttttaatttatttttatttttaattattgtgtatattataattatttataataattcataattttttaaaaaattcttaataaagtactgtataagaataaagttcaaataactttaccacgaatataaataagaaaaacaaataaggtgtgcaacaaaatattttaacattattttcgtattgatacttttatcatagtgttgtcattaaagactattattcttataatgtgttttgaaaatattggattaaaagataatcttaaacattgaccaagtgtatcaaaaaatatattcttttaaaaatgtaatatatatagacttatatcctaagatatattgtcactatgcaatattttttttttcttctaaatatgcaataataagttcataaattaattatcacaatattaacagtaaaaaagtaataagactggaaacatatttgataatcttttttaattggctgatattttgcgaatgctaactttcatgtttggtatgtagttttggtagttttttctaagtttagaaaatattactacaaaaatgaaattaaagagtatgtttaaatctttttgaaaggtagtttttaaacattgtcatctattagaa

SEQ ID NO: 187085 - DNA, 3464 bp, Cannabis indica
cttttaaaattaaaataacttatgttaattctaatttaatcactatttttatgatattcaaacagcgtacgaaaagtacaatatttcgttaagtacttatcttaataaaaataattttctaaatagtaaaaaataagtaaaaaattatatgtgtacttattttatacttggcaaaagtataagtttagaaaaaaaaaatgacaatagttttatatcgacctgggctgaaatattcgattattcagctgaaaaaggaaaatgggaacacacctaaattaaataaaaatctaaaaataattaagagattaaatataagataattaggtcggggaggtctataaaaggagtaccctatcttgtatgaatgcatacaattttctctttaaccaaacaacaatagaaaacgactttcttaattttgaaacaaaactcacatgctcttaattaatctttctccttctctatctttttcacacacactctgaattctttcgccattaacacaccacaccatttcaaaaaccctaaacctcttctcagcttacaaattttatatgctagctttactttttgagagccattgattattaataggaccattttcaaaatatacaagcatctggaatctggatatatatatttatatacatgcttttctcttatataaaacactcgtatatatatactctaaatggatatgaactctagcgaaatttgtaatatcaagtctgagaaaaagaatgctatgagaaactactatcgccagaggaaattcaagtggattttcgaggcctgcgccgccctactcgccctcatgcaatcatcaacttggcttccagtcgccgttgattttaccggccgttttcttcgggagatcatctccgtcttcaaaagccatctcttcatctttttcctcctcaacgctatacttctcgccgtttacgttctctccggccgcatcacctggactgttgacgccggatcgggtgccaacatgtacgaagaattcgtcaccaacagcgagttgacccggagaatccctggtggagaagaagaagaagaagaagaacaagaagcttctcctccggcgccggaacgtactatccgcgtcgtcgaagaagaaaagtatcgctcagaaaatgtcgcttcgacggccacttcggtttgtggtgtgggtaaccgaaacgactcaaaaccaaatggctcggttcaaggtcttgcggaagaagagaaggcgttagtggttgtgaagaagaagagttacaaaaggactcagtcggctagagtcgaagggaggaaggtaatcggtcatcatcagtctcagtctcagagagagttccgacggtcttgtacggacatttgcaggaaaataacgtgttccgtggagaaagaagctgctgaatcaagcgaggtgagtcggttgagcaatgaagagtttaatcagaccattgatgcattcattgctactcaaaagtggattcaaagggaggaatacatggaagagcggaaaacagagcactacatggctttggccatttgccagtgaagaaaaatgaactatcatgcagtggagtcaataggaccaaatgcttaattagctttgtttaatttagtctacttatattataattaactaggaagcatcagataatcccatctgtattatctgattaatcatatatatcttatcactatataaatatatatatgattatacagatggataatgtataggaatcaaatagcctttttaattttctttttccttatgtatgtttttatatttccttttggttctagttgacttgatgagcttttaactggtaatcaagataatgaatttccatattattattataatttctcgaaagagctaaatgccatattaattaaattaaattaaattaattggtagagtagagcagtagttgtattgggatccgttcttgttctgcatttaatatttaaaagtgggtttgttttttctttacttggtagtatatgaatgagtaagaaaagtgaagactgactgatctaattcttttgattggagtatattcagtgaattgtgttggggagagagagagagagagagggcgtctctgtaaaagtgatgacattccaatttcaggtctttcaatgcctaattgttctgtgtgtagtacattgtgtattacccatgattttcaaattagccaaagaggagtaaaggtgcttctccctgttctttttttttttttttttttttttttttatttggggtaacaaaactagagtaaagacaataattatttaatttattttaattttgggtttggagtaggggtagggttcgagaatgaaacataaggctctttgtgtcttgactgagactgagaaattggtttaatgtagtatgaaagaaagtgttgcgcgttgtcattttcgtatggtattcaaactttgttttctcaatacaataatattcttcatttcatccatttcaaacaaaattaataaattaaataaaaggccataaaaaaaatatggggaaaaagggtagacaattgtgttgatgatcagatgattattagtgagtggtgtctttgggaagcgaattttaaggcttttaaaattttcttattcaaagtgcaaaataacattattttacacagaaaatcatagcatggaagcatacaaatcttctcaagtgcaagaaaagtaactttttggtctaatttaaacattattagactcttttatgttaggttactcataattacctacactaagttgtgagtgagtgagtgagtggtttatgaaagcttttatagtatctttcttttggcgttctaattaaacaaatataccccataatgtaagcaaagtcatcccaccattgccttttcatccgagtactattcttcgtcggacctagctaacacgtcaaagtatttcaaaggcctccaataatcccaatatcattattaattcttgttgtatatttaggcaatttattcaatcaattctcccaacccaaactccttttgtttcttgtgcgacacaattaataataaaaagctaataagtgaagtgtgttttgtagcgtggtgagttaattcataaaacatttccttctagtgtggagatgtgtgtggcatggcatgtgggataagcaggcatttctttttaataatagaaaaatttcttccaaatgaaaccctgcttaattgcttgctcttatccacttctcgtgagaataattatcaatgaaaaggatcaaataaatttactttaaactattatcactatttcagtaccccaatatgttaccttttgccccatatagaaatgaaaacaacaaattaaaacaggaaaaaagaaaagaacatttcctttctcactttctcttttgttgtaaattagatgggcaccacagccaaatgtcacctgctctaggtcttttatttattttaattattttt

SEQ ID NO: 187086 - DNA, 2692 bp, Cannabis indica
tcgaaacaagaaatactagaaagtttccctactttcctctcgtgcttagttaattaatcctctccttctcccactctctctctctctctctcctctatatctcactttctctctcatacctctccggtcacagtagggcttcttctccgacacttccgaacacgtttcgcaccgctgcgctcattttcgccggcactattctatctcaagccaccggaggtaacctctcttatcatcttcttttgatctcattctttctcttgctcgaagctctaagcagtgaaaccctaattgccgaaaactacactccgatataattcttttagcgtgtggtatttaagattgtacagtgtaattaatgagatcctgagatcggttttatagtctgagattcattgatttcgtttgtttgttttttctctccctcttgatcagggttagagagagtttctacagggtccaataagatccagagcggtgataatcgacgaagcgaatattggacaggggagaaagcggaggttaggtctttgttttctcgtggtatcattttgatgcgttggtcggaattcgaatccgccagggttagagtttgggttggacccgtgagatggctaatcccggagccgggaccaagttcgtgtctgtgaatctgaacaagtcgtatggacagccttcacatcatcatcatcaccatccacacaatgctaactcatacggatcgaatcggcttagagccggtggccacgtcactgggggtggcggaggaggaggtggaatggtggtcctttcaaggcctcggagttcgcagaaggctgggccgaagctttctgttccaccccccttgaaccttccttcattgcgcaaggaacatgagaaatttgattctttgggctctggtggtgggccagctggtggaggggtttccggaggtggggcaaggccatcttcgtctggtatgggatggacaaagcctggtgcaattgctttgcaggagaaagaggttcttggtgatcaaggtgctgatggtactggcaaggttttcaatggttctgatgtggcagtgaagggtagtagcgtttatatgcctccttcagctcgatcgggaacagtcggttcatccgctccaacttcttcttcagcatttccaccgttggagaaagcctcggtgttgaggggtgaggatttcccttctttgaaggctgcattgccttctgcatctgggaatgggcagaggcaaaaggatggtttgaatcaaaagcagaaacaggtacatggtgatgagtctcatgatgagcagaggaatggttctcgtttgagtactcctgttgacatgcgccctcagttgcattcatctcgtcttagtagtggcaatggaatgaatggtaatgtggggaccaatggtttaggtggttctcagtcaagtgaacccgttcggaagcaggaagagtatttcccaggtccatttccgctagtccgagtgagccctagatcggattgggctgatgatgagcgtgataccagtcacggtcttactgacaggggcagagaccatgggttttcgaagagtgaagcttactgggacagagattttgatatgcccagaataagtgttttacctcacaaaccagtccataatacttctgagaggtgggctcagcgtgacgatgaaactggaaaagttacttccagtgaagtccctaaaggagacccatatgtcagagatgtaagagcgcctagtagagaagggcgggaagggaactcatggagaagtccagtaattccaaaagatggttctagtgctgcagaagttggtgcaaggcagtctaatctgaatggagaaatgcataaagaaaataaatatgctccatcacattttcgagaaaatgctcacggtgattttgggaggagggaagtaggatatggacagggaggaaaacagtcatggcacaatactgtagactcacatggaacccgaggagctgaccgaaatacacgctatggaagtgagcaacacagcagatacagagatagttctttacagaataattcaatgaccaaatcgtcatattcttcgggtggtggcagagggatgcatgtcaatgatccaatactcaactttggcaaagagaagcgttttcttgcaaagactgaaaaaccttatgcagaggatcctttcatgaaagattttggaacaggttttgatggtcgtgatcccttttctgggggtcttctaggagtggtcaagagaaaaaaagatgcagtcaagcagactgactttcatgatcctgttagagaatcttttgaggctgaacttgaaagagttcaaaaaatgcaagaacaagagcggcgtcggatcattgaagaacatgaaagagctttggaactagctcgaagagaagaagaggaaagaacaaggatggctagggaacaagaagatagacagaggaaattggaagaagaagctagagaagcagcatggagagcagaacaggagcggatggaagccatgcaaaaagctgaagagctgagaatagctagggaggaggagaaacgaaggatgtttatggaagaagaaagaagaaaacatgctgctaagcaaaagcttttagaattggaggaaaagattgcgaagaggcaagctgaaacaacacagccaggaagtagctcttcagcccttgcagatgagaaa

SEQ ID NO: 187087 - DNA, 4060 bp, Cannabis indica
gaagtttatttatgaaactcttaccagtgaattcacaagaagaaagatcacaatgttatcaaagaattggcctttaactctttgtattgaaactctgtatttggctctgaaatacttccaagtatatacttggcagagcataatcttttctttccatgaagtttgtcaattttcgcgctccttggatgaacattatgcagctgcagcatcagaattgtggatggatacaccgatcttgaccgatcaatccattgaacctgaatagggtgtccttctcttgcttctatggtgttttgttcgtgtgcctttccctttgcgaatcgagcacaagaacaatataacagccaacaaaacccaagccagaaaatgcccacagaacaattatccagaaccgcattgagctaaacctgctatcatcattctcggttggctctgacaatttccgagaatgatttgcttctgaattgttgttgttgttgtttttcactagtataagtttcatcaacatgaccaaatttccttgaatatgcaatttccttgggaatgtccgatttcggggggccattgtaaattggggtcttgacattttcgtcgttcgtggtgcaggcgcaatgcatcgttgatagtcttaatacattctatgcttagcaaatccctctgatataatccttcgtcaatcttttcaagcgatttagggtcgggaggatctggaaacttggcccagcatttgttgaccacatcagtttccctccagtttgccttgtcaaagctccaattaccaacatgaaattccaatccataatggaaaactctataatggacaccgggttcgggaacatatcccgggtatatcatgatcttattattaatttggtgctttaaacccaactgcagacaataaataagtaaatgagaattgtatcaagaaaaatgctagtaaaaaaacgcaaataaaacttctacatagattaatacctctgctgctccaaatgagtagccatacatctcacttatccacccagaattatatatatcgccagtgaaattcgttccataatgacttctgtcagcacgtacttcttcggttttatgcaaccacagtaaagcgaatcttcggaggtcatctatatgcatgatgattacacccccaaccttgtcacaggcatcgggatggctagtatggagttgtgcaagctcattgtcacagccaatgagatatctacaatgcataaattagagcgatgagcaaagttcaatttgagctcctaaacagacagtatggaaatggaagcaacattttattttttggcttactcgtagggagttgaaactgggtgccgcgtgctgcgttaaattcccatggagtaattggacctctgagtatcatatcagcatcaagaatcactatatactctgcatcgatttcggtatgatgaagccagtgaagtacagcagctggtttattaattgctggatacctgacatggaaaaaagtaaaggaatgaattgcttgtgttgaaaagagatttggcagagtttcacaagtaacagatgatataacacaagattaaatctatttattgtaatgaacttgagaaatagtataaaacacattcaacttaagatgaccaaaaacatgttcttttttgccttccctacatttaaattggcagtaaacaaggtcaaatagtaaagtgaacatctttatctagctggattgaacagactttgcagatgagactttaatttagattactttgaggtcaaatagaaaaaagtaaagaatgagatattggaataaccatgcacttaaaagtctattcagtaaagtcttgatttggtctagtttcaccccatcagattctgatgggatatcttataatatgcttgagtaacaactcaaagtaaagagaatagaattaccaatcgcccgttaatggatgccggctcatggaagggactatatgagtgggtgccagatcaatgccctgatatttctgcaaatcttcattagtacagctaagaagtcgtgtaatttttccaggctggccgctcaggtagaaactatgcataaatcctacagtctgccaatcgaagtaagttgtacattcggtggagaataaagtatggatttttggacgtggcttctctgtggtgtcaatgaccggtggcttttgtctatcctccataaattccaaactagctggagacaaacgcttcggccttgtcagttcagcatatttcttgctctttagaaaactcaagtattttgaccaacccggcttagaacagccatatgctgcatgttgtgctaaaagaccgtcatttaaagtgttaatacattctacgctaatatacagagcacgctttttatgtggatcagtttccatttgctctatctgcaacaaaaaaagtatcttagaagtccactatgaaaaaccataacacagtttttctcttggttaaaatctttggttacatacctctctaggataaggaggttcagggaagagtttcccacatttgtaaacaatgtcgtcttcgtggtgttctaatttgctaaaagaccaattccccacttgaattggcaagccataatgaagaagaataggctcaacgccttctcgtggaacataacctgggtatagcatcagattatcattgatcttgtgtcgaagtcctgcctaaaaatcaaggaggatacaaatttaagcaagtaattagtactaagatcattaaagtaaagggtaaactcttgtttaacaagaatattgttctaacttacttcagcagcaccaaaagagtatccatacatctcactgatccatcctttcccataaatgtcaccagtaagatttgttccccaatgagctcggtcttctcgcacttcttctgttttcgaaagccacaagggtgctagtttcctaagatcatcgatatgcatagctagaagcccaccaactttatcacatagttccgggtgtttagtgtgcattccagcaagagcattattgcatccgaccaagtacctgaaggataaattcatcatacaaataattatgtatagccaaattaaaagaaaaccaaaggcaaaggcaaaatattggaaaattacctaagtagttcataaactaatgtggaaacaccagaccaaacatatctaagtaactgaatattcaacattagtcaagtctgcattatcaaaactttatagtcaaagcattgtctgatattttggttgtggtatggtatggtttgttttgttcagtggctatatatggaggatctctagaccacattttgagccatttacatcagataagttcttttactttagatattaaagaaataattttattgtgaacattactttttaaatatcttttaatattaatatggagggtcacagtttctcaagctagcaatgatagtgatgttggattgatctcttgacttggatttcctctttatttatttttaggctgacactgtttggctttatcactctctataagatcttctatttgtattgaactcttaaatcattgttagagaatagtactagtttactttccagttttcttagcttgtccctaatcatgtttatagtaccacctataaggcttctcgtgaattagcaatgcatgcactcgggatggataatgaaccagaattttcgtctatcattcttaatgtactcaagtttgattatttaagtgatcattgttcaaaaacaaccttaactgtcaaagcaatctaaaatttgattttgtatggttatggcttaataagattagcaggattgaaattgtccttgacattgaagtaaaagggaattgaaagaaagaaagaaggaaatacccataatatgcagcaacaggtctgcctttctcagcaccaatttcccatggtacaattgggcctctaatgatcatgtcagcatccaaaatcacaacccaatcaacattttctgcatctttactatgttttagccagtgtactactccagctggtttgttaattgcagggtacctgaaaacccatacatatgtaaaaaaaa

SEQ ID NO: 187088 - DNA, 4748 bp, Cannabis indica
tttagttaaaaaaaaaaaaaaaaaaaaaaaaaaagccaaagtctttctagaagaaagcttgtgtgtgtgttgtgttgtgcgaagcacatcgttgccttttgtttccaattacataaattgaatattcatattttccttttactatgtctccacctccttcctccttcctcatacacaactctccacttctctaatcatccatccatggctcttctcttatacaatctcaacctcttctagcctaccttcttctgcgtttctatttctttcttaaaccttttacagttttttcttttggagaagacaaaagaggctttttttattgatgggtattttcgctagccaaagagggtcaagaacagggacgacccaagatgctttacctgtctctaatggtgttcctgtgattaacaggaagaaatggtccaatttcctccctctttttgttgcccttgttgttatatcagagatcgctttcttgggtcgtctcgacatggctaagaacgttgctagggtggattcatgggccgacttgttctctcgggctccacctgttcatcaactgagggttgagatcgagagctctggtctcgatttgatacatgtcgatcggaatttggagttggatggttgtgaggcctggctcgaaagagaagacgccgttgactattcaagggatttttcaaagcaacctgttttggtttccggtggcgaacaggtaattactgatatatggttttattagtgtaattgaaattacatattcttgcttgtatgatcaaaaatttgtatgacttcattttgtgtaagctttggatgttaatgggttttatgatattgagtttttgaatatactactgtttcatgatcagatggactttgctcataaaatttccaacgatgtattgttttggaagaattgatagtattaaattatttgcattttatattttaattctctttgcgtatgaacttagtatccttaaaactttccccttatgttggagttttaaagtctcagaaatccaaagattgttttttttggagctttagttaaagttgaactttctactttaggagactgagtactttaaagcaatgtgatttgtcattgtcacacaaacacagatatatatatatatatacagacatacatacatacatacatacatacatacataaatgtttctcttaagtgaataaaaatttctcttcaggattggaactcatgcaatgtaggatgtcattttggatttgattctagtatgaaacctgatgctgcttttggtacacctcaagaagttggaacagctagtgttcttcgatctatggaatcggctcaatactattcagagaacgatcttgaacaggcacgacggtgggtaagcacaatctaatgtagcttctttgtagtttagaggatcttgtttagttgattcgtaacctcagtactctttttttgtagcaacactttgattagttcattccttattatgtcttgcttttgtttattctagtaatattgaatcaactgaggtgctgctttgagtttctaatattgaatcaccgtagtatattgtaaaatttggttcatatgaaattagtgaatctaattttttaaatttaatgtgctttaggaaggggtataatatcgttatgacgactagtctctcatctgatgttcctgttggatacttttcctgggctgagtatgatatcatggcaccagtgaaaccaaagactgagaaggcccttgcagctgcatttatttccaattgtggtgctcgcaacttccggttgcaagctcttgaaacccttgaaaaattagatatttcgatagattcttatgggggctgccatagaaaccatgatggaagaggtacagttttattttcagtgctgtatttaattaatgtcttttttaattgttatataatgaaactggacatggtaaggttttgtttgggtactatttatatgtgttctgggtatgttatatctgaaattacaatatcagtgctgtttgaatttgtgattttgagtctgtattgatttctgcttatattattgttggattgtacgatttcctagctttgcaacgtgtctggctttatgagttgatgctatatattttggttccttaaagaggatatactcttggagaaatctgcgtgttgaataatttttttattcttaaccttcttgcagtggacaaagtagaaactctgaaacgctacaaatttagttttgcttttgagaattccaatgaggaggattacgttacggagaaattttttcagtctcttgtcgtctggtatgaaaacatttttgctcccattctctctgttggttgtcttttgaaagtataaattggaaaacatataaattgaagctgttggagcttttagcatttctgaaactattatcatactccgacttgataatgatgatattgacatctttccctttttaatgctctaattttacagggtctgtgccagttgtaattggtgctcctaatattcaagattttgctcctgctcctggttcaatattgcatattaaggagctcagtgatgttgagtctgttgcaaagacaatgaaattcctttcacaaaacccagaagcatataatcagactctcaggtaaacaatataatgaccatttagtatgataggggcttttattttttcagaacataattcgcgactttcagttttttgttcttagtctaattaacaatattgtttcaattggttaggtggaaatatgaaggtccatctgattctttcaaggcccttgttgatatggcggcagttcattcatcatgccgactttgcattcacctggcaacaaagattagagatgaagaagaaaagggcccaaggttcaagagacgaccttgcaagtgcaccagaggaccagaaactgtgtatcacttgtatgtacgagaaagaggaaggtttgagatggaatctgttttcttaaggtaacctttcatatggtttcccttgtatgcactgcacttatggttgaaggttcaaaactgctgtaattttaaaatgaggagtatctcagcaaaattgagtgatttcatcacttccatttaaattaatattttgtgattgcttatgtgctctcccggaagctgggaaatgaaaactcgtgcatctgtgtggttatttctttgttaaagataatgttagagcacaaaattagtaaaatttttcatatcacaccattatatgttgaaatttcagatattatggattcttataaaaactctttttgtgcagggctgggaatctgactttggaagcattggaatctgcggtgctcacaaagtttaactctctaaagcatgttccggtatggaaacaggaaagacccgaaatcttaagaggaggaaatgaacttaaagtatacagaatacatcctgttggcatgacacagagacaagctctgtataccttcaggtttaaaggagatgccgatttcaaaaattacgtggaaaacaaaccttgcgccaagtttgaagtaatctttgtttaggattaacaagtctctgcatttttttttcataaaagttcagcatttttcagcacttgttactaaacttggagcagagtagtaagtgattttttcttgttttgaccctctttgtaaaccatatttgttacctctgatcagattggtagaattttagtgaactacaaacaagtggcatattatttaagaggataaaccaattgatgtacctttattgtgaatccttcacttgaagaaaatacttaacctcaggttccactcttctctcactttttgttttccctttggttggagtatattagcatcattgtttttgaagatttctctactaccattttagattgcttagttagttcattctagccatatggttatgaaataaattttcttctgtgtttaccatctcctcttaggaaagaaaagatgaagaaaagacttgttgctaaaagtccatcaacttagcatgttatgatttctttgttgtaattagatttgtagtattcgattctagatttgtaataagaaaattttattaaaaaaaaatggtagtaaaagtattttatcttaagattttgttgtggtcgtactgtttttggatgttaagtgttaattaaattactaaatggcagtttaaaaatgcgtgataatatacttttttagcttatttaatacattgtttaatattatatggtcacgtatttttgagttgacacttaataactaaaaaatagtacgattgcaataaaatcgtaaagtaaagtatttttacttatttttaattaaagttatgtgtaataattataattataaatattaaagttattttgctgtaaaaatctaaattattaacaatatttttttttgaatgggatggacacttaatggcctacctcaaagttgacatcattgatttttaggcaacattatgagaagacaaatatatatcttaactcttaagtgttaaggaggaagtagaaatatttgatattatttttttatttattttttttttgagaaagaaatatttgatattattagttgtttggtttttgtatatttgttttaatttatattatataaaagatgaggtgagattcagtgaatgatgagagagtaggaaaagtaaaacaaaacagcacatagattatgaaaataggattaaaaactagaatagcaattattcaaaaattaaaaaaaa

SEQ ID NO: 187089 - DNA, 893 bp, Cannabis indica
aatattggcccttaaatctgtcttgtcattggaccttatgaactgcaacctcttgcagtgattttgatctgtgaatggggccaagaagctggaacaagcaaaagaaatggtggaccatcctatttattgtgaacccttccactttttatctctctctaacatccttccttccttcattcattatcattattgtactactctttaatacagatattatatattatatatatatttattttattttccaaacatgttctcttcacctttttttctcttttcatacgactatcgtactatatacgagtgtgtatatatatatattgtgatatagaatacttttgttgtgtgtgggacacagtacacacattatacacactagggagatatatagagagaaacaggaaagggtggtaagatcatggcgtgttgtcctctttatctaaaatctctttttaagaatttctgagatatgttctcttctgtatttctttcattttagagtttagcttggttccaaggagagtagtgtagtagtagtagcagtactattaatactactgtcttataaattttaccatttctcacacgcaaagagagatatgagtcaagagaagaagagcagctgtgatttctcatcactcagataacatatctttcaagattaattattgtcgatctttgctactgtagttagtttttctctgtaatcttcttcttcatttctttttaattaagtcatatatatagttatggaactggaaaagaagaaggagccctcttcagatgtaagagaaatggctaataacaaccaagatttgcctgtgaaaagatccaagggaggcctcataaccatgccattcattataggtacatatacatacacatatacttca

SEQ ID NO: 187090 - DNA, 1934 bp, Cannabis indica
taataataataataaactaaaactcgcatactaatcaaaatatagttaaaagcatattctactgaatacatctttataatttacttttcttagagaagaaaatctaaataattttctctaattatgaactgaaaaagagtgaaagaacatattttctttctagtcttttattttctctgaattttttttttctaattaataataatcaaaaaatgatgtaacaatcgtaataatagcaatattattattattaagaccgctcacgcgcggttatattctctactatatatatataaccaatatttggtgactcttaatttttttgagatacatagactaaagaggaaaacaaatacgagaatgtcattgatgattgacgctgtagtcatttagatttgacgatttgatgtaggaaaaggagaaagaaagaaagtgtctctattagtctattggattccactaatatagtgcggtcaaatcattaattcctataatattaccatatatatatacatatcaagatttgattgttgaaatccaatccaattatcctcttaattgtccaccatccaccattggaggaagaggtttctccacctttatggcaatgactgttgtctaaatccaacgataaagaaagaagcacccatttgatcgaaggctcagctctgatcaccgaatcccaaggaacgtgttctcgttctcggtggaaatgggttctcgatttcaatatctgttcttgtagggggatgataaatgtccaaaggtggtgttgggcggaaaagaatatctgctcttgtgtgaatgcttgtacaattataaaaaggtttaataatatgacaaaagttttagatgaagaataatatgacaaaagttgtgaccctccaacacaaattcccactattttattattatttttattaataaatatttatataaaagcatacatgttttgtcttttcctttcttttgggtttacaattacatcaacattaatgttctcatccttcaccattgctgttctctgactccataggtacgctctttcatttcttttcctaattgacttcttttcttcagaatccatttacgattgttcaaaatttcctggtctcgattttctctaatttatcatgggtaaaactaattgtgtagatgacttttcgggcttaagtttgattctgtcatatgtttaggttttagaatgttttgtattgtagtgcctattgtacctgaatttgctccagtgtattaccaacttagattcttgggggttgcttttgtcatgtattttattttcactctggttgaattaggattggttgatatgattggataatcatgtgcttttggttttagaggtcaacctttcataacttaatgtataggtgagacaatatgagaaaaatgtacaattgggagtggattaaagtttggagatgattgctagtgagttaggataagtttggattgagattactaactactcaggtgggtttagtttattttgttatggtgtcaactctgctttcttttgtttcagttgaactataaatatggaagcagaggaggaagtttctattttaagtgcagatgatccccgacaggaaattgagctgacaatagcctctgaaaagatcaatcttcttcctacaccagctcagctctcttgcacctgtgtttgtgccttctccaaacaagagcataagagcttggattcagaagaaagaacaaaatcagcaactaaactttgtggactcatattattctatctgttagttatgatagtagagattgttggaggtttgaaagccaatagcctagcagtaattacagatgcaggccacttgctcactgatatagttggattctccatttctctattctcagtttgggcttcaggttggaaaccaacaccgcagcagtcatttggt

SEQ ID NO: 187091 - DNA, 2585 bp, Cannabis indica
tttctttttcctttttttgagtacttatttaatttctggtacaacagttttttttttcctttagtttgagtgtagttttatttcattaatgaacagaactaaatttataattatgtaaattaataattttattcttaaattataatataaatattatgttcattcaacaataattttattatgaaagtataaaaaactatttattgttacttattacatttaatgttgttgggtatgatttttgatttctaatgcagctctatctagttatatcgtcttggttccaattgtattggttcaacaaatggtaattttctattaaaaaaaacgataaatatgttttttgaaaatgtcaacaaaaacagaagacgaactcatcaaactcttgtagtttaaacaaacccaaattatcaaccttagaatgctattattactaaggtcttacttactaaaatcacaaggaaatgaaggaaccacgagttctaatctggcagcttatactcaccataaaaattcaatgggcatttaattaaaaaagaaaaactatttgtttaaaagattgtcaagagtaaattatactgcaagaacaacaaaaaaattaccatttcgtcctgaaatcataacttctagttttgccaaactcaaaattgcaataaaatggtaaacaaaacattatctaatatctcaaatacataaaagcaagttccacaacactaaaggcctatttaaccggtgatattctgagacttgttaaggatcacaccctcatatttgacctggaaccatttcatggcatcatccttggtgacacggtgctggattccaacacgtgacttgcatcggcgacgacggcccacacggtaaccaggacgctccaagacaacaaagaaatccattccataaataccagtggaaggatcatacctataacacaaagttatgcttagtcaatatgaaatatgaattaagaatgcgagttttgagaacgtaaatgcacagacaaattcatttctaatgtgaattgagtgagtctacaactcaaaggaagtaacattaagcatccctctcctatcataaattaaagtgaaactcacttgattccaagatcaatgtgctcctggataccgaaaccaaagcatccagtatcactgaagttcctcctaagaagctcatactccttaaccttcaacccactttccaaaagctgcattgccttgtcacccctgactgtaacatagcatgcgatcttttcattacgcctgattccaaatgatctaacagtgtaccttgctgttgaatgcaaagggaaaacgcatgagaaatatgaaacataagaaaacagaactccatacaaaggaaaacagaactccatacaaagaaatgcaaaacaacaatggcataaaaacaccaaatatactagttgtggatgtgttcaataacattataaggtcactcaataccaacatacaaaacaataactggttaacattagaccgaagaaagttttaaacaaactcaagatttctaaaagctaatacaataatgcattcttaaattaaataaaattttaattatataaatgcaacaactaaaatgatacttaaaagggttcgcaaacgaaaaggaagcataggtaaactaaactctagattcgtgggaaattttttatttaaaaaaaaaaaaaacttttcctctattctcaatcaactacagcaattaaatagacccagttgagtaaaggtatttgatatcaataaacgatgaattccgaaacagagttcaaatacaattccctactttcttgtcaagctatgaacagctaaagaaaaaatacatataggaaaatgttacccttggagaaaactggtgattgtccactgagttgctccaaaacctataaattaaacaacaaaataaaaaaataattactattaatctggttgtaagaacttatctacgttcttcttaaaatcatgtaaatgtacaaataaacatatgtgagaaaaagtggcgaaccttagcagctctggtgagacgatctccactctcaccaactgaaatgttgaggacgagcttctggaccttgatttccctcatggggttcgataacttcttctccgaggcctgcattttacaaccccaacataaacaaattagagatccaggaaaacacaaacaacatcggaatcaaatagaaagagatagaaggatgaagatcgagtgagaaaccacaccatttcggtgtctctgaagttgcagcggcgaggagggtgaactggaaagagagggagaagaagttagagatgagagaaaccctaatatgtgtattatgtatactatgatatggagctagggttttgatgggccacttcaagtagggtgggcaaaatcgtcatttaagggaggaatatgtcatcttattgttttgggctgtaatactctttgggctataattgagccttattgggctgatctaaagcactctcctctgccttagcaaaaaaaaagaaattttcacatttgtcacctatttttttataattttaattaaaagtaatcttataatgttttcttttttttttttt

SEQ ID NO: 187092 - DNA, 6810 bp, Cannabis indica
atagggaattaattactataaatttttgacttagatttcaaagtcattagagtgggaattcaaaaatattttaatagttttttaaaatttcaaaaggttggaagtctaacaaaaaaaaaaaaaaaaaaaaaaaaaaaaaaaaaaaaaaaaattttaacaaattattgaatccaaaaattcttaaaatacaaccaatcacaaatttaatttttcaaaactcaaaaacactacaaacatttttagaaacaaattttaacatacaaaattcaattttttttatttccaaaactctttttgaaaacaaaatttttgaatcataaaacaatcaaccctttaacgatctctctgccaaacaagccagccagtattgctccttaacaagccatagaattatacgctcaagtcaggttatcaactagccaagtctactcataaagcatccgtccccaattcctcccaatctaccaaatggcagaagtctttgtgaaatctcaagatccccctaaaaatcaaacactttgtttaccatgtatgtaataacttggtgtcaacaaattcaaatcttaatatctgcggtcttcaaatcaacccaacatgtcctcaatgttaacaaggtctaaaaactctacttcatgcatcgttcagttttaagggtgttaagaagctctggttaggtacacatttcaaatccttgctttacaagacaatctttttcagcttttgacactatattactaataaaatcccaagtgcaggaacatgaattcaatattttcctctgtatgttatggaagatctgaaataaccgaaatgtaacagttttcaatggccaaagtcaagaacacccaattaaaagaggaggcacaattttaccaccaataccaattggtgcagggagtactagaaacacaaaatgaccacagaccagttgaaccagtcacgtaatgagaacctccacctgcaggaaccatgaaatcgaacgtggatggtgctcttttcaaagaagacaacaagagtggcttaagagtggtggtgcaggatcacacagaaggcagggttactaaaatcatacagaggagtgcattcaccaaaaataattgaggccacaaccctcttacaagcccttaagatggtgcaaacaacaccaattgccaattcactacattaaaacgaattgcctcaacttggtgaagcatgtccaacagctaaatgacaacatctctcactatggaggcgttatagtgtctacaagaggagttatcttctctccctaatgtaaaaatctcctaggtccctcgaagtgcaaatgacttggcgtacaggctcacaaggagatcacttgggttagataacgaatgctcatgcgatggaaatttaacccccccaggggtagtttccctaaaaaaaaatgctagtaatatctctcttgattgtagtttgaaaaatcttgataggccactgttcaatatgatatagcatgtataatcgcatctatactcacgctgtgatgaccattaatgggagacattacttaatttacattcatagcaaaaaataattaccaaaaacaagtttcacaacgctacatattctaatcatttgaagacatggccgtggtgtatttgagtttgaggtaagccttgatgaagggctccagttcaccatccattacagagctaacatctgatgtttccaaactcgtccttacatccttcaccagtttgtatgggtggaaaacatagttcctaatttgctgcccccactcggccttcaccgcatcgcctcgtatttgctttatctcggtcgctctttgctcctcggctatgaccaacaacttagctttcaaacggctcagtgccttgatcttgttcgccagctgagacctctcctctgcattgtgtttttgaataagtaaaagaccaagactacaattttattgagtaataaacccgaaaaggagaaatggtaaaactataaagagagaacctgtacaccgaacagtgacaccagttgggatatgagtgattctgactgcagtttcaactttgttcacattctggccacctttcccacctgcccttgaaaaacttatatccaaatcctcctcagggatttcaacatctaaggagtcttcaggaagaagaggcatgacttcaacaccagaaaagcttgtctgccatgttgtttttaagttaaaccattgattaggattacacatattgtgaagatgaaaatgctactttgatggatacctggcggaggcctttggcattaaaaggtgactgtcgaacaatccgatgagttcctttctctccggataagtatccataagcatatcggccttcaacttcgagtgttgccgatttaatccctgcttcctctcctggggatttctcaaccactctggtcttatatctctgcttttctccccatcttacatacatcctgagaagcatgtcagcccaatcctgcactggaaattatcaaaaggtatttacacaagaaaatgagggagtcaagtttaattttggcaacaaataatttgaaaacagtactcggcaaacatttaccactaccttattttggaaaagaatgtaaatattgcataggacatagtagtactatttcacctgagcatcagtgcctccagcaccagctgttatagagataacagctccttctttgtcgtacggaccagaaagaagttcagtcaactcaaaccggtctaaagccttgttcaattccttgataatactgttagcctcttcaagcagagcagtgtctgtggagtccatctcttcagttagagtgactattgtttctgcatcttcaacctatatttaataatgagagacaaaaatgtaagtggaaagggacattttcattgtcaacagttgtaactagacaagaaacataataaggaaggaaaaaccattagtggcaatctttttttttttttttcggtaaggatcattagtggcattcttaatcacaaacagaattgcatggacctttgttttgaactcagtaagcagttttatcttgtctttgacatcattgagagctgaaagagtttcctgagcactggctcgatcatcccagaaagagctatcagatgcttttgactccaaagctgaaacttctttttctagtagttgaagaccagcagaggctctaatctcttcaacacgttcagaagctgcttctacttcttttctaagggaataaaaatctgcgcccaaatcgaagtcatcataagttcataaattattaaccaaaaaaagaataaaacaaaacagaaaattgacaaattcaattgacttgtaactaaaaagcttcgtcctttaagctaaggcaattgaaaatgccacaagatgataaaattaagaaccaaaagaaaattaaatcacggagctgaatcttttgttcttaaaatctaactcaaacaatgctaataaaagtagaaacactttactaagttctataaatgttaatcatagagcaagcggaacgctctaattttaagatcaaattaagaacataccttgcatagcccattctctggtctcgttgttgactccctcacttacttggctttgttgtgttgcgtacaaaactgaagcacccaaaatgtcaataagcaaacttcatccaaagaacacacaaattcaatataattacttaaagtagccaaagaaaaagtaatctttcatgaaacccattacgctccagcaatatcagacagaagggtaaacaagcgattttgaaaataaaaacaaacccacgaaaattccaccccagttacccaagaccaatacagctttccttgtaaacattcaaaagagccaaaaagtaaaaaagttatgagttgacgcaccataacgaggagagcgagaataaagtgggaggtgttttggggataagaaggggaacgatgtgggattgagcgaaagcaaaggaactggctttggcattaatggcagtgaattattgatgggttttgggataatcataaaggttgagctgtagagaggtcgaagaagacaatccatggccaacaaagctcgctctctctcagctcagctcagttcattttcaagcaagaaagtaataatacccgccagcgacatgaatctcatccctattttaagcgctcagatgctgccacgtcaccagagtctctaagtgaatctgagccattaattcatggtctgactatgttgttatgtttatccaacgactgagcaaacaaatcatatcttggtcgccaacgacatgtcgtttcgatagttttgaaaatttgacttatttatatagccaaggatcgagaaattcacttttcttgaggcctgattccgattagggcttgtttgcggagaaggagaaagagagtgagagaagcgatgggaggtgggcatggagaagggacgacgtacaagggattaacgatgtacgcacctaagcggtggcacgtaattactgggaagggcatgtgtgctatgatgtggttttgggttctgtacagagccaagcaagatggtcctgtagtcttggggtggagacatccttgggagggccatggccatggacatgatgagcattaggtatttcttcttcttcgctttatctgcaattttcatttcaatgattgtttatacttgcaattttaggtgttcaaaaggtttcattccatgattgaaagggaaagggagtttttgttttgaatttttcattttatttatttgattttggataatagttccaattgagaattgctcttttaccacccacacctgcattctgttttgctgttatgaaatcaacatgatcacattatcgcttttctaatttagaatcagaacttgaaaaacttaagtccatagatacgctagtgacgtatcattcttgaattggttatgaataaactcttagaaggaggaggttgggcatacaattggattgataatagctcttttgtccttcattactgcttttaatgtccctatggattattcttaacttagaacctccatgaagatgggccctctgctgttcctacaatgatgttaaactactgcttccaattctgaatgtgaaacatgttcttctctgcatttcacaagtcaaaagaaaaatgtattaggaccatttgttttgttactttgtattgtaatcattaaaattgagaactaatgtagagaaagaataatagaaagaaaatttaccaaaaagaaactgattcagactcctattggttacatactcgtacaccagcaaactctcagggctttcaatgctacaaccaagaagtttaataaggttcctgtgttgcattccactaatcaaattaacttcattgaagaactcatctacccattcccttgtattatagatcaatctcttaactgctacagttttgccatttggaagagtccccttatacaccgaaccggctctgccttttccaattttctttgaggggctgaaataatctgtggctttctcaagtgtttttgatatttgaaactcacaaactctgcgactttgaagcagagaagaaggaactgattgtgatccttattcttattggatctcaatcgttgtctacgacatcttattctttctctgctttggtcttgttgtctcttcttctgcagtttccaaccgtcacctttcttaaatgaaaagaaaaaaagagtttctaacagtcacctaatagtaatggactttaagactttttgacagaaataattaaaacacaacaaaatccgtctcatagacacttagaggaggaattccgtttcagccggataaacaattacttcactcacaacaggtactgtactttgaggctgctaataaggattaaaatacagagggaggatggaaactttgtctggttgtttgagttttctgaagtgattctctctgttttgtatagagttttactttcgtattctacagggatatgatttagctatgatccaattctcttttgtttatttcttcttcttaataatagtaaggtctgtcataattagtttataatgtttagttctaagattgtagaaatcgtgttaataatcgtacgagattttgctctcaattttttgaaacgtaagagccagggccaaagaaacttccataaatttctgattttggttcaattaaaaaaattctgtttctttcatgtgaatcccatttgtatggtatttgttcctacatatattttatttcagtgctatgtttaagtttgggacaattatatattggtgttgatgaagtgtttggtaacattgaggaacttctctccaagtaaaatctagtttatggtgtttctaggcaatgtgacttgtaaatattttaactacacatagtgacaaatatgttacttggaacaatgttgtgttgttgattggagagagcatttgtagtttttttaaaaatccggcactttattaggagaagcaaaataggcagtgctttagagaagttttgagccaaaatgtacaatgctttattgaacagctaccaactaatatagcctgtttagagaagttgttaacaattatggtttatgtatttacatctcttcagcattgttgttagtatttgacatgtttatgttaaaactataagaatttttaagccacaagaaactttgttagatatgcatttattatataggtaagacacacacatatatataaaggtttgttgagagttattatatgtgcagcacacctactaaacacactactttttaaaacaatggaaaacagtgggtatctgttgttttttttttttttt

SEQ ID NO: 187093 - DNA, 1389 bp, Cannabis indica
ctgaggttactgaataagaagctgagataaatctgtacgagtatcatcgcttgttatagtttcagttgcataatgtcgataaatagttggcatgtgtttaaattttatactaatataaaaagcataatatatatatatataaattccatcaagtgctcatagaagatgaataaacacagcagatttttcacattgaaaagaaattgcatcacaaagtagtcacccaaacatttatgaaggacaaacggaactgctaaaatctcgcaaacagtatgcaatccaccacatccttagtcctcccaaagtttgtaggcaagagaagctgttagaaggaatcaaagtgtgggaaggaacaagcaccctacagtcttgctttccattactgcaatatttcaaccaataaaaaatcttattaacttctcagtctccgtcaactaataccatctattagcagttgactcataaagagagggaaaaagggggagtgagaggaaagaaaagaataaggagaaatagttgtgaagctttgctgagtataaaccagtaatgagataaatagaatgtagataattttcttccacttttatttttcacaaagaagttgcgtataaaggtttagcaaaaaaaaaaaaacataccttcacttgagaggaccaaatctatcgttcataaagccactaagcatctgcaacatgacaaaaccacaaacagtgtgtcatacattaattatgcaatcaacttataaatccaacaagcacaaacttaatcgaagaactagaaatcaagtctaagataaaaattaaacatataaacacacacacacatgtcaaaacagaacaacttacactggaaacataaagcattacatataaaataaaagcatgtcataatcgacaaaaaaaaaaccccactctttttcccatcacaactcttctctattaacagtttcttaagtattacaaatactacgggatatggaaacactagatttttctagatttcaaactgtaagacatcaaattattgtgacaaacaaactatgtctggatagatattcaaaacacccaatagtctcgttcacatataatacaaaatatgcaatattcgaagaataaaaaaataaataaactctaaaatgaaaagattctccaacttgagaaattagatattattttctcagatattttaaccttcaataatcacaataagaaactcagggtaatgttaatgttagaattaatatgcacaaaattcagttattaggattgaatattgatgaatcttctagcccttgcagtcgggtgtgaaataggacaatggtcactaagtattttgcattaccattgggcggatacccaggggtgacatcgttttgggagctgtgttggc

SEQ ID NO: 187094 - DNA, 14315 bp, Cannabis indica
tcgagttagtgttggattttgagtctggggttcgggtctagagtcgaggtaggggttcgtgtaccagtagggtgggggtccaagggtccggccgtccggggtcaaggctgggtccgggtccaagctttgggtctgaggtcgggtccaaggtctaatttagttcaaggttgggtctgggtctaagatggggatcgagggttgatttcggggttcaggtccaggtttcgagtttggagtaagggttagagtccaaaatattgatgaaagaaaatataaattgactataattaagaaagagaaaaaaattgttaagtttttctcttttgaaattgtattttttttttttcaaaattttgaaaatcttttattctcattttaaaaattaaatagtggaaacaaatttataaaatatgtttttttttaaaaaaaaaacattttatttttttaactaaaaaataaaaactcattaaaaaagtgttccaaaacacactttaaatttataatttatgataaaattttgacccaaaataatagaagtatgatttcacaaaatagtaatttaaaaacgaaatgggactcatatatccaagttatgactaaaacatattttatttttaattattctttcattatttttattacacgtccttaatgtataaatatatatttttaaaagtagaattactaagagggatcaaccaataccactatatatatatatatatatatatatttttttttacaataaaagatataaactcgctacctgtttctacataaaatatagtattgagttagagcagttaggaattaggattgtcctgtaaataattaatggtattttatatttattattgaaataaaataaatgatataatattaaattataccaattataataacttaattagtatttgtgttttctaaattttaatatgtaccaaatcgtattttttgaatttttaggccactaaaaatttctattgaactatttaaattgttgaattcaaaaattttattctaatcttacaaacaaaaagtaaataaaaattcaaataacaacatttgtatatgttaaaatttggaaacatgattttgtgcatattaaaatttaaatagtacaatttaatacttagataatcatcatattagtataattgaactaaataaaaattcttaaatctgatcatctcaaaataaaattttaacaactaaataaatttgagaacataatttaatataagtgaaaattccgaagtcaaaaatcctaataaccataataatttaacactagctactagggcgaagagacatggggtcatgtgtggacacatgtttcccactcaacttttaataatttagtttttgtataaatttttttgtatatttttaaatttacctccataaatttattttttttaattttgtcatcacatttttttttctttataaatttatatttctcattttttttcttcacataatttcatatttattctcataaaatttttatttttcactttcttttaatatattaatttttttcgttataaagtttatatttctttctctaataaaaatatttttttattaatgcccatttatatatatataaaaaaatttacccctaatatttgtggctggctcctccactgagtagctaagtgagcaccgttagcatttgtagttgagttagagcaatgctattttgtagttatgtatatagattgtgtatcaaacatttcatacgagaatctagtggaggcaatttccttggttgatttcattacatgggccaaacttatttcaaagcccacaaacaccaacactaaccacatgtttctagaacctacacgtggcagattacaagaaaacaaaacacaacacaaccctctcttttttctcttcattcaaaatctccttctttctctctcatctcatatcagctgaagtttctagccacccagctgtccactcagtacgcacgtgaccccagaacgccaagtcggccaactatacaatttcgccacgtcatcaaggggacccacgtggctccctcgatgcgcttttacagacgtatccctcctcatcccagtatttgagtttgtggacgagaattgatgagacgagctacgacaagttttagaaaattaaaaaagaaatattaaagaaatgaaaaaggagtagggaaaaagcgaaagggtgcgctgatgctgtgtatctagccactaaattcttgccacttggcatcatcctaagaactcactcgtttcaggtctgggcttgtagacctaaaaaaaataaagaaaggtacaattttttatttttatttaaaaaaatattattagaaaataataaacccacaagaaatagttgtggctgagattgatcgacccagaaatgcttgcctgttgatggtgcttccttcctttactactaaaactctcttctttcattcttttccttctcctacccttgatctcttcccctattcatcttttctgattttgctttactacaatttattttctttggtcaattttcgtctctccatagccggaaacaatgagtttaaggaagatttcacggtgagctggctttcatgcatgatcgagcaccatacgatttggttgggagttgtttaatactacaccatgtctttaccagaaggtatggagtaattttgatgcatttatttatttcttttttaaaatttactttcagtttggttgctgaggagcttggaggaaaaaggaaaactggtttctaaatttgattggaaaatatatatgtattttttaaaaataaaagctggatcgactaagtaagcctgccaattgagctgttgactctgttggagaggttttgtttagttggctatgtgagattcggtttaaatttgatttgaaattttgtttttccttctcttcctattttcctggcaaccaaacagatggttaaacttaaaccacgaagcaaagcactgtatagatgcattgtttgaggggtggatgtagaaatggttgttgttgttgttgagtactgattcaagttttctcttatcttgtttgttttgtgtctcgctcttaaaggttttggcgtcttcgggttcgttttggtgaggattctgaataaggaatttacttttacttctttcggagaagtatctctctgcatctctctttgcggtggattctgaaaattttcaaaatcgtattgtattttgtactaatataattcaaaattagtaacttcgctgctcgggaaaatcaaattgcttaatcttcttgaattaagaatttgagacggatctctaccgattgctgccacttgttttcttttgcagtgacagttctttatcaggcgttgttgactacttctacaaccacggctctactggtaatagcttttgattccgtccgaaatcatgggaagttttctttttacccgttgctcgtcagggaggatttgaagcagcggcagctgcccaggtccgataatggacacatactcttccggagaagaccttattattattaaggtgaaattgatgtgccattcaattttttttttttttttatctttgtcataattaaacattatgctgaacttaaaaacgtgtgatgggtattaaagttggacttataaaacttctgtaatggcagacacgaaagccgtatactattacaaagcaacgagagcgatggacagaggaggagcataataggttccttgaggccttgaagctctatggacgagcctggcagcgtattgaaggttactatttggatatacttctaacttgttttttcatatttgttgttctttctcttccttacttatggctattatgctctaagtcaagttttatagtttaaggtagtatatgcatatttacactaacttgaaaaaaaaaattgagttcttgtaaaagagttcaacccgcaaggcatctcctgttagcaatgacataaatgctagtttctgtatatttctcttaatcgggcgcctgcctctctctcttcctgtttttgtttctacttggtggttcgcagaacatataggaacaaagactgctgtgcaaatcagaagtcatgcacagaaattcttttcaaaggtcaattggtaccttcttaccttattctcctatgagatatgttttcttactactaaccatttggtgatcagtaatatcagtcttataatttgcaattctattgtctgaaatatagtttcttagtttgcctgagtgatgttttaccaattttagatttgtttttgcctgtttgatgtttgatacaattatgagaagtatattttattattccttttacatgcagacatacattaaggaaaaataaatcttggtcagtaagtagttgttgtagtgggaaaagggccaattttttggatctccttgaaacactgcaaaggcttatactggtgaacaaaaacatctttcttttatgacatgagtcagcaatatgtatgtaagcataatgttgtcacagtttttaatggtccatgtagcgtttctattatgctacatgattgattgggtgccttttgcatcttactttggcggtagctacttatacagctagtactaatagggtaagaatgagaataagaaaaagttagctgttccatttactctagcatacaatagttagcaagcttatgaattacataaaacatctgcagagattgctaaacttcctagctctgaagttcttattttggacagttagcttttcctctgtagactgaaagattatttggttttcatatcagtatgaacgaatctcccttatcataatatctcaagagggaatttagaagacgtaaaatttggaagataaaataaagttatattgaggtacttttgatggataggttgggcacttggtacccagtagagatagatttaaaattaaataatagggttgtcattacactacctgaggtttgtattaccttctcaaaattgcttgaggatgtttttacttctctcaccttgaatgaagataaataaattataggttcagaatatcatagattctatagtattctgcaaactcttggtctgaaagggcctaaccttttagcacagtatatgagttgggttagtatgctcttgtgttatcttagcttgtgcagctgttaaggtaagttaaatcttagaggttccttgtaatataatatttttttccgatagttgtattattgatgagttgatttgacagtctgatagatctgggctttgtggtcatatttccccatcaagtaggcacattcttatgataatggagctttaatctaaaaaaatgttttaccgaatatccttgtgtttctatccctatatcattagtgattctcattctataatagaaggggggcttggccaaaccagccataaccccgcccctcttttttgtatattaataagcagccaatgtttgaagaaatggtcataagttcaaatcaattgtacatggagattatacagcttattagatccaaccaccactttagttttggcttcatcttgtacagtctgccagtgaatttcttaacatttaaacaaggagtcagtttactttttggcaatcataggcattgttcagtagtgttttggcaagatcaaaaaaaccttttttggtaggttcttctctgcagatatgccttgtattaaccaacttcatgactttgtagtagatcctttatgcttccttcttagtggccttttactgggatatttttcatcattaggctagtggccagcaatgtcttgtggcttagaatgcttagttatctggaaagaagttttaccagttatgatacagtatttttatatggatgatatagtcatgatatgaataaactagttaggttttcggggtagagaaaatttgggttcgtttgagtcactgaagaagttcgctagattagtgaagtatttgtctttccagagacatcggctaacagtgaaatgctattatagtagagttggtggaactaatagaagatgttctcctacatacagagacttaaggaagaaatgtcaaatgtttccatcgccttattagttctacaaagagttgctttcttgtggtgggcatactgagatggatcatgggggttaaagcaatgaaaacaagcgagttttatgttaagtacctccactcttggtgagatcagatttacccgtcatttggtcaaaaaataagcatgattttctgttttaatgtctgtaataggagtggaggcattgcagaatagatcgtttacagaattatggataggtgaagagactggaactgcagccacttgtttagcctattggtagttgatagaccgtgagttataatctcacatttagcctatcagtaattcacattgatttcaattttggaggcgtacattttagatcccttcactcccataatttatatctatgtgtgtatacatatacatatatactaaagggaaataatccagtattgacctactttgatattgcttgattaagtatatactccagtgtcaggctactttgatattggttaatcatgtaatcttgagattagaattgttaggattgtgtataacatctattcttaccccatttaaatactaaaagaaaaaactactagcaggagtttttctgggccatgtgggtagctgtttctagggtagtccaaacggtttaacttgatcgattgttgtcaattggtttactgatgtgattgaccttttctgcttttttgttttttcttttccttcatagaacttctaggattatataaaacgaaattaaatatgcactaataactgagggcagtccctggtagtccttactattttttacatttcaatttgttacattatacaatttttttttttcttttttaaaatggctttgtctgtaaattcaggggaaaagctttcacacatcattggaagttttaaacatgatttgtaatggcatttcatggaaagccaccaatttctaattccattcttctcattaccatcacatctagtcctagaccaggccacaggccacaatctatttattcccacatgaacttgtaagaattttgagattttcttctactgcatcaatattaaatagctattttctgattttaaactgctgctgtgtcataagtaatttgttattctaggaaggaaaaattttggttttgtaagagatgatctgagttatggccgtttattgtgtttgacgtgacaatggactttgtttacttcaactgatacatggaatgctgatttatttattgattacagttggaaaaggaggctctcgttaaaggtgttccagtagggcgcgccattgatatagatattccacctccacgccctaaaaggaaacctagcaatccttaccctcgaaagactggtattggtcctctcacatcacaggtaggaggaaaagatgaaaaatatttatcagaatcatcttctcactgtaagcaagtactggatttggagaaagagccagttcttgaggttattgcctcctctccctgttatctgaaacattgttcattcaccccagttcttacttcagttcataatttttgtgcgacttctttttctcaaaatcagggaccggatggagatggaaaaccaacacaggcgaaagaaaaccacgatgacgattgctcaggtctcacccagcttcaagatactcaatgttcttctgttcacaaaagctccctacctaagccacctgtggggcttggaaatgcttgcacttttagggaatttgtgcctttaatgaaaaaggcgaatcaggatgacacaggtggatcttatgtcactgttgaatttgacaggaatgaaaacaagcagaagtccgatgccgaggagatggcacaagataatgacacaagcaaaggcttaaagttggaaaatcctaatgcttcatatgagaaattggttgaaggtgaaaaaatgaatgacttgaataatggattgccaactgaggagatgcaaaccactcaaaactacccaaggcatgtgcctgtgcatgttcttgatggaaacattggaaattgtactcgaactcctactgacaccacatttaatccaataggagagattaatggccacactaattttttcacaaattcagcggcatctactactactgagcatcaatctaatgcatcaagatcttcaatccatccatcatttccggttttacatcctcaatttacctcaattcgccccaatcaagaggactatcagtccttcctccatatgtcgtccacattttacagtctcattgtatctacacttcttcaaaacccagtagcacatgccgcagcaagctttgcagctgcatattggccctattccaatgtagaaacttcttcagattctcttgcatgcaaccaaagtggattttcaccaagagaaatgaactctgctccaagtatggcagcggttgctgctgctactgtagctgctgcaactgcatggtgggcagcccatgggatgcttccattgtgtactcccctacacactggatttgctgtccctccagcatccacaagtggagttccttcgatggactttgatcaaggtcctgcacccaaaacaggagaggaagacaaacctcttattcttctattgcaagaacaagtggatccggaacactcggaagctgtgcaagctcaacatttaggttcaaaatctccaacagggtcctcatcagactctgaggaaagtgggggaggaaaacctgattccaatgtaaaagttgctgatcatgaaaatactgtcccagcaactgagcttgattctaataaaccaaaaaacaccaagccggttgaccgctcatcttgtggttccaacacagcttctagcagtgaagtcgagacagatgccttagagaagcaagagaatggcaaggaagaattgcaagaaccagaagccaatcaatcagtttccgagtgtagtaatcgtcgtagtaaaagcatttgcaaccctcttgaatcttggaaggaagtctctcaaggggtatgttgacacatttgttgataaacttttactactgtcttttgttgttttgaggttgctgcatctgattcttagttcattgcttatgctattactaacgaagtgttactttttcagggacggctggcatttcaagcattattctcaagagaggtgttacctcaaagcttttcacccccacctgacctgatgaagcaggagaatcagaatggctgcatggaagaaaaacaaaaagagaacaaagatgtaggtgcatcattaatagatctcaacagtaagacttgcgggtcttgttctaaccatccagaattggagaaaattggaccacttagagatgaggaaaatttagacgaaagtttgctgacaatagggcttggacaaggaaagctcaaggttcatagaacaggattcaaaccttacaaaaggtgctcagttgaggccaaagagaacagcgtgggaaataccagcagccaggtggaggagagaggaaccaagaggctacgcttggaaggagaggttcaacttaatatctgattttgcatgcaattttgaggaaacctttgttattgcatgtaaatttcgaaatctcccctttgtctattatccttatatgccttatttgactattgaatctcacgcaacttgtcgtgtaggtgtgtgtaccatattatttgtctacgttgctcattactatctgaacctatgccactctacttaaaagactccctcgatagacatttagacaagaaaatatttaacgtgttctcatctggccagtctttcgaagacaatgtctttttttttacatgaatggttaatattattatgatcattatttatttctctcactttacatcactgctgtgggagctcaagaagcctctctgttgtacttaagcttttcatatacttgggagttacttctcaagtatggtatatattattattaactgctctttttttgttctatgatattgtaatagatactttctgaaagtgtaatcaagaggctctcttctcctttcattatcatatgtaactgggaactttaggtaactttcttactctctaggccgaggcctgcaaatgtgtttgtatatgtgcaatcactttataaacaaaacaaaacaaatcagcaaattgattgatggcatttttgagccattagaaaattcagaagatttgctgtagtgaccagttatacacgtaacaatttctattcatatgtacaatttcttgtccaaataaagaatagacagttcatttacacagactaaggtagtttcttgttccataatgtcaacaatctagtatttacttatctaacttatagacattctttggtattccatcaccaaacaaaagttagaaaagagtatatccatgtcagagacttaaaaactgcctgctgcataggcggctgatttactgccacaacggccaacattagtaatctgccttggcaaaagatgaacctccaagaatagctgtacaaaccagttctatttactttttatgagagtcaagaaattctttaagagaaggctgtgcctttaaaaagttagtctgccgagaatgcaagttcaaaatgtattgttggattcgcttcttgcctgcaggagttaacgaaaatggaggctttagaggcagcattgctgcttctcctgcgataaaggaaagcagaagtagcgcttttgaataattctctgctgcagtacttttgttctcgaactcgtccacctgaaacacagagtataaagtcaatggcaagaaagactaaagacattgacaaacatggcagttataagagtatacttacagcaccattggtaccaaatgctagtgcctttcgaaatattatttccatcgcatctggcatgtcaacagtacctgcaaagtaatgatttgattgagaacactcaaacccggtgatggacggagcaaaacagaaaagtatgagttgagaaattcgacaagaggctcactcaccatctatgtttcggacatgatttgataacttctcagcacgattaaatgcaacaagaaatgatttttctgcccacaaggaaacacatgaaggttggctaaaatcaaggtttccctcagtgtttgatgctaaagtagcacctttctgatcaagtttgggctcattcgctacactgctaccagttgcttcattctcagaagaagccagccaattgctgctaatttggagcacttttttccatatagccaaaataaccaactcagttgaaaaagcctccagatagaattctgtatcgtactgcaggtagagtaataaagggattataagcattttcaaccatcctcaaaagggcaagtcaatttacaaaaagcacaaataaaattcaatgttactttacaaaaatgaggggtgaacatcagcagaatgcagacgcatggaagttcttctcatcctaataataatgataatgtacattttggcaatgcaaacatggttcggagaacttattaccctttactacactccagttggtaatttgtacaatgtataaagctattttagtagggttgtatagactacagcttcaatcccaaaaaaacagcaatggttgaccaataaaacaaaagagatttcaaatgatgaagcaacaacttttgattatactgataattggtgctttctaacaacccactcttacagagggagagaaaaatgtaaatgtcaacaaagaaaagagcttgaaacatgcaactagaaattacagggtcaaagacacaaataatattatgaagtatgtggagaaaagaagttattgctcaccaaaagcatctgccaagtcatgaatgcaactatatacacaaatatgggtcataattggagctaatgtaatgaaacgaagtttggagagagatcagcaaattgagaaaaacattactaggaatgaactccatggaaatttagcaaaggcaacagttgacatgatacttttataattcaagaacattttggtttcttcgagtagcaaaggaaaacaaaatcgtttttgtaagagacaaagcaacacaccttttcttgtgcaagttcggtaagaacttcaacatactgatgcaacaactggagcctagtggaaggatgcagtatagaaagttcttgcacttctctcaataaagataaaggaattgatgttggtaataggtctgatccatgcttcagtgagccctctaaaccaccaatagagctttcagccagctcctcctcttgtataactggtcttccctgttcattctgcttttgagcataggtagacactccagttttggagttagacagttgtgacgtttccagaaaatagagatggattctgatgaagcaaaatgaggattgacaaggacataatctttctcaatggactccatggaatcagaaactggacatgtcatcacaaatcaactgtcaaacattgcaggtgaatagatctatacatgccaaacagaaaaagaggggaaaaagaaaaccttgtcgttgataagatgattgtggctcttgatcaatatatctttttctttcattactcacaatatttggcataagcccatgaacattgcttgatgtaccttcaccctcttttctttgcaaaattatattttcaagtccaataggaaattttgcacttgaatgtgcactgcacgagtccagaggaagaacagctggcaattctgacctcttcccaagggcagaagcattggacggctcaacagttaattctataggcagaacaaaaggagacttcctagcatcaagcatggacctacagaagatacaaaaaagaaagttattctgagtccctgatttacaggctaattaacggagagatccaagattaaaatggcgctcaaccccaatccaagaccaagacaaaatacaaaaagcatatcaaaatttcaaattacaagattaccttggctccctgaggaacttgtgattgaaaaactccttgaatgttagtcgctcaactgcaaattggtgtttcaatttatatgtatattacttttaagttatgcaagttgaagatgaaactaatgtaacactgccagttaaaaacttcgaaacatgcttgatctctgttgtaaactaaacaaatataccaataaccagatacacatttccactagcaacccccaatacctgggttttgccgtaataggcatctgcaaagatctacacagtgtggatgcaactcttccagagaaccagcaggaaacttcagctcagtagatgttatgatattctcgaaaagctgggcatcaatgaatcagaaaagcacaatgaaaaccgaattatgcaaacctcaaaatatgttctagtttttatacagaattatattttaacttcactgcaaacctgcaattgactgttgccatcaaatggtggccttccagtcaccaactgaaaaagaatcgccccaacactccataagtcagcctgcaaacaaaacaaaacaaaatgaaaaaggagaatataatagtcgtaaatatatcaataagtacagtcaaaactatcccaattactatcttgcatcacctttgcatcatatttttggttctttatgatctccggagccatgtataagggtgaaccacacaatgtgtcagccaaaccttgaggcataagggatctggaatttaatacaacaaaataacccaatgtgactaaaaatctttcaatagttcaaacaaaaatgactaggcaagagtaacagaagctttcaagattgtcttgccaaataaagctgtacacaatttttataatgctggattttccattgttaaaaaccattaagctataactcaactacacaaataaaacaatcaaattcatctgtccttgatacataatttgatccatgctcttaggtcttagcatgttctttatgcaaaaatttacagagataaatgggactaaaagaaagtactaaatagcttcttcctgaaaaataatacagtccttttgcgtaataacaatgagaaggcaacagacctggaacatcaaacagcctatcacatatatttttaccttgcaaaaccaaaatcccctatcttcagtagtggagtggagtcatgcgttgacaagagtaaagtctgcaagttaaacagaaaacaatgcggatatcactccaaaaacaaaatgtaaaaccacggttgactaatcaaccacagcctggaaacccgatgaccagaaactaaacaaactctcggatagttaatgacatagaatc

SEQ ID NO: 187095 - DNA, 1550 bp, Cannabis indica
aaaattacaaaaatacggtttgtgtagagttttcaacattttttaaagttttttagattttatttacatagaatataattttttggtgtatttttatgttgtactcttgttattttgttatttgtatattatttttatgtgttttattgttgttttgatgttttttttcttattactttcatatgatttttttgttatgtttttatagaatactgtaaaaaaaaaaaactttaaacttaaaaataatattttataaaaataagtgttttatataatttttcctattttaagcttatatattagagtaagaagaatgaatatttaggttttcttattttatttgtgtagtttatggttaattatggtttaatattttctattatatttggttcaagttatgatcgtaagcatggtcgggtcaagaatgtgtacatggttagacactttgataagactctaagtaaatatgtatgtatattcattaaaatatgacctagaaatatattttatttactacagcgagtataaaatattgagtaacggttttaagaacatctttaatagagtgataaaacagtgtagtaaaaaagtgacttttgaaaggttaaaagttaagagttaatttttagagtgagagaggaggatgccgtcgatcgttttggcatagatctagaagatcagctgatctagttgaaggagagttaaagaccgagcatgaagaagcggtggtggagcttggagaagcggtctttcactgctctctttccctgagcttagttttactaatctctgccttgtttattcctgacctttgcattgtcctggtgttttttgatcccgttttcttgctccctagttttgttttagtctttctttcttggcttgccccgtgtgtgtgttttggttccttccttttgtttcctgagtcttttgttctttcccctttctgcttggtgtgcttgtctgagggtgggattctttgtgattgcttggtgttggttgtaactctttgtcattcgaagtgtatatttttggtgtgggtggggtagttggtctttgtgtggtggcgcacatgttggtggaggcggcttatggcttgaagcaccctttgtttggtccgtggttgccttcggcttcttggttccttattgtgttctcgtctgatgggactcaaccaggtttggtcgctcgtggagagtcgtcggttgtttttgtaccaggtggagcggaggtccgtccgatgacctactcgtctcgagtttcgagaagttggaggaatcagttttgggtgcccttgggagcgtctgttggacggagttctaggtttactggaaatggtaatggggttggcttgaatttgaatgtggagggaaaggatactgagacttttcccattttagcgcctgcttccctggtggtggaaaagaccaatctgttggtcaatggtattctttatcctgatgggaattcttttgatgttgggtctatttttggtttggttgagttgggccttttggttgttgggccgaggggggtagagaaagtcatat

SEQ ID NO: 187096 - DNA, 4289 bp, Cannabis indica
acagggatgatattataactataacgaataccgctataaaaaaaatatttcaacatgtaatttcagatgtagaagttgactaaaaaattataataaaaggttgtaattaacacttctctaaatttttatatcatgtgacaaacaacaaaaaaaaacttgcgtgtcaagttaatgaccatgagttaacattaaattttgttgtcgatacctaaaaatgaaatttattttagagctcattacattacatacatgacttacatgtgctataataataataataataaaaataaaaataaacaataattgtttcatgcctggtattatgacaaaattggcacctctttgtttttcattaactcactcactgtacaagaataatatcagatttgggatgcaaatgcaatgcaaactatatcaatctaaattatgtactgcaaattttgctcaaaatcaaatggtaagccatccagccaatgcagcacaaccccaaatcatcaactaacaccacagattcattcctctgtggttggttgtagcctcaccatcaccatcatctttgttttcgtcttcatcttcattatctatggttagacaaattgcattttgtagctctgcaatcaagtcagatttgaaacatttcggtgattatcagcgaattcacgaattaatctcttcaaaattcttccccctttcccttgcatatgcccgtaagtgtaatcattttgaagtgcatctcgactcttgctctcgacataatctgaggctgcaccagccaaggcctcgaaccaaactggcactaaggtctctgcttccccttgctttaagtattcaacaggaagagcttgaacctgtgccaatgacaataaaactagttacagatacaaccagatataccgaagaaaatgaagaacaagtaatagttgagaaagagaggaagagagaccgctaagtttagccacccgtgcaatgattcccagctaagaataaccttccatgatgttctctcgcttaaactgcaaaacgctgctaactgttgcaagattgttgcgcatttgtgaacctatcaagagacagacaccgaaaagaattttatgatgaatgttttcaagcaatcaacactcgaggatatgttgtatttatttatttacccgagacattgctgaaacgccaagtaaagcgtataccacattagatacgagtccctcaccacaatgggaaatgacctgaatgactgtggcactaaacgatccatcggagatacaagtcatagaatccaatataataaagcctaaaccaacctccaagaaacctagacagcacaagagagagtgtgagagaaagaaaaattgtgctttttactgttttgttttgtttttgttttggttttcctaataatggtggttctccaccgccctattaattaatggagtttgttattttcctggtgagagatgcaagttttgtctcctattggtttatgggtgtctcattgatagatctaaattgcttcgatgaggacatcttgacctctctctttggtcgtcggatttgggggattaccagatctttattgaccctttattatgtgctccactgtaattgagcatgatcatgttatttctcttatttatgatttaaaggggattgtctcaatttctgatgaaagatcatcagtagttaatagttattgataggtagaatctatggtttggaaacttagtatactttacactttttttatacttgatcactgggcattggttggaaagaggaaaagcctaaacagatcagcaaacctagaaaaacacatcaaggcatgtactttcttaatctaaacatcgcgatagtataagattctaagataagcttacaagacaagtacgacattgctgctagtgcagctccacggtgcatagcggtgcagcatatggcagctttttgaaaggaaatttcgaggagagaaccagatgcagccagtacatcctgagacatcaacaaccaccgttatcattcaaaattggtatttttttccttttctttttaatcttaatccactgcaagcacttcaaatttattggagcacggaaaataacataggactgtaaaagaccttatgacagcagcgaacaaaggaggatgcgaaatttgtgtatgcctccactagatcaggctcttgatcgcatatgtatgaagagttgagagccactactgacgatgcgtgagtaaacctttcgaacgtagtgacaaataaaggtccatactcttctttgtgaccatattcctcaagaacaacagtggctgaaaagatgtaatgtaagcaactgaaattggagagagtaagaaaacatgatcatgaggctggctccaggccaattcataataaaagcctacctgttctgatgaagcattcgtgactttgaaatgatgtgtaatttgttgacaaacaatctagtacttcgggcagtattgttacgaagtgttgtcctgcacatgaatcaaacataaccgattattctgcataagtacaacagacacatgaagagcatagcatctgcatggttttttatcttctatacctgcggtttgaattgcttgtgaaagagctcgacaagctgcaacagctaaattaccattctccatgtgttcagacctgaaaagcttctgcaacattggccaaaaaactctgagtagggaaagtacggaatcatctgaagcaggaccacttggtaggcacgtagctaggtgactgaatacagttcccattctgtataagttaaacagcaagatttcaacctagatcagataactgatgcatagtggaaagtggaaacaaatttactaatttcaactctaaacttccgatgcaatcaatacaaatacattgtaatttaacagctctgaagattttaaggtataagccaaactttgctaactcaaattttagtgaaaacaagtactacgaaggcccgatatcttatgctcaagaaaattatgataaaaactaggggaaaagtattcgctaaaatcgcacctgtacaatcctctggcagcagaattcaaaatttgtgtgtaaatagctggatttgctctcaggcggtgggtattctcttcatcaacctgaaagagagaaaaccatggttaattaacaaagatcaatgagctcggcttgctagcaacttctgacacattctgaaaatattccacagctgtttgtaaacaaaaaagagtacgaattttcttcatctgttgatgaggaataatttttttttcccgataggtgagcatcgtattcaaatttgattgcattctagaccaagttctctccaatgatgggaaaagaattaaaaagggaatttcttgattctatcggatttagattcctaaagctataaattagaaagatggaatggaaaaaccaaggggttaacattagctacaacgctagaagcaacaaggcgatatagaagaaaaggcttacaagttttccgatagagtcaaagctagaagatagcaatcgagctaacatggtgctctttaaatctttattagcaatggaaccaagaatcaaacttatggcattgacaatttcttcctcgtcatccaaaggtagctgcctcttatccagaccctgagaaaatagcacttattacaaggcaagtacaaaaagaataattaccttaagaaaaaaatgcaagggtatgatatgaatactcaaaaccaatcaccccatgttccctttctttatgataaaataccaagaagacgaaatgtacctctcctatccatatcaaaatctccaaattagagggttcataaatcacggaagaagcatcttcacagactttacgtaaggcacatgcacaagaactcaaagaaagaggttctgacatccctgtggcaagaaataatctgtatgcaacaaatcagtatgaaaaagtcaaaattgaatgtcgacagcaaggtcaaatgcattgatagttactattaaactgattttatactttctgttcagtagctaaagcaagaaaaaggaagtacttacaataaggatctggtgtttacttgaaaagcaaatatacacttcgaataagagccaattacatctgcaagcgatctataaacctaaacgaaaataaacatttcaaagacatggaagaatgaagaagatagttgacttttaattacgaaagaacgaacaataaattcacagtaaatgaggaagaacggttaagatgttaacgtacaatgcacatgaagcccttaagttcatccgaggatctagtggacat

SEQ ID NO: 187097 - DNA, 3636 bp, Cannabis indica
cagaacccgccccattcaagtttatttagaaaatatcatcacccaacaaagcattctcatgagatgtttctatatcagaataaacctcattattatgaacagtaaagcccatataaacctcatcctctctaataagcccagtttgattatcaaaagccattcttcttcttttaagatcaagaaataatagcccatcatttgaatatctcacatttggtgccaatgatttctcagcctcattgaccacccctatttgtagggaatttacttttattcttgacattaaattctccccatgtaatcccccagtattattgtcaagattacctggctgaacacgagattcctgattatgtgggatcactatacgtggaccatcatccccagctggcactggaggtgaactttgaccaccgtgattactgctctcacctccgtctgttgaagaaccaggtctcatggccactcccgatttaggccattttgagccattggcatagtgtcgtcttcttggtagagctttaagttcaaggccatagcttttaacgatctggtcttttagaatgtgaaataatctttcacaaaatttctcaaagtgtccaagtacaccgcatatgaagcaaaatgtgggtaagtcctcatatttaaaggacagatagcatatcagaccccccctatatgtccaacttctttttctttttcaatggcacatccacttgaatctgaacccgaatcctgaaatagtcacgcaaaacacccaagaaattgtttgggtcaaatttgacaaaagtgccaatgtaattaccaacacctcttataattctttcggacataaagccaatttgcatattatgcaattgtacccaaagttcgagtttggtaaggggtacaagatgcaggttttctccttttttaacacgttcaaaaatcaaaggggctcgatcaaaagtccatggactggcttcaataacccttccgatatccacttcatggtaaaattagaatagaaagagggtagggtccaattccttcacatataggcctcttcccggctgccacaacacaaacattttattttgcacagcttgaaagtctattgatctattcgttaagaaacttccaaccaataaccatctatcatcaatttccgataatccatctgctcttgcataaaaaatgaggctcccctcatcgtcctcatctatcgagattgatgcatattgtttatccatgtacgattggtgcgaccaactgggctccatagcaaaaggagagacaaccagaaagaacccgatcaacaaaagaaaacacactcacacgaataaagctagaccactaactctcaaactcactcacataaacaaaaccaccaaacaaccatgtcacaagcaagactcacctctctagatctaccttaatttcatcttacaggcttatacggtgagcctaaccgtacctgtcatcgtgaaacttggggactactgtgcactctacacagcaaatcgtcattgccctggtgtgttattgaagacatcaataatgttgtgcggcaagaaaataagcgggggggggggggtcggtccttacccacagtggttgttacaagggtttcgagatgtacttcagcagtgtaatttggttgacatggagttacaaggctatgatttcacctgggagagaggcagaggtttgagttcttgggtagatattcgattggacagagtattggtgtcttcttcttggacccaagttttcccctcagctactcttactaatttagatttttctccttcgaatcactcccctctattcttggaacctatggtggtaaatgactttcaagcttgtcgccagttttattttaaaaatacctggttaaaggagcctttgtgcttcgaaattgttagggactgctggaataataatcaggcagcaacgtttaatgataaaattgacttgtgtgcttcgtcattggctcaatcggatagagagattactgaaactttcaatcatcgtatcaaataaagttacaaggcagagttgaagaggctgcataccagtcgggattttacctcagttcagaagtacaatgtgattaagaaacaactctttgaagtgttggatcaacgtgaaagcttttggaaacagcgggctaagtagttttggttgcacaagggagaccagaatagcaactacttccacaaagtagtcactagcaggaaaaggaacaaccaattacatcaattaaaagatgatcaaggggcttgggtttcatgggattttggcctacaattggttgtttcaaattattttcagggtttgtttatgactttgggtactagatgtgatgaggttgttgagtgtgtttcttcggtggttccgaattgggttaatgaggagttatgccaactggttagaaatgaacaagttaaaaaagcattgtttcaaatgcatcccgacaagagtccgagtccggatggaatgacactggccttttagcaaaattgctaggcaattgttggcagtgaggtaatttgatgtgttagtcagttttttgaacatgttgcctttgaacaaggatacagtgaagctatgtggtccttatcccgaagaagaaaaacctggagcatatgtcggaccttcgacctataaccttatgtaatgtgatgtataaaatcattactaaggttatggtaaatagaatgaaaccgtttatggacatttttgtctcggagaaccaaagtgctttcatacctgggaggctgatttcggataacatcttggtttcgtttgaaatacttcattattaagggaaaagaaagggtaatgagggttatatgacactaaaattggacatgagcaaagcctatgaccgtattgagtaacacttccttgaagctatgctccgtcagttgagttttgcagaagcttggattcaacttatattgaagtgtgctacctttgccagttatcgagttatgcatagaaactatgaagttggcccaatttttccctataaaggtatccgccaaggagatcctttatctccatacctctttatcttatgtactgaggctctttttatgttgcttaaaaaatatgaacaaagtggtttgattcatggttgtaaagtgacgaatggtgctccaagaatatttgaaggtttagttatttgtaagtatttttttttttaaattaatagtaatgaaaaatggggaaaaaagaagaaaaaaatatgaataggttgattgatatgagaaaaaagatattttaatgattgtttgtttatttttttaatgattgtttgtttatttttatcttaatgttaagtaaaaaataaaaaataaattagaattagaggatatttaggatactaaatgttttttaattgattaatcaattaatatttataagcctaatataaaatttaaaaaaatagagaattaaagagagaataaatagttctatttagagagactttagagtattatgatatctcttcatatctctcatttatataagtatatatatagatatattgattctaatgatttttttatatagttatatataaaatattattgaaaaattatttaaaaataactgaagtaataaaaaaatacatatagtttaata

SEQ ID NO: 187098 - DNA, 3765 bp, Cannabis indica
ttttttttttttctttttgggaggggagggaggagggctagactattatacaaaagaatcacacacataggtgaattaacaagtttttaggatttggcatgtaaaattgtagttattagtcaaagctcgatgagcggctccaccggccttgcaagtaatcctctaatgacacactttgatcaatgctgctgctgctcatggagactgagtcatcctccacatcaagcagtgcaaggtttagatgtgattgcagattacagcgtggaaaagcttcgtcctcgtccacaatgtcagcttccctcacatcaagaacttgtagccttgcccatttagttatctcagggtcaccttgaagaagttttacaacctgtgattatcatcaaaattatagaccattaataaagcttgtctagtttccaatagtgtactataaaatattaatagggagttgaaactcttcaacaattgaagtaaaagggtataacaataacatcattaaatgccaatgtgactttcaaagaggttaattattttgtactgaattctaaaattgggttcgcattgcatgtctggattcataacttttatgtgctattccatgcccaccaaacagctgacagcctaggctcattgaagaaatttaagagcaataagtgagctgacttacgagactcatttgaggcctagctcgaggagctcgcttaatgcaaagagtagctgctaaaaccattctttccaactggtcctgctcataactagtgcctaagcatggatctagtaactcagaaactttccccccataaagaattggcttagcctgcacaaaaaagtttattccccagttaaaaaagaaaattctttagaaaaacatacattaaaaggttcatttttttccttttcaagtagagagacatacccacatgactaggctctcctggccttttggatagtcactgtttataggctttcttcctgaaagaagctctaagagtacaaccccaaatgcatatacatcaatcttgttatttactttgccatacatgaagtattcaggtgcaaggtaactgcagcaaaatcaggtgtcattagcattaacttatacaaactaaaaagagattagacaataatacataatatagttgtgataataagatcagatttttcacatacccaaaagtccctgcaacatcagtacaagttatatgtgatgataaggttgaagcccacttagcaagtccaaaatcagagagctgaaaaagtccatgtagaaagcagatcagtacaaagtagtaactaatagtaatcaaacttcaaagatctcagtgtctttaacactggttacctgtggctcaaaatcatcagataacagtatattagaggatttaacatctctatggataacaggttgagcacaaccgctatgcaagtaatccaaagcctcagccacacccaaagcaaccttgaatctctcattccaaccaaatgcaaccacatctttcttcttccctataaattattattcatcacaagaaagaagatagttgataaatttggttattgtacttgtaaaattttcataaaaaagaaaaagacacataaacaaattgtatataccatgaagattctcttcaaggcttcctctagataagaaatcatagaccaagaggagattattgtcctcaaaagagaaccccataagggaaataatgttgttgtggtttaaagtattaatgatctctatttcaagcacaaactctttaattacatcttcagatggctttaagattttcacagctaattctttgccgtcgggaagggagcctctgtacacctgactgcttccacctcttccgatcagattttctagaattttgagaagaaaagaaatggtttttagaaccttacctgaaacaaaaactgtaatgaaaataaaaagtaagtcgtttttgaaacgaacctggcaagaaatttgatgttgctgataagagttcttgatacttgaacaatctgcatgttgacgagtacttctcatgaagaccctccaactcccggcggggtaaggttttggtactcggtgaagatttcgttgttgtcgtttctgaatccaccggaacaatcgctccactttcgctattaagattggaagaagactgatcttcactaggaccaaactcaccattagatgaaatttgccgagttgggagttgcattgcccactgaaccactgagatctgccgcaccataatcttttccggttcactccggtccggtaaggtggtgcatcgaagtaacggccagccgggtctagcttcgggcaattctcggatcactaaagagattgaattttctgcaggctctgctttatggacctgaactagagccaaagactcgtctttttctctctctttagtggtttggtcaaaagatttaggtgacaaagaagatatgggggtacagattgtacagctctttttttcaactgtgctctcgttgaagtccggaactttgcagtcactgcaatgatcatcatttactccttttggggtctcatttagtgtaagggacaacccgcccacaacatcagttcggtgttgatcttcttctttacctgcaaacaaaaaatttacccaattaagatttttccgacatacccaatttagtaatgtacgaaatgagttaactaaaccttttgggttaccagtttttcctgatgaactactttctcttttgaagacaattttcccgttgtttacagcgagaacaccacaatccttatccagttttttggcacaatacttggctacagaagtagttgaacggattgtatggtggtttcgagcagttcctaatataagtctactcgcacaataagaatcagcttctcgaactaaaattttcttcactgaagctcctctgcaaatcttcagtttaagatccacctgcaaaattttacaacggagaaaaataaataaacaaatgtatgtttattatgtaacccaacattaaaattttcagcttgttttgagtttggtatttctggaaaattaacttgacagaaacgacaaagaaaatatatctgatccaaatttactttgtcttcttacttacatcattgtctcatacaacaaaattaaaatggagcaaatgaatgaaatgaaaccaacataaaaaggtgctatataatattgtgtgagaaatcaacctgttttaagttgcagaaaccttcatatacagcaagaacagagtcgaaagctttgacaagcgaaagaagcgttgatttcccatctcgatccaaaatctctacaaaacattccacataccaaaacttaatcagtctccaaacaaaacccaattacccaaaacacccaaaaatccaatttctcttaccattttttccaagaacatgcaaagcaatcacacagtcaccaggctgagccactttgaccaaagcccatgtaagcaactctctactcggagagtctaactttatacccaccaacaccgtccggccaccggagctttcaacttctcgttctccaggaaaaccattctgcaacattctctgttattagtattattatttgtctttgttttttttcttcaaagtcgtttaatttataacataaagaatcaacttccagttattgggttgttttgtttttccatttgtggattcatttatgaggttaaatagtatatatattatataatttagtaaacgtatgaagtagcagagagagaggtgaggagagagagagagagaga

SEQ ID NO: 187099 - DNA, 3590 bp, Cannabis indica
aaccctgaaaatcaaacaccaaaatgtttttaactttaaactgtttctgaaaacaaaaatccattttttcaaacgacccgtctcagatataatcaataaacagaggaagaacaacaaaagatttaatttttataagaagaagaagaagagttagtaccggcagagaagcagagaataagaagaagaaaactaatgaacaaccccaataattgattttcttttgtttttcgtttttgtgtgtcttctgctttctgcgaacttggcttcgtatgggtttgtgttatctctccttctcccactcgccttcttcaaccttttcttctgtaacaatggatatctcacacatcaaaaccatttcaaaaaagcttcttttacaaaacaaagccctttttgttctttatcgagtttgagagagagagcaagatctccttaattacttttataacttaaaaaaaatcgttggctttgatgttctgagaaacccaaatcgaaaataagagatctccttttctttttgttttacaaaaaatttgctatatgattcaatggttagagagagaatttctggacagagagtacccaatgattgaggctttaagggatggagcgagtatattccacgtcagcaaaatttgctgtcagtgaattctggccgttgattagtggattgccagctaagcattatcgtgtatttgctgttttggagagttttttttcttttctttcagttttcttggtaatttccaaccaatccaccaactccacgtgtataacacaaacgtgtaaggaccacttccattgtttttttatttatgacaaattataaaaaatgtagtaaaatataaatggtaaataatacacaatcacttctttaaaaaaaaattaataagcataacaataatgtatcatccctaatgtattttactatgtttcaaaagaaaattttattttactaaaatgtcgtgaaatataaatggtaaataatgctttgtatatatttatgacaaattataaaggttttccctttaattagtaatttttctccatattaagggagcagatattatatatagtctgatagttagaacctacacgcaattcttagcaaccttcactgttataaatattttgttttaaatgttgctttgatatttgttcaacaagtacaatgagagtttttaaaaaaaacaatgatagattatatatgcgatacacatatatttttataacacatacaaaatacggcacgtgttttaaactattttcaaagactgtttctaaatggatataaatacatctttttcaagaataatatgtaaacacatacgtgttcatattaaccaaacatatttaaatcaaccttgacaaattatttgttttacgaaatgatttcgcattatttttcaattaaatgggatcaaattattatatctttactcaaattggttaattaattaattaacatttatgcaattagatagctatatatatttttgtcaaaaaagaagaagaaagttttaactatatataatacgtgttgtatacagaaagagcgtgtgaaaactatactagataattaattgttaaattttgtttaccaaaaaggaagaggaatataatcttgagctgcgatcccattaaaaatattaatttttagcattgacatgactaataacaaaaacgacaaagcatttttataacacctttaataattgggttttgatgtgttacctaatagtgcatattacgcaacctcgtctatactcgtagaccccacaaaaaccccattattttctacaccaccaccatatatatcatataaacccttgctggcgattcctttggaaacccaatatttcatgattaaaaccaaccaaaagaagaaaaaaaaatcagtcatagtcaaaattatgatgaacttcttctattatataataataaatatatttaaataaataatggaccaacaatacaatcgttgccaaacctctagctaattaacctaagagatgatataaatatataagtatatatattttttttatttctgttaaagtgaaattattgcacatatcggttatatgaaagtgatactactagccatattgctcacaaattaataaagacaaaacccaatatttatgaattgttattatcatctgcttgattatatcacgaaagaatataatatttataatattttatttatataaacattaattggtgccatctttttgttcatatgaaatgaatatggaaaacatgcatgtaataacaagttgacatggatggaacaatatatcatgctgcacgtgaagcacgaattcgatcatatataggattaggacatttatatataatgtacactatatttactttttggatagtacactttaattcaactatcatatatactcaatttaaagttttcctttgcatttttcaaattataattatatgaatcattttaactgatcgtgttcgataatttagtcaaggaaattaataataacaagaataaatattaattagtcattaataaatttgtatgaaaccatcgaattaatgtgacaaataattttgttatgtattaaagagaaaaaaaaaacacatcttctcttataaaaaaatgcagagacacagactcgctcacctcaaaatttgaaaatttgaaatttaaggatcaaatatataaaaaaaaaacgatccgtatattctagtttataattctctaactaaactaatttggaaatattagataatataggtcggctgtttaattttgagttatccatgttaattggctatctgagtacttaatatatttagttaataatcagtaggtcaactaaagccaagttttcttaattcatattaattcgataaaattgtagaaacgaacaacacctaaccaaaaaaaacgagcaacaagaagtctagaatgttcttaaaaatatatatatagaaatagtcttgtgggtgacgtagaataaattgtgacatggcaatataattataaaacttacgtggtgcacactaagcaaattaatcataatttactaagtgccatgatttcattatatattatatttatatacacttctttaatgtgtattattgatttcatatatgtaaaaaaggcatcgctctactgcttgatgaggactaattattaatcacttaatatataaacaaatgaaaaataacttacatattcattgatttagtaaataaattaaacttacatttttattttatttaattagtagtaataagttgaaaattttacttgtgctttacaataattaattaaattcagaaagaaaagctaatgattggtaagctataatagttgtgtcttgcgtgtgtgtgagaagggggttggatatattagagtgccaccacgactttttatataatataaattaaagatgtatatatatacctaccatacattattaattactgtatgctcttgtttttattgagattttgatgttaggctgtgtatgaagagcaaaacctttttaggatttgcttacaaccacaaacagacacactcatccttttaaggaacgactaataagttt

SEQ ID NO: 187100 - DNA, 3296 bp, Cannabis indica
tttttttttaaaggctcattagtttttcctatcatcattttatgaagaaaacgtatcgatatatattctattctatggtttacataaataccaacaatagtgaagccattaaataaggagatgttacaattataaataattcagtttcttttggttgttttattcatgttaatttagtttaacggaagaacaaaatgacattataagcatatataaatgcataatatagtcgtatacgaacatcgattccactacaaatgcccaaaaattaacacacatataataacaataaccaatgtacgcgtaacagtaagtgatatgaaaagccaatcttatagcaatttaattaccacgtacaaaaaattaattacaccagctcttaatcaccctaactctcatcaccacctatataaaatggcattcgtcaatataatacacaacacaataccatataacacagattatagttatagcttatttatatatatagtcaaacgacgtcgttcgatcacatgaatatgatgaatactactacacttatggctgtcgtcgttttactttcatggccagtgctgatcgacaacaacatagtcgaggccagaagagattttccggccacaatgacggcagcagtggcctccgttactggaaaagaaaagaacaattttcataacattagagaaagacttgagactagcggaggtctagtggagtgctggacggctctgctggagctgaagtcgtgctcgaatgagattgtgctcttttttctcaatggccagaccaatatcggacacgactgctgcagatctgtcgtcttcatcgctcgcaactgctggccagccatgcttacctccttagggtttactgtccaggaaggtgacattctccaaggctactgtgatgcaatagcagctgcaccgccgccacctgccgctgttccttcaccatcaccagctccttctgtcgttccgcctcttgctaaaaccaccttgttcgattagaatttgataatctttcttctataagcattgtatgcatgtgtacatgttcgtgtccttttcttctccacgtactgtttaaatatttagtaaactatatatatatatttatatatatatatatgtctatgagagagtggtagtcctcgatcgtcctctttgtgttatgttcttttggagtttggattttctattgtaagtttcttttttgttttcatcttgggttaatttttgtgtgctttttccgcttctatatttcttaatatgggagttgattaaatattaatggtagcttttgatgtttgttgatttgcgaatcgtgatatatacttaagtttactttcatagaaaaatgtagtgatgagttgcgttatttgtactttgtgtttttatcttttaagaagtaggttttctaatatatattaagaaaacctaccggagtaataagataaaaaaatctttaattatgttactaaacctaatgtgactctttggtatataagttacttgatacctccatgctatagcttcaataaaagtatacattgggtaagattttccttacaactaaacaaaatcatatttacaatgcagccccaaattccctatcccttatccatgtcccaatgccaatatatatcccaaccaattgtattaagaatgctcatttaatttgccacatataagcactattactttaccgaaaaaaaaaaattctgtccccaattacctattacattcttgtcccttcaataaatagttgtcatgtgtctttctctttgcctacttaaccgattcaattttcaagattaactatgttagttccatctcttcttctctctcctcataactaattattttctaattaatgagtatattcaaaacaaatacatattctatgacattttaatatattcctcagaaaaattatgatatattcgtataaataaagtttctatggtatatgcaaatgcagttttaataaaatttatttaaaatatttcatagcctatattcttcaatctctcttatatctacatatatacaatcctactagctgcattaaactatcataaaaagatagttttctttctttcatttatctgtcatgagtttgaccttaccactattgagtacaatactcctagtctctaccatgtaccttagtcaaaaagttacaaggaatgagattataccttcattacttttttccacagccacaaaatttgatgagaaaagagttcgtgaattcaataaaagaaaatggtgactatgaaacaacacaatttatttatgctaaaaacttcataatttaataatttaaaaatttaatgtctcaaaatgcaaagactcggtttaccactgtggcttttgaaaatgattgcctatatatagcataatattaaaaataattgctagtaaatcttttaaatgtggtagtagttgatatagcctgcaaaaatagtttataagttaataaaattaaaaataaacactatatataaataggtcatatggatatatataaataattacctacatgtggtgtaatagttcaaccatactcgttatctcattcatgtcttcataaccatcaaaattatacgtgtatggtataacctgcaattttaaatataattattattgaaataattatttaaaaataagtttgacaaacaaaacatagaataaatagcaaatagaccaaaatatagttacttctttgtgctggaataaaactatatttgctgatgaagatgacacattatcttgaaaaaaaattattagtagacaaaaaaggtataccaattctgctatggctttgatcatttgctttttctttatgaaaatcttacgataaaagcatgcacacttataacttatataggagaaagactatgacacagttaaaaattacaatatataaaactaagtaaatattaccttttgtgatggagaatcttcattgataatttttttcttactttttgctctctcaagtgcacctttaagtcttcgagatccaccatgagctttccttttagtcttgaaccctttaattttatcacccatttcattacttgttttgttttcaatgccattatatatggtagtcgatatctctttcccctgagctacatcacttgcatccaaatctataaaaatcttagtaaacgcagaaacaacaatattgtatgctttttcatcttcggcggcttttgttgcgagttgagtttgcattctacaaatttctttataacattttgccatatttgcttttgcatcctcagtaga

SEQ ID NO: 187101 - DNA, 5300 bp, Cannabis indica
ttttattttttttttgaataactgagagactaataattaaaaataaaagtaaagaaaaacatagacaaaacataatattacagcttacatttcgtggccattcacattaattctttgctcgattgcagattcttacaaatgcatgaagttcaatatcaaatacaaaaagaaaaaaaaaaaaactaaaaacatatatgtaaataaacaaaaaattgcccaaaaaaaatattggatgaatgaatagagcgctagaaacgctgtgacaaataacaaaaaaaaaaaaactaaaaaaaagaagaagaaacttgcagttactttctgccaaacttggtacactctacatggctcaaattctcccggtaagttgatacattccttcccagcatggaaaacagagtagccagcagcagcagcagcagcagcagcacgtcatatcaatccaattgcattgtattctcctttaactcatacagctatagttatggctgccaacatatcttctcatctcttccacttagcttaatcaactctcttggatactaggcaattcggtaacagtttacaagtgttaaccagacgacaaaaaaagaattgtacacgtccagaatggtgtcagggcctactaaaggttgaacccaattattttctcaggaatggcttttggcaaacaagtagcctttggtcactgccattctgaagatcgatcacccttgcctcccatcggatttgcgcggcaagcgtgcgtgccatctctatcgttccaaccttatcagaaagtacaacccatccctggagcaaatcaaaactcatgctattattatatctatcaataatgtagcaagctattaaatcagagcaacagcaaaatatcctaggagattgtccaatccgaacaacatgaaatgtatgttcagatctcgagaaacgttccagcctcaccagctatatacatataaattaaatatacaagtacttgcctcagggcgcaaaatacgatccatctccaaaagtaagtccctcatggtgcacctctctgaagacatatgtgaaagtagcccacttgcatgaagcatatcgtatgttcggggatatgtagggaaaggatcacacctacacaacaaaatatgcattaaatctaagagactaacatcaagctatgtaccacaactagtaagcatccatttatttgaccaacatctttagaagaaaacattggagtatagaagttttgtaaaaatattcacaaacaaaaaataccaatttcaaaatggcaactttgaaatggagacatttaaaatgacctaaattttgtcaagtgtattggtgccaaaagctggttccatctcatgaaaagttttatgatatgacgcaggcccatcaaaacaaatccttgatgagtaccattaatttacaagtcacactaaagaaactacgaccaaaacttaccaatcatgcaacacaccggcaaaaccttgttctaaaatgagaggaagtgtattttgagctctgactggcacaacattcataacccacactgatttcctttcctctaaaaatgcagaatttaaacctccataatgagcattcatatccatcacattgcgtatcatgttaaatggaggtaaagggtcttcatctcccggtctctttgggtgatctgagaaaatcaagggtgtaagcaaagaccaataattttttagagctgttctccagacctgggaatcctcaaagaaatcatcgggctgaactcctgaaaggacaaaagattgtcactttataaaataggtaaacttaagaagtccaatcaaaaaattgttgtaacgacacttaccatgaacttcaagctcagtggagctcaattgggaactagaagacctgttctgaattggaatccaccgtttgatggaggttccactaatacatgatacaaggggtcgataataagacaaagtctcatggccttctttacaaagtggtatagcaccctgcttgctacaataaataaataaaaaaaattatataaataagaaattactaagattctgcagataattcagcaaaagagaaatgtaaatagagtactgcaggaaattgaaaagataatgcgattagaaaaaatattaagagatagacttccccgggaagaaaaaaagaatatcctcaccgattcatatagcaattagcatcggaagttttctgccaaataaaagtttcatcttgctgagctagaaggatccaacagatatcctcggtcaattcttctattggtgttaacatgtttcttttcttggtactagatgaacttccatatggcttgcttgtaggcgatgttaaaacaaagtagccacctggcttgagtactcggtcaacttctagaagtaacatcccatctgattcatgaattactaacagtaagttcatgcaggctattattggaagaaagaagactgaaccattacatttaataagtcaaaaatataacttgattttttcctaaaaaattgaagaagaagaagaaggcagaacccccttggctaccattacaacaaccaccttttaatgcatgctcataaaacatttcccaaaggaaagagaggaagaaactcatatgaaattaaatttcaaatattttgaatacttttatgacacccatctaatatgattacatttcataaagataatccaagaatcatattgttgtttggtaccattagaaggcactgtcctgaaactaaaatgcatgattactaatcaagcaaaacaacaacttcagaacttcacatacacattcgcaccctaacaaatagtatttgtaggaaatcaactttttatcattttgataaaaatctagtgaccataattttattttgaagtgtttacaaaccataaatgctaccatttaattattcctagaattgctgatgcaaaagaaaatgcctagaattgccgtcgttagattaaatcaaaggataaaattgatttacacatatatatataaaaaaaaaaaaactccagtaacggttcacatattaaacatacttttgtaattgtagcctctccaaaaagaaaacctgccaatatcttaagaaattacctttttggtcccaaagaataccacactgagcgcaatgaaccatatcaaatgacaatgatggatatggaagctgtctagcaatgaagttgccaatcattgctgggagacctctctctaaggccaactgaacttggcttccagttgcctcatatgccgcaatgcaaacaggcattactttcagagacagtaaatgagctccaaagctaccaaaaccacaaccaatatctagtacagtacgcacctgtaattttagaagattcaatgtaaatctagtgctctctatttattataataaatataaacacacatatatccacatcagaatatgtatattaaattagtaaaaacatgtgatgtatagttaacttaagcagcatgacagcttttatttggatgcagaccacttagattgaaatggacaagtaactgataaactctatctgaaacccataatcacttctgcatgatacaaatatgagttacaaagtaacaacaaaattcagcgatcttgtatgatacaaatatgacttacaccagcttggataaactcataatcacttcctaatcctatcatttctgcaatttgacgagaataatcctttacaccatcaaagatcaaaccatcctctgaatgaaacgcaatttggttctcttccagcaacatcaacctggacaatttttctcaagttagacaacaagtttagcacatttctcaagaaactaaatctacatacatgattaaaaggagataccagaattacaaactcctacacttttcaatgtaataatttaccttttggtcatgcttccagatgaaagaaactggtctttggttatcttcacattcccactccatatcacatccctaccagccggccatctcagaggaatctgtagtccttgggagacgaatcagacattgctctccttcctttgataattcacaatgccgatcaaactcctctccatctttgtacccggccaacaaatttgctgaaacattataacaaggcacattattttctctttctttaccacaaaggtctatctctctttggcgagtaggcgccaaaaagagagacctcagctccagatagtcaactgctgcctgctccttgagccttctatagtttatataaatgtcaggaaccgcaataggagttgcagaatcaaaggcacccgaagaagatgatcctaacactgcaattagcgcaagaactgaaaccaggcacaatagtaaccagctcagaggcggtctaggacccagaatgacagatactttgttgaaccagggacttctcatatccaaatcgatcgtccaatccagtctcaaaatcaaatttcagcaaaaacgccagtaaatctccgagaacagagaaaaacacaaccaatcattacacaaatacgtctgtgtatgttaccatggatctcaacaactcctacaagcatcgaaacagtacacacttccttccaaacaacatgtgcagatcttcttccttcaattttaacattaaactcacagtttcatatatatacccatcagatacataacaagaaacacaaagcttagatgacaatgtacaatctttagtaccgaattatggatcagcaatcccaagaaaacaaaacagcacggaatacttcgtcagagtaacgcttcattcaaccgattgagcagaatctctggctgtcaaaatctagaaacgacaatctccaaaaaagaaaaggtaaccaaccaacaccaacctgtaaaaaagtccaagatccaccaatcagtgaagttgccaagaaaacctgcaacaatgaatataatctccagattctacatataaagatcccaaaattcacaatgcacgtcatcattattcaaattttacaacactaagaacccagatcttaaaccaaaaactaaaacaagaacaacacaaaagaatacttctatatgcagatccaatttatgaaaaccaatcacaatgaaacaaaaagctcagaaacacagaaacaaaacttacagagaagaagataactctagggtttgtaggagcgaaaccacatttgttatggagtgagagattcaaagaactgatgagtaggaagaagaagaagaaagagaggagaatgaaaatgatttttggagtgaaattgaaatccaaatttatcggattctcgtttctgttgtgtctctgctgctttgttgtaatataat

SEQ ID NO: 187102 - DNA, 1380 bp, Cannabis indica
gtaattgaaaaatatagattccatgagaagggaggacacatgcagtacagtatataagatcatgaaaaattgtttagaaagccatgcaggtgtgcttaaaattatcctatctgtcagcaccagtgtatatttttttttcttttatttgcaaagcaaagcacttatttgcatgtgtttgtgtgcacgtccatctctgaactctatctgattctcagaccttaggacacttaaatacaggcatatatactaactacctaatttctagttgtctgatacttaaaacaccatttatcttcaaacacttggcatccaaaccaaattggatgtatcccacataaaaatcaactgcctttgtggaaaaagccaattgggtgtaaatttgacttttttttttttaggatcaacttccatatctagcctcaatcatatccaacagaaagttttcacaatcaaactatatacatttagcacaagagcatatttaaataatcaacccccccaattacctaaagtggatataagaaataagtactttgaagtttcatgatgtacatttctagctaagcaagtagaccttttctcttagttaagtggaacttaacttataatataaaatattaatacaaccctgaaatttgttaagaaaagattaaaagaggagccgcagtgaaaggttggattgctttaggctctcaagtgagaataaacagtaaaaaaaaatgtctttgtttaagaaacacaaagcttaaggtcagtaaaacatagacaagttatgtagtattcacatgatcatcagacgaatcaactttaattaatcaaagtgttagtttagtcacgttagattagaatactatatcgagtaaaataatagttacaaaccccttattaataagtaataagtcaacaattagttcttgattttattttgagtaaatatgtgggccacatgcactgatgcaccatcgctttgtgccaagatcagattgtgaaccatttctaccatgttgagtaacagaggaaattaaaattaataacacataattttaatcagagaactgttacaaaacaagttactaattgtcaattgatatagaagagaagaagaaaacaaaagggtggcttttaaactagaagcctcaaatctaaagatagagaaatttaagaatgttttctcaaaattactcaagttcaacaaagtgtcatagagtctatacaaggttgatcacactggacaaggtaatcctttacgagcacgtacaagaaagaatcccaaagtaaaattttcagtgaaagattaatgatttcattgaaccatgcagcaagcctggtttagtaatacatttgttcaattccttcacattgttgttcagcaaaccataa

SEQ ID NO: 187103 - DNA, 2222 bp, Cannabis indica
aaattcagctagtacaatagtttagtataaatggggtagccaccatcaacaacttcctctaaagctattgtcaccaaccaatgcagaaaatatcattgttcatttgaccatatcctcccttattatatatgttttttcttgaaagagccttattatatatgtttaatatatattttcagacattaatgtgcattgaaattgactaaagttaatatgaagattaaacaagcaattacctgaataactattttgaagagaaaaatgctaaaagacactaagtaattcctcacttttttatgtgtcaaaatcactatgtgtccaactaagtatctggtctcatataattaaatgtaataacttttataaagcattgctaaccaattacgatacatgtcttaaaagtgctaagcactactttgaagatggtgaggggtggtagacaattaatttgatgccatttgcatttataatgtggttaaaaattatttattatgcctataacttgagctgtacccatattcagatgtatttggtagttgatactagcattgatcaacataggaaatgaaaccatttttatcaagagatgaaagattcatgtcaaaagttactagaaagaaaagccatacaagagaagcagaagaaacccttctcaatatgtatattaatggcatcaactccaatgagacaatgattatcaaagcccatacatctcagaattttcattattttcaaactgaaccatgcgaaatctttaaatcgcaccaaatgagatgaggaaaaacccgaaaccctatcaaaatgtattaactactctccaaccaaactcatagcaagagctctaaaaaaaattgttgttgcagcagcaacaatacttagtaggtagccgctaccaacgccatgtgctcaataaggtccaaaacacggttgctgttagggaaaaaggaaaaacatgatttgtcaccctctacagaactcgcagatttgagaaaactacatagcacaaggaaattggaacttggtaatgtgaaaagatctttacctgtatccccattcgttatcgtaccatgacacaagcttcatgaaggatgtgctaagccctattccagccttggcatcgaaaatacttgacctgcagtgaagacatgtcaaagtaagatgaatattcataaaagacactttcagcttctgttgagatgaattgacaagggctaacgatgcaatagggtgagagtttataggtaaagacccacaaattcaacggtgaagaaaacaaatattttgtatttgaaacaaatacagcataactacggttatttttcccaatctaatttctttagttaaatggtatttccagggcactacactgccaatatgctggtagagaaattataccttgtgtcaccaacgaaatcattggagacaacatcttcatctgtgtacccaagaatgcctttaagtggtccttctgatgcatacctatataggcaatcacagaacaaagaattaaaaacatgaaaattacacagacgagcatgagaggaatagtacaatggttagatacttcacaaagaatgcaagaacatacttaatggctgccttgacatcttcataagaagcactcttctcaagtcgacaagttaagtccaccactgagacattaggagttggaacacggaaggccattccagtaagctttccattcagttctgggagaaccttaccaacagcctacagttccaaaagcataataataacaataatcaaacacgataataaaaccagcattgtttttagaatttcctatgaattagttactgttactacctttgctgcaccagtagaactaggaataatattttgtccagctccacggcctcctctccaatccttcattgatgggccatcaacggtcttctgtgttgctgaatattggaaacaatagttaagtaactagcttgtacaccactttctcctattttattgaaaaaaagaaacagtgaaaaacaaacctgtagttgcatgaaccgttgtcattaaaccttcaagaataccaaattcctcatgaaccacctaggtaaagcattaagagaattgctcagagaataaccaaaaacatttaagctaacaccaaaagcacaagggtatttaaccagatgcattcataaattcaaaatacagtttgaaaaatttcattaatcatatttcaaaaatgacaactc

SEQ ID NO: 187104 - DNA, 10678 bp, Cannabis indica
aaactcagagaagctttaaatttcatgaaaaatcataaatataaaaaattacagcaagcaaaattactgctagtctgctaatgatgaaggctctgaggataataagactccttgaatctatgtcaattttgttggttagagaaatacgaactcataaaatattgatttaactatctcattggttctctagcactggaaaaatacatactaaaattaaaataagaataaatcagcacaaatactgaacctgctcatggttgataagagagcgagatgaaggaggccgagagaagccactcagttgagctattgcagcagcaagagcatctgttccttgttcatcaataagtttttgtgcagttggggtgaaatacttgatcgattcaggatgaactccactaagagtggcaaccacatggtcagcagatgaccccaaaacctcatcaatagatggtgggctgacaaactcaaatttgcacccaacatcacgctcaagggatcttattgttctcctttggttactagtaaacatcaaaatagcagaaccttcttttcctgctcgtccagtacgaccagatcgatgcacaaaggtttctggatcattgggaagttcatagtggataacctaaggaaacaagtaaagaaggaatttataataagcaaaaagaacaatctagatttctgtgttccacatgctacataaagaatatatagagaaaataaatgttaaagctaatgatccagcaaattcttattaaaaaaaaagtccaacgtatagttattgttatctatctgctatactctactgtctaattagttagattgcatatttcttttcaaatttactcatactgaatcaattgaaaaaaaaaatgaatagagaaacacagggtagcaaaggatctatttaagtgagaaattatgataacaatatgataccatccaaaagtatggtacataccaaatcgacattaggaatatcaagtcctcgagatgcaacatcagtggctacaagaacagtgaatttcccttgccggaaaccgtttaatgttctctctctctgatgctgtgatatatctccatgtaatgcctcagaggctatactatttgttaatgacattgagacttcatcagcatctcttttggtttgtgtaaagacaatggtcttcccaccttttgcatacacctgaaaaataaagttttcacagttaagaaatactggtcctttctaattgtaaacttaactaacaatatacattattcagttatacaccggaagaatgacacagttctataggggaggagataacagcagcaaggaagtcaaactacaacagcataccatagtagtttcatttcattattcaacaggagtaaaaaacaattctttaaaaatattataagcaaaagcaagaaaacggaagccaatactcacagtaataagatcgccaagaatggtccgctttgatgttgcagttgttgataaggcataaagtttgattccctctgcaagcttttcatcttgctcaccaaccttgaagaaaagataaaaaagaacatcagtaacaactttctaaattaatattccatactaacataaggtgtagcttatcaatgatatttgataatccacaaggaatggaataatgatattttgaatttaacttaagaccaaagacaaaaagtaccaaatcaatagtcattggattgtccaaatgcttccgcgatagctttttcacccaaccaggcatggttgcagaaaaaagcatactctgtctctgagttggaagctgttccaagattaattccacatcctcctcaaacccaaccgcaagcatttgatcagcttcatcaagaaccaaaaactgaacttctcccaatttgaggcttttaccatttatcagatcaataattctaccgggggttccaacaactacatcgactccacgggaaagagcactttgttgcgtaacataagacacaccaccataaacacagacagtacttaaatgagttgctgattctttgatctccttttccacttgttttgccaattcacgggttggtgcaagaaccaaaactctaggtagacgaccactccgcctgtgaaaagtatacagtaagttaagaaaacatttaaacaaattttaaaggaagccgagtctaataaatttggcataatttgtctacctctgagaacctctttgttgttcatcatcttcggtgaggcgtttaattatagggattccgaaagctagagtcttcccagttccagtctttgcacgggcaatgatgtctcgaccctctaatgctgggactagcacggccctctacattgttgcagggaacagtaatgtgtgaatcattaataagtattacttcacagaaaagcgaactttgaatggaaaataagtgaaatatacaaaacaataacaacgaataaatgtaagttcagagttcaatgagaagtaaatatattatagtcacattgtgtttgtgtagctatataacatatttttccagcgaatgagtagctcaatttaatcatctaaacataataatcaaacttgagtcgagcttgagctagctaaattggagttaaaacgttaagaaaaacagctgaatttccagtaggcgcttatcaaaaagtatatactatgtatttgtatgtatatataatataaatagataaacagctaaaatttaattaagataaatttgtaaaagctaaagaaatgaataaatggtgaagaattgaacctgaataggaaaaaggctagtaatcccacgtctctccaaggtctcaacaaggcgagtaggcaaacccaacttggccacagcgagctcatctccatcgactgaatcagaacccgcctcaccttcagactcatactcatcctcgtcactaacatccagagaatcctcctcaaagtcaccaagccctttgaaagcctcttcactgagtaccgaattgggtgtagcaatggcagaagcaaccaagctaacacccagtcgagacccacctttcttgctataagctctcaaagcactaccaaagtgagacttatcctgaaatggcaaagaagtagtagtagcagtagtagtaatagtagtagaagaggaagaagccgttgaagcagttgaagtacaagtcgagactctcctgtaagactctactagagtgggtgccgagtacatagaagagacaccgataatagaagccatattggaagagctttgagtttgaagaccaaaatggtggatgaaagttgtggaagaagaaagaagaggcgttttttgattgggggttttggagagggataaggtaaaaatatgcagagggagaggggataaggcccttgagtttgagatactaaaaatgaatggccttgtaaacctccacctagtctcctccctcactacatttttcgctttatatactactgatatttcttcttcttcttcttcttatcgggtaccctccatttcctaaccgggtcgacccggctgcttgaatttgtttttattattattattttttcttccttaaaggagggatattttcttacacaaaccttgtggataattttttcctttttcatttttgtttgcaattttaagaaaaaaattatattagaatgtttactactacaacattttacttctttttcttttcgaacaatgactacaacattttattttgagcatggagaaataattattattgttcatttttccaaaagttcacacataaaaaatatgtacaaatagtagtatagtgataaattagcataatgtatcaatatttttagaaaaagtattgatattagatattaatggtatttaacattattttgagatggtgctttataaataattaatagttttctataatatttattaaattaaaatattcactgagaaagattattaatcatgttagaatctaaagttagataattgtgagttatatgagttagttaatagtgttagggagagttagttacaactaatttaccattatttattgtaatttgaactatatatagggacacggttttgttccgtgatatactttcacggaatgtattccgtggtatattagatgagtctcaggatacattagataggtcttcaggtacgttattatttttttaaccctaattacccctagatcaacgccagccctcagatcaaataactcccccatttaatggctgtcgtacatcacaaaatacattccgtgaaagtacatcacgtgacaaaatcatgtccctatatatataactctttctatgtaattctaagttattttattgagaatcacattttcctctttttttactctctcaactaacatggtaccatagtagaatttttcctaaatcttaatcgttttcttgctttccttcttgtgctagctcatggagaaggaattcaaactcaaatttcttctgaaacttcaaatcgctttgttgctttagatcaaaataatcaaccaactccaaatgatgttcgaagtccttatcatctctataatggtgattatcctggagcaagttcagttcttaaagctttatctggatgtgaaaattacaggtcatggagaagagctacaacagttgcactaattgcttgcaaaaattaccagcttctgatgaagacaatgaagctaacgacatgagaaatcgatgtaataatcttgtgatttcgtggatattacatgttgtatatggagacatagcggagagcatcgtgtatttggaagatgctacagcaattcggcctgatcttctagaacgttttcatcaaaagaacgcacctcgtgtctttgaattaattcacaataaacatgctcttgtacgaggatctaacaatgttattacatatttcactcaactcaaatcattgtgggacttgattcaaaaatataggcctcagccaatgtgcaattgtggagccatgaagataatccaagaataccaagatgaagatcgtgttcttgagttcttggtatggctgaatgagtcttacaatggtgtcagatatcagattttgatgcaagattctctcccaacatcaacaaagtatatgcttcacttattcaagaagagagacagaggtgtttgacaatttctcccactaaagttgacaagtctacttcagattctagtcaatttactagaagtgttcaacttaataattttaaaatggtatacacccactgcggcatgacaagtcgcacaatgtctaaatgctgtaaagtgcatcttgtatggaaaatttcccaatagaggtgcttcttcatctaggaacaactatcataattcttctggacagaataatggaaatcaaccttgttagaatatatgacctgaaatgtaaaacctgtttattaagtgtaactgttttgtgatagagttgtaagcacaattgtcataattgtagggcagttatgacagttagtactcttatatgtttagttagctatatttatatacactagactctaattcatttgtacttttaagtaagtataatactcagtctgtagggtattacttaactcaataaaagagagaaaattcagagcttgtatgtgtgtggttgtgcatttggttatgtgggatattctttagtgtgttctttggagatcccttgttgtgtgagatcataggctattcctacaaccctgatactcatggaaaaccatcaactgctaacatctcagaagtgatgaataataagaatggggataccttggtagtagatcaagcttttgtgaccagtttcactccccctaaattgaaactaagcctgtttcaaaactatggttttatttgtttctagtcaaaatgagcatgcctctctttagcaagctcatggaatccctgaatgagataatgcaatggatatagagatcacttaactagaacagattcagacctgggctgtggtaacttcactataccatcaacatgttattagttgcagatgagtctataaaataaaatacaatgttgatggtttgatagagaggtacaaagccaagcttggagctaaggggtacaatcaagaggaaggtttggattagtcagatacagttgctccagttaccaaactagtcacaatttagctagtgattgctttagctgcaattcatggttagtatttgcaccagttagaagttaacaatgctttcttacatggagacctccatgaggatgtatatacaactatacatctagggtatagtcttaagagggagactatgccaccaaatgcagcatgtaagctcaacatgttcctatatggactgaaacaagcttccagacagtggattgaaaaattctctactgccctagttgatgaaggcttcaagcactcaactactgaccattccctcttcatgaagcatttcaaaacatgtttcctcatcttactaatctatattgatgtgtcattccggttagcaaaaatttaatagagttggaagctcttatagttaaactaaacacaagattcaagctcaagaatatgggataattgaagtatttccttggtcttgaaatatccagatcttgataaggtattttcatgtctcaaagaccctatgcccttcaatcacttgaagattttggttattttggaagcaaatcagttagtatcccattgatgctaatataaaactttgtcaagatgaaaaagataaacctacagattcaatggtgtatagaaagattgtgggtaagctgcaatactttactaacaagacttgatatttcataatcagtgaacaaactgagtcaatttttagcctctccacagaccaagcatcttcatgcagcacagagagttttgcaatacaaaaagtcttttccaagataggggatatttttatttttgaacacctatactgattcagattagggagcctgcaatgaaaccataagatcaataacgagaaactgcattttcttaagccattccttgctctcttggaagagcaaaaagcaacatatagtgtcaaggtcttcagctgaggctgagtaccgagcaatagctaacactacatgtgagttagtttggttgctttctttgttcaaagaattaaaaattgaacacaaagggcctgtaataatgtattgtgactataagtcagcacaacaacacatagcggtcaatccagtatttcatgaaataactaaacacattgagattggttgtcgcttgattcgtgaaaatgtgcaacaaagtgttatcaaaacaactcatgtttcttcaaaagatcaattagctgacattctaaaggctttgtttctaaactagtttaaagctcttaaagataagattggaattcaaatttattcgaatgagaatcatattttcctctcttctactctctctcaactaacaaatcaacattttaacatatttactacttaaaataagaatataattgagttgtaataaatacaattaactactcataataagtgtggttaaaacttaaaagactacgtatgtttgcgaattgtgttaagaaaaaaaaagtgtctctagaatctcttcttagaataaatctaccattgacaaaaataaaaaatcattttaatacataatacacgtgcatgtctgtgacttgtcggatcatttaatttgtaattttttcttaaagaaatacacttcttttggctaacttcaaaagaaatatacttgacactagactcaaataatatataaatatatatatatatatatatatatataaaaatcattttaaataaacaatgagattacaggagaaaattccaatatcttggttcgcatttggatcttactacattggataaatacagcgggacaggaagccactttgttggctgccataccagtaaagcaatttcttgtgctttacgtttgccctggcccttagaagccctactgtcctccacaagtctaaaaagtcagtgttggacttagaaacctcctcgcttgctcggacagtctgatgcgcggtgcccagattgtccgcagttgaaacaagaacctccaaaatccctgtattcaagttcatatctagtcagtaacacaatgagtaattggataaagttataatacaaattgctgaaagagaatgtatatagcatacctgtctcctcctcctccccttgatggagacctacttgatggtctccccccgattagccaatcatccccgctgctccttgagttaccagaccaactattgttgggctttctcatacttcgaccactactcttgaatgaatcaccatcgttgtcagaactatcccagctcctgctgcttcgagcacctcccccacgtcccccataactacgtcccctgcctcgtccaccagaacctcgtccactacttcgaccactactcctgcttgaataatcattgttatcagaaccgccccaactcctagaggttcggaaaccacccccacgtgccccgtagctattcccctcaccccgtccactactaaaactagcaactgcgcggtcaatagatgacaatgactctaatgattccgcaatctcatccttagttggtggggtaacaaactcaaatttgcacccaacatcacgctcaaaagacatgactgttctcctctggttaccagtaaacatcaaaatcgcagaaccttcttttcctgcccgtccagtacgaccagatcgatgcacaaagatttctggatcattgggaagttcatagtggataacctaaggaaaaaagtaaagaacgaattttcaatcagcagaaataacaatctaaatttctgctctttacaggatacaataaagagcatgcagagaaaaaaaaatgttgaagctaatgattgaaacataaactgaagttgaaaaaattgaaggtatagtagtactaaaagatttcacacataataagaattgataattcagtacaaaaaatcactttacagcttgctcaaaatgaattaatagcatacgtatacattggcttagaaaaactgaaattgagaaacagagtagcaggatatggtgataattcaaagaccgataaagggtataggtaattaccaaatcaacattaggaacatcaagtcctcgggctgcaacatcagtggctacaagcacattaaatctcccttgccggaacgcacttaaagttctctctctctgatactgggatatacctccatgcaatgcctcagaggctatgttatttgataataacattgagacttcactagcatctcttttggttcgagtgaaaacaatggtcttcccaccatttgcataaacctgaaacataaagttttcaaagctaagatataccgctcctttatagctttgaaagtaagctgacattatacatattacagtacagaaacaatccacaaattccagaagaatgatgcattttttagaagaaaggaaagaacttttttcaggttgacattttaacaatattcttgataaaagttgtaagcgaaaaacatatcaaataagggcagccaaaactcacatttataagatgaccaagaatgggctgttttgaagatgcattggctgatacggcataaagtttgattccctctgcaagtttttcctctttgtcaccaaccttgaagaaagggaaaaacaaaaaatgattaacaacagcattcaaaatttatattccttgctaaaataagatgtagcttatcaaaggtatttgataatccacagaacaacaatgaaaactttgaatttaacttcagagcaaataaaaaaggtaccagatcaatagtcaaaggattgtctagatgctttcgtgctagctttttcacccaaccaggcatggttgcagaaaagagcatactctgtctctgagctggaagctgttccaagattaattccacatcctcctcaaatccaacagcaagcatttgatcagcttcatcaagaaccataaattgaacttctcctaatttcaggcttttaccatttatcagatcaataattcgaccaggagttccaacaactacatcgactccacgtgaaagagcattttgctgtgcactataaggcacacctccataaacacagacagtacttaaatgagttgctgattctttgatctccttttctacttgccttgccaactcacgggttggtgcaagaaccaaaactctaggaagacgaccactccgcctatgaaatatataaagaaacttaagaaatccccaatacagattttaaaggaaaatgagcttataataactttgacataattcttctacctctgagaacctcgctgctcttcatcatcttcagtgaggcgtttaattataggaattccaaaagctaaagtctttccagttccagtctttgcgcgggcaatgatgtctcgaccctctaatgccgggactagtacggctctctacattgttgcagtaatgtatgaatcatcagtgacttaacaaaataactaacacttcacataaaagtaaggctttcaatgaaaaatcagggataactgtgagtacagggttcgatgagatgtaaaaaacgtcatacatatttatttatgcagagagagagagacagcttgtgtagctttataactaaatttcatcacataaccacaataattaagagttttcgcgtttggtaacacttttatttt

SEQ ID NO: 187105 - DNA, 1958 bp, Cannabis indica
aaagaaacctaccttagcccattccaaaatgccattgagatcattagaatcatcttggccagagaaagatgcctcttctgtctcagtatcatcaacatcactccgaaaattcctgtcctcgcaaggagaaccctgaaaactgcataatacagttatagatatccttgttacatacaactgaccatgtcccccttcactcacccccattctaaaccgaagagagaaagagatggaggccataggtggaggggggagaagaaagaaagggagataaaaagaacatgctacaaaaaaaatcaatcaccatcacataatgtacggaaaagtgtatttgaaagagataaaagatgcaaggacttatttacctgggtgaagattcagagctttcatattgataatagcgcaggagaggcagaacagcatttgggaaacggctttccactgcttgcttatttaatgcaataatatcaacatagtcatcacaatcttcaccatttgcaccattagattctcttttggctgtaaccaacttggtttcagattcaacagaaacaacattatccttaatctttttcttcaacaagtccatatcattgtcaagtgtctgacaatctaggtgactcccatcatttgtaactgctccaggttcaaaatctttgcattgggaatgctcagctgatccattgaacacatcctctgcagctctatcgtctactgagacactgtcagaagtttcttctgtactttcatctatattttcatccttgctatagtcctctggtgattcaaaatctaaaccaccaagaccttttgtcagtcgttctagcctttcttctgtgaagatgctgtaggataatcgagataaaagtcgaatgagtaaatgcatgaatgaaaaacatacatgtgaaactgatatacatgaaaggactacattgaaaaattgtaaaagaaacattgcatcattcaataaactgtgaacacacacctattcaatacaccaaagtgtaagtcgaaaaaagggagccttgagagaatgcagtaacatctacgagtggttagcatatgacggctcaaaggaggataggaaggctgtttgtctgaaattatagaaagcaatccagaaggtttttgtactaattcttcaactaacatgcagcatccatataatgtcgaatcagcaacctaaagacagttgtggaattaaatgcatcatcatttaaaaaagagtatcaatacaaaagaattttttatatcttacctgtaaccggaatacaaaagacagatcgctttgtttaaggtgttcctgcattataacattaccaatgaaatcagtcttacaacttagatttttaagtaacacctgaataaaataggttaagtgaatggaaattttcattaatcagatgtaaggcttaagacaaattatatcaaattcattagtaaagttataaagcctcgttcttgtagctctctttatgtaattctaacagtgaatgatttcaatggtgctcaggtgcgtgtttaaaatctgtaaggactaagcatctagtctatatacctattcccaactatttaatcatacatatgagtttaacactccaggtatgtgatgatgctgcattataacacttaagaaatttctgctcaaccagtacgttagatggccaatgccatcgattcaagaaactcatcaaagtgaatatataatactatagtaatacaagttatattgagaaaccttacaagctcatgaatagtaacagggaggaaacttggtatggaagaggtacaagaaggaaacatagtaaattttaagataactcttgaaaagataataggagcaaaagcaaaatacctgcccaagaagaatttcatttaattcactcatggaaggagttctttcaacagcatgaacctgaaattttgaccaacaaagctataatcacctacacaatttc

SEQ ID NO: 187106 - DNA, 3573 bp, Cannabis indica
ggcattatgctaaattgctaattttgatgtatctgatattattggttcagtgagacgtatcgctacttcgatctgcccttctgttctggaggtttgtgctttactattatttcttttgttactatttatatcttgtgattgtgtttatgtcttcagacttattaattggtaaagattaattcttggatcccttttcgggtcagtgaacaaatgaatataactcttcttgagctgtcttgtcatttgtgtttagtatttgctatggtgttttggtgaatagtatggctgtcgatttaagttccacaaatttacattagttccttcctattgatgtttataagggaaatgaaaagaataaggagaatcgttgtttgtaaaaatctagctcagcaacgtgggcctgtaaccgaagtgggatcgagtagaatatcggatctgattcattgttaactgttaaaaaaatgtgaaggctctccaatataggcttaagaaatgaattattttgcagattctgaataagtgcaatcttttaaagcttccgaaatttttcaagagaatggaaactaagtaaagagaagctttgatttgaatatatatcatttttgtttgaatatttaaaatattatctcttaatgttaatggtaggtgatgtgaaggagaagaaagaagctcttggagaggtgctgaatggagatcgccttgttagtgctccttataaacttgagtttagaaaagagaaggaatctgaggttgcctgctcaaaaaagctgacaaaggaagatgttgctaagtttagggaagctgtgaaaaaggattactactttcaaatgtactacgatgacttgccaatctggggttttataggaaaggttgataaagatggaaaatctgacccaagcgaatataaatattctctttacaagcatatccattttgctgtactctacaataaagatcgtgtgattgaaatcagtgctaagaccgatccttcatcagttgtagacttgacagaggacaaagaggctgatgccgatttcacatacactgtaaaatggacagaaactgatattccttttgagaagagaatggacaagtattcacaatcttcttcactaccccatcacttggaaattcactggttctcaatcataaattcatgtgtaacagtgcttcttttgactggtttccttgcaacaatcctcatgcgggttttgaaaaatgatttcatgaagtaaggttttatttgtgaatttactgaaagaatttcatatgagggcctatgactcttcatgttctttttacctacttaataaaaattatctaattacttgaaaggtatgcacaagatgaggaagcagctgatgatcaagaagagacaggatggaagtatatccatggtgatgtttttcggttcccaaagtacaaatcagtgtttgctgctgcccttggttccggcacacagttgttcactctgtgagaatctttctatgtatttatttgtttctctaaatttgggatttgtttactgtctcactaaccatggtaccctgacacacttctatgcatttccagcactatattcattttcatgcttgcattggttggtgtattttacccatacaaccgaggtgctttattcactgctttggtggtcatttatgcactcacatctggtatcgcgggatacacagcaactgctttctattgtcagcttgaaggaacgaactgggtaaatatatctaagattctccctgcaatgaatatcgattcgatttgtgaaaatgctgttgtaaattaacttattctattttgtgtttatattgacaggtgagaaatctgttgcttacagggtgcctgttttgtgggcccctgttcctcacattctgcttccttaacactgttgcaattgcttatagtgcaaccgcagcccttccctttggcactatcgtagtcattgtccttatatggacattagtaacctcaccattgcttgtgttgggtggtattgctgggaagaatagcaaagctgaattccaagctccttgtcgcaccacaaaatatcccagagaaattccacctttgccttggtacaggagtacacttcctcagatggcaatggctgggttccttcctttcagtgccatttacattgagctttactacatatttgcaagtgtttggggtcacaggatctacaccatctacagcattctgtttattgttttcatcatcctcttgattgtcactgcattcatcactgtggctttgacctacttccaacttgctgctgaagatcatgaatggtggtggaggtaacctctcacatttatttaatacagtttaatggtagtttaactgaatattattgtaatggcaaaaaaaaaaaaaaataagttcaaggaggatagggagaaatttatctatctcttttaacttaatattatagtagccataaaattttagaaaaagaagttatacagggagcctagagggagggaggcttgcatttattattttcttggaaataatagcctatttttactctcttttggtagaattttcattgctgggtccactggctcaatgcaaccagttgactaaagtatctgagtaagttgttgtggctggttggacattgtgaaatcaaacaggaatcattgtacttgacttctctagccatttgcgtatagattgggcagggaaatagtgtattggggttgtaggtatatataagtttgtggaatattctttcttcaatttttgtcgggttaatattcgtttgatagttttctacaggttggtagtcagttttttcacttttggtgtaaagtgatgaatattctatgttgattttgttgcaggtctttcctatgcggtggatcaactggtctgtttatctacgcatactgtttgtattactactacgcccgatcagatatgtctggtttcatgcaaacctcattcttctttgggtacatggcatgcatctgctacggtttcttcctgatgctcgggatggtgggtttccgtgctgcactgctctttgttcgccatatttacagatcgatcaagtgtgagtaagcattgttggctcgatgctgctgctctgggtaaaatctgtgctggtttcttcttctgctgcatcatcatcaaatggaggaaggtctgtgatttttgttaggtggatttggtcttttaggaattctactctgcgtttgctccaacagggtttagggatatattgggctctacttatgttgactgtatgtatttacaatgttgatgtggggaagagattgtataaccacatttttaccttactctctaaaacgatattttccatgttagcaaaaagtgaccctctatttttatctctttacaccaattattttcccaccatggagagtaaaaaaaaaaaaagagaatttaaagagttgctttcaatatataatataatatgttattatagctaaaaaatcttttacactaagtttgttataccaccttttcgtgtgtatgtatgattttcagttacacagctaccaaatttaattatttcaatcaagaattggt

SEQ ID NO: 187107 - DNA, 1390 bp, Cannabis indica
agattagtgacaagcatggaataagcattgattttttcatttacaaataacaagttacgagtcagaagagatttagtaccttaggtcccttcacgccaagtttatctccaacacgcatctcacgaaaatgatgtgacatccttccttgtggatacatctttacaaattaaaaaatacaataccatcattacagttctaaataactacacaaaaatcacaatgaactacttgtcaagcccatacaccatcccgaaaatggaatacctttataactagttcaaagtatccaacatcagaatccaaagtagtaggagtgtaaggtttggtaacttcttcaccctgactatccttgcccctattcaataaaataagattataattagtgcaatacattgatgtttttagctaacaatttcaaaccgaaaaccacaacagtataaaccaggaatcaagaataacctgcaacttatatgctgtccaattggaagtcccaaaattgaagttggtgttgggagttcaaatgtgaattttgcaacattatggctgagttgagttcgctttacaagtttgaagtccttgaaattttcaggatccaagcagcctaataacacacaatatgatgttaaagaccatttgcagaggcaaacataaatcttattgaagcaactaaggtcaatctttttttatgcaattttcaaaatgagagatagattagtttcatcctaaaaccaaatgcatgtgttatcaaatgagaaaaaagaaactatatcattgtttcattcattgatgtagaaaattaagaatctcaagaacattaattcttatataattgaattagaagcttgatgataagcccaataaaaaacctaaaggaagcttttttaagcttaacactgcatcaacttgttaaataaccaaatcaacaaaacccaatcacaaaaaatccaaacttccaaaaatccataaacaaaaatcagcaaagaaacaatcataacaaaagtcaacaatggagattagagagtgaacctttaggcttcctagaagaaaagaggaaaacagcaccaatcccaatagcaacaaaagctacagcagcacccacaaggagatgagaatccactgactgtaaaaactccattgattcaaagaccaaatcttgaaatgggtaaatgaagaaaatagtccaattgggttgtggaaatagtgggttttcctcggtttctccacactagtagctgaggagagtggtagtggtaatgggttaggtgaagaccttaccttaatgtgaaaaagccaatgaagaatcgaaacaaagaaaaggggagtctggtactgatccctaaactacaacgaaagcgtgttcttcaacgtaatggtatcgattttctgaaaa

SEQ ID NO: 187108 - DNA, 1249 bp, Cannabis indica
aacataatatatgtagattaaatataaactattatcccaatttttatccacatggcgtggcatgtccacgtaagcaagagcggggccacgtggaatacagcgtgtgaataggtaagccaaatcaccatgcacaatacataaattgacaagggattcaaagacacgggcaagatcaacttagaagaaaatggttgaccatgagggtttggtcggaccacactctggccgacaaggccgacaaaggttgactatgtggtggttagccccaagcaaaaggtaggttggccagcactaataaagagcatcaaaggaagccaagttgaatggtggggtccacagccatcctcctgcaccggtcataaattgattttagctacaagatggctctaacaacccacaaaagttggggtttaacccccaaactatctgcatataattagggatatttgtttgttatttttgtaacttaaatatatcataaaagagcaatttttcttatttttaattgatatttacttacttggaaatagatcttttctaatccctaaactatgtaaaagacattaggcagagtaaaaagggacctaaattctatgtccttacaacccttttctcacatgccattacccaagcattagacacttagtctattttctcatctcactagttcaaaatctgtcatacatcagttctcaccattgtaacattacaagagagcatatctagaacttacaacaaaaagcttgtaatctacattgtgtcatctctggaatgaatacaactaaaaggaaagtaggtcattagtcgctatacaagggggtcgaaccactataaattgttgtttaatatttttttttacaatttacaggcggtaattgtctatcataaataaggctccattgtcagttcaccaaatctgaggttaacattttggtgctcttagtgagagcattatttgtcatcttgatcattcatcatggttgtaacaaggagaaccactacctccacttcctcgaatcttccttaagatctgatgacgactgatcccaattttcaagttcctccccccactgaaggcctcactgatctaactcatattgtcactccgacaaatcctacaagtcctataaatttagccaataaaactaatcccattgatcctactaacatgataaatcctaataatcaggccttgtcgcccaaaatagatccaccaatagtaactcgaacaaaaggtcctgtaaacacg

SEQ ID NO: 187109 - DNA, 2873 bp, Cannabis indica
tgttgtactcttgttaatttgttgttgattttttgttatgtgtatgttattttttgttgttgttttgatgttatttagatgttattttatgttaattttatgtagttttcttgttgttttcgtgttatttttatagaaaaccgtaaaaatacataaaaaaaattctgtaaacgtaaaaatataatttgtttacaaaaaatagtatcttatgtatttatcttaaaaaaaaattgtggcaatttttccttgcttctcccgtagaaaatgttgggtttttttttttaaagaaaaaaattattttataatacttagctatagtgtaaataattaagtttccatagtgtaaatacttagggtgaattattataataaaaaaatgagttgttccatctttgataagcaaattattatttaattccaacttaggaggtgatggatttttattttgttttgtttgttttttttttttttaaaataataaaattaattaaagagaaaaacaacaagatgctcccagcgtcccaaattcatattcctaattacagtatcacagtacatctatggttagtcataaaaagaagaagatcacaaattaataaagggatccctatgaaatcatgttccaagaccaatcaaaattataatatataatataagtaaaagacgatcttaatttaaaaagaaaaattaaataaaagctttccggcaagaccaccccaaataatttcttcagacggatggtttgatgcattttttgtttgcggtgtgtcttcatcaagatcaaggtcgccgaagctgtctccatacctctttagccatgaaattcggtgccagcttcccacatggtggccaccgatcgacattgttgaaccagcttcctcgctcgccaagcctttcctgactttttccatgaaaatcgactctgacgagatggtttctcatatggtggtcgtcggtgtcctcgtcgaacttctcgatgtaaattcttcatacgaccgcgtttggtactcaaatatcagttcgaatctatagccgttattgctcttatttgcacgactgtgtttggtaatcaaatattaatgggatttgttttatttttattttattattttattatatattaataatattttattattttattatatataaataaaaagtcatccatgaatatttcataaaccaagaattcagttatatagacacactttatatagaatagatgtttttgattgatttaattattaaagaactaggcaatatagccgctctttgcgcggctattttttttttttagtattataataaatagttacttaaaaatataattctaatatatagtaaaattataaatatattatcttattttaaattattattaataattttatttattaaaaactgcataattttattaattattatttagaattatttattaagaagtttaaaatttattataggtagtattttaaattgttttgctaaaagaattatttttataaaaataaataaataggatggtgtagaaaaaaattataatatttttcataatgcattattttcattgggtggttcacatttttattatatagatttttattgtagcttcttttgagaaaaagatatataaaagatatattttttttataagttagttgctaaattagattttttaattcgttctaaattaaatatagattttttaaattagttacttatttttagaaaactaatatgtatgtatatataagagcaataaaatcgtgtcacaatatcatttaactaaagatttaatttgaattatcaaatgcaattgttgactacataaacatagagattataattagttattattataatgttttaaaattttgctaattaaagaaaaaagagatagatagatagtgatgttttttcttttgaagtgtgtagtcaatttggaacaatttatgataaggtatgattattttaattttatttttctttaagaaaattaaaactctggtacaaatttacaacacaaactaagaaatattatacattattaagagctttcttttgaaaggtaataattgtagtatgaacaatctaaaaaaaaaaaattcaacacaaggaaatcaaacaacattttattactaaaaaacagaaaaataaaaaagaaaaattcagcatatattgaaaaaaattataaaatgtttcatcactatataaattttctatactaataaaaatatatcaaactttgaaaaaatttgggattggctttaatgtttttatgttgtcaaagttaaacccatgattgatcaatattgtttctgatagctttgttgatcttctttttctcacaattatgttctgacatatatcatataataatataaatatgtgaagaaggaagacttacaacttgagttgatacataaacacttgtaacacaaaatttcttaagaatatatgtaaattaatctctaaataaaagtaacataattacaaaatatttaaaaacaacactatttaaaagagaaactttaaagctacaaacaatgtacataaaattaacagataaataatataactagataaaaataataattcaagtattataattaaatcctttgaacaaatagcaaaaatattattgaaattacaatataagttatacttgaaacacatattacaaagaagaaaagaaaaggggaccgagaaagaagaatcaataggataatagtcgctaaatttttaatacctagttttttttcctccttttgttagttgtatgtatagtgggtcaataatttagtcagatatttttttaaatatataatgagagaaaaacgtgatatgtgattttactattttttttttttttt

SEQ ID NO: 187110 - DNA, 2920 bp, Cannabis indica
gttgcttacgtgtcaaaatataattggtttgccaactcaactcattttcacataccgttttctcattccgtgaattgtccattatacccttcaacgctcacaacaaaactccaatagtaaatcgtacaatatagagaatggcatatctgtaattatgagaaatataggggttaaaattaacgcggttaaaaaacgcgggtatgatttgatttggtcttttttaatatataaataattaaactaaataaaagaactgactcgtcactcgttcacccaactcagcgattcgactcactttcttctcagctgagtagtaaaaaaagcgaaaccatgggccacacacaacaattctaatccgaaaattttcaactgaactcgctgaatctcgatagcgattcctagggctctgcttttttaaggggtttttgtcaaaagggttcttctctttttcttctacttttcctttaattctctctttgttagaaaaattgggttttttttttggtcggagtgagtggaaatggccgtcggtgaaatgaaagtttcgtctttgaattcgttgcctttggggtttagatttcgacccacggatgaggaacttgttgatttctacctgcgtttgaagatcaatggtgaggatgaacaagtctctgtcattcgcgaaatcgatgtttgtaaattggagccatgggatatgcctggtaatgcttgttttctgttttttaattccattaatttttcagcgtaaagttttgatttttggatagttttagtttgaaattagaaagatttgctttttaggtattggctgattgtgattattaaagatttgattagatgtgtcgattgaattgaattcattttggttaataaagttttgagctttgatcttcaattcaaaatattttgtctgaattagaatactttgattttgggtgatcagatttatcagttataccaacaagggatccagagtggttcttcttctgtcctcaggacagaaaatacccaaatggaaataggttaaaccgtgctacaaatgcagggtattggaaagcaactggtaaagatcgtaagataaggtctggaagaacaactgagattggtatgaagaagacactggttttctacacagggcgtgctcctaagggtaagaggactaattgggtaatgcatgaataccgccccacgttgaaggaactcgatggaactaaccccggtcaggtagttagttcttcaatgttgtattgtatctagctttgctttaagatttagtgttggtttgattgtattaacttgttttctttgtttcagaatccctttgtaatttgtcgtcttttcaagaaacaagacgagactgttgagagttacaagtgtgaggacgcagaaccagcattgtcatctcctaacgcacaatgttctattgatgatgaagagtctgatctagcagtagctcaggagcctctgccttgtgtagagcaagagagtaaggtttcgataaggatggaatatcctgcagccaaaacacctgaggaaataggtactgattttggctgtgatgctaatgaggcagaagataatgtgaaagaggaaagtactagtgaggtgaggaaagggtcttaattgatgtttggtagtgttttcggttatgttggttccatttttaaccattgcctttgtgtcacaggttgatgttcagctaaggcaagacttggatatgttttatgatcccccatctgagacatatgtagattgcaaaatgttttcgcccttgcattcccagatgcaatcggagctaggatcaacttgcgcctattaccctggcacgggggaaaatcaatatgggacaaatgagtccgacgatattactcagttcctgaattccattctcaatgattttgagcagaatggctctgaagaattgagcagtggaagtattcaggtcactgatgtccatgctacgaggagtgtgatttctgatgagggtgatatggctgaggtagatgaaagactgaaacttttcaaatgatttgcacagtgcatcttgtgtttttgtttctgttgaatgtggccttaacattgtttttcgttctatgcagttcggggaagaattccttaatcctatcaatgatttgaaaccggttttaagtaatgatgctgtaattcaaattagaagaaggtctcaacccaggcaaaatcaaatgacccctgatgaaataagggctagacatggtgatgcaccgaaaagaatacgcttgcagcgtaaacttcaaataagctgcagcttcaaatcctttagtaaacccgaagaggaaccaaacacaactatgaacaaggtaataattagtttcgaatctgcaacaacataacatagaaccaactcgggtttttcttatctgcacagattctaaattgttaagtgttattcgtagcaggaaaaagatgcagaacatcacgccaatgatcaccccgacgagccactcgaaaaaggaacatctagagaatattatgggaaaatgaaaacaagatcattcacaatccaagatacaggcaagaaggtgttgaagacttctttgggtggttcaaaccaaacattttcgatgatgtttcgggtagctgtcattgcagtcttgtttataagtttcactagcatatggaaatgtctagtttaatacttttaaaaatggagctaggcttttgtagagtacagattaagtatgttagattttgttttaaaatatatccaagtttacatctttgtatagtataattcaaacttggaatgacttcagtttttgtttcatgtagaaatattttgtttgaggctttgtgtaaaattatgaatctaaagtactttttagagtttgccactattaatatttatcataaatttatgatgtgaatatataaatatatatat

SEQ ID NO: 187111 - DNA, 3955 bp, Cannabis indica
caaatcaaacttattgtctactttttgggtttacaagcttctattgaagaaaaacaaaatgttggttgttgtcaatagcatatcttttacaagcacatgtatatgaaacttgtaagcaatgtaaagttgaagtgcgtatcttataaggatattgattcaattcaactagaatattatttgacacactcaagaaaacgatttgcagtgctcataagtccatccattcatccatgtaagcatcatacatgaattatgtttttcattgtctttataattaaaataatatatgaatgaaggagacaggtcattaatttttcctacagaatcaaacgaaattacctaaaaaaaacgcacacattcaagaaatttgatcaaattgaaaattccatccatcaaaaaaaaaaaaaaggctagaaaaatatgagtacatgatctcccccgctgtccattcatgatgggcaaaatgaagttagaaatcttgaatcagcagctggctttctgtcatttgtcatcagtttttatctccaagaaaaatagattcagctagtcaagaaaactgaaagattatatatacattgctcttgttgtcgacgttgcattccaaaataataatatcattattattattattatttaataatagaaaacaactgttacccacgcatcaaatcgatgtccatgtgggcattgcgcatgtccaatgaccgagaagctggccacacacccacggacgatgttggtgtaagactttggttttgattttgcatgcctagtgggttatccaccgaatctgtcggaccctctattgcttcctgccttttgttgttctttatttttgaaccaccccatatgaagctccccactattacctgcattgcagttttaacccattcacttacttatctaatcagcttagaagaaaaccatctaaagcaacccccatcttgaacaagatcacaagcccacaaagttcactgtgatcaacaagttagttagttacctggacggggcttgcagcaatgagcgctcctccaatactgccaccaatgacacggccttccgcgttggcgagagttacgctaagacctccacttctgttcctagagccactgctatcggtgatcaagtaagagcctgtaagacaaactatctcgaatcgtccctgcagaaataaagttgaagaaactcaaaactaactcgacatttaatatgaacatacttgactgttaacaatgaaactttaagctaaagtgcaatactctgattatagtaagcatcataagctggtttaaaaattcatagaggcaaaagccaaacatgtaagacaagcctcaatttagagatccttgcctctccaacctaagatgttttttggagtaaccatttatttcagtctgtaacttcaaacaaaatatattcatacgcacagaaatgctataagtacctcatatgtgactgtgccaccagatgatgaaggctgacgaagagagacagtagaaacagcaccactggctgacaaaatgcacaaagctcttggcccctgctgcgaaaatgacattatttttgttgcaatgtcctatatagaaacatgagcacatatcagcatccccaaaaattccaaaaccctatgtatgttcatacataatacattggctattaaataataataataaaaacaaaagtgaaaacaagtctatttgataatctaaaatgctgaggaaaagaaaagaatacataataatgaaagaaatgcctacttctccaattgcaatagtgataacatgtggagtaaaacccatcccagcagaaccggagagccattcacctagcaaatattaaaaatacatatttattagacctttgtagtttgcaactaaataataataaaatatatgccaatggctagttcattagtactataggtaaaaatgagcaacaaaatcacatatattaaaaatatcgagtgcaaaaatgccctttagattatactgtaaatatagatgaataaaacagaagaaagcgtataaatgtacacgtttacaaacaccaatatattgaggatgcacaaatttcagaagtggtttttctgctgtctaatttagaaagctttattaaatgcttctaccaaattaacagggacttcacatgaagagcatctttcaaaccatgctgatatacaatctacccagtaaaatctacctacaaaaactccactagaaaagatcaccctaagcagtgaacacttctaactttttccaaaactctccactcattaccttcctccagaatcacctaagtaacttcatttaaaactcaccactcattaccttactcaaagaatcacctaaatagcaagaccctacaagatgtattatcaaagactaaaattaacactaggagcaggaataatcacctaaatagcagcaagcccctataaaatgcattttccaagactacaaatcaacattagaagcagaatcctacaatgcattattggtgctgtaaaacttatgcttttgctcataactaaaagcacataataataagtgctgacaaaagaaaaaaagcatataataagaaagagtttttgcttatcttttctatttggatcattaccatacaaggatttttattgaattattttttcctttttgaaatgtttcgatatcattaaaaaagaaaaaaaaaatcttttatgagtgcattaagaataatttaaattatttcaattcaaaaatagctttacaaaaaaccttttagagaaactaggaattaataaaagactattttttaacgaaatatctctagaatgacttttttaatcttaaagcttataaggaagttataaaaactaagccaaaatgggccaaaattttgttcatttctttaagttatatttctgttttcttgttccttaattttatttattactttttttttccaacgctcaacttgtcagaaatacattacaatatgaaagcaaaccaagattaaaagaataataactgactgcaaaaaaaagagaccaggaaaatcaatatttgaacacagatttgcttataaataaaaaagataccatgcaacataatattacaccaagcaaaacctatatagtacgtaaccgcttgtcacgatcaaacacaaaccaaaaatccaaaagtctatcagaaacttaccaagagaagctaattgttgcttcttcccagtccctttcgggcgtcccctgctgcgcttctgggttggtgatgccattccaggattggtagcgggagaaggagacagttgcaaggatacagatccatcaggtccgtatttccgaggccttcctcttttccttttaatttgctcacttgatgacatcataccttgtccaccacccacattgacaccatgggaggacatagcagaaggtggttctgcaggcagtgttgatcccatattactgcctcccatattcgactgaaaagacacgtttggattcgacaattgatgcatgcctggtgatccatgaagctcaggctgtgctccagaaccagggacacctattcctctctgagcatagtaagcagcagaaccagataacgccataggatcccttcgatccatgcatttactattcttaaaagcttataaatctttttaaaagcaacttggaatagctcctctctgttccactgtttactgtttgatacagaggtagactctacaaagaaaagagatttcaaaacaatgtgaactgactttgtgtatactaaacaatgtctcttctcttcaggatactaattaactagaacccgttcattacttcaaaatttaaaaaagacaagcaataataatactccattgttcattccactacatcttattcctcccttttgtttgagaaccacagctatagcaaacgacatttcaagaacaaatcacaaatacagaacaggaaaaagaaaaaaaaaat

SEQ ID NO: 187112 - DNA, 3131 bp, Cannabis indica
gtcacattaggaaatgagggaagcaaaaacgagacttgcaatggtggaaggacagtttattccaatcttttgcgaacaaaataaataaaagaaagaaatcaaaaaagatcactaattccaacaaatatctcaagtttgaaacaaaggaaatattatacctgaaaaatgtgggtcatcagcaacaactgcacggtcatcccaatttaaacgaccaccaaaaatgttccaaacaccattttgattcttatagtgtgcacaacgatgatttaagacagcatctccaagaactttgataccaacttgatggaatttattcacaatctccttcagctcatctatggttccatatcttttgttttatatgatagaagggaaaagagaacattcagagaatccaccataataaataaacatcccagaaaccaaatcaattcaagaaataaaatgcattgaaaaacaatataaactctaacaatttacacctacagaaggaaaattacctattcaacaaaaaaaaaatgttacaacaagttatttgagtcaaatgtcccacaaggaaacagacagctctaagctaatttgagtttagaaggttgcaaaactggtcatactagagagagaaaaggtttttccattggggtggaggagctggcctaatttcttaggtaagaaagaaggaatactgagcagcacatataataaaagctactttatgataccttacctggaatttagattgtataaatcttttggcatgtacccttcaggtgatacagattcggtaggaggaggcaaccaaatcacagtaaaaccaagcgaagataattcttcagccttttctttgagttccatgtaccattttccagatttattggattcccaattaaatccttggcatactatttcataacctgtgcctgtccctgattgtatcttgacaggaagttctaattcctcggtttctgaaacagcttcctctggaggagctgcaaccgaacttctaaacatactatatgcttcagcagccaacttttcaatttcttgaagaatactttcttgtgcttctttggtctttgtcttcaaactcttctcagaggaaatacttaccaagcttcgtatttcactgattattcccttggtataggcagaaagagaaccttcactttcctctacagattttccaggtgtctcttgccctgcagacagacccgaagtgggaagaacagaagagatacttgagcttgaaaggggaacgtagaaatcatttcccatatatttcaaccatgtcttttcactttgcttaagaacaaaaagaaatccttgaggaccttcttccaaagtaaataatccttgggagccatttccaccttcttttggctgcacacaaaaatccacataagttgaagtaagatcaagcaaataatctagttttcctgcttaatactattatcttcagagagagagagagagagagatcctcacacagtttctttcgagggaaaaaaagagagacaagtagattcttcaaaataaaacagacaaaaattgaaggaaagctgaaagtaacagaagtttaagagaataaacaaggaattgcatgcaatcagaattgaaaaatgaaagggtaaatagccatgacattcagagatcacctctcactacttgaatacccagttcatttcatcttttagtaattacagaaaatgttaataaaaaatgtgaaaatgaaaattgatggtggttcctggttaaaacttataagtaatgtaagagaataaaaatttgaaaggaagggaaaaccaacagtatttcaatgtcatttaagatggtttacagaatgggcaaatcactagatcagtgaaaagcatttctacctgtaacaatgtccttaaagccttgtccttaaaaatgacagtatcaggtggatatggtgaagatggaagttcccagtttttggcatcatccgtacaaactccccagtgaacaacaacattcccaagtatatcggtttccatggatagcaggattttttctgtatcagggcacttcctaactgaaacagtaattgaattatgaactatccaccttcttagcaatgggaattttcttcatagaatccttctaggatctttttttctttaataggctcaatggagtccatgctactgtcttcatctttagaatccaattgttcttttgtaatgaatatgtttgatagctgtcccaaagctcccagaattatcagacaaccagtaaatcccgtttcactttaagattggaaaatgatagaagagaagacaccaggcagatatagtatgaaattatatatcattcaatgtattaaatcaagcatacaaaatcaagaaaggtgatgtagtgaggataacaacctggccacatactgtttccctttttccgtccaaccatattgccatcctcctgcaggtagtccacaagaggaactttaaaatctctccctttgtgctgataccatgaccctgtttcttcatcctgcttcaccaacggaccccaaccaccaaaaaagaggaagaaactaataagaaaacggaatccagatagaaaactctggagaaaaatatcttattaaactcaataagatattatttttttatatactttagcattttttacataaagaaaagacaatgtcaactgtaaactattcaactttaaaacctttaggacaaaatttattgctgctatagcactcttgggatcaaaatcaatcttgacttcttgaaatgtatcacctgccgaagatgaagatgattttttaagctgtgtctctattgcataatcctgaaaacaaacagtaattgtatttatcaaatttaagcaagctggaaatccaatgcatcctgttattttggaaaaggcaaactaagtaccttgatgcgaactgatccagagggtatcattccttcgggaggttgatcccagtcactgcacattaacaaaaaaaaaaaaaaaaacaatgatgtgataattttatagctagtagagaaaatctgaacaaaacaaagaaactaaatggaacaatatattcaatctatcatagtcaccaaggcaagttgatatggataaatggatatgcatccattataatataa

SEQ ID NO: 187113 - DNA, 2028 bp, Cannabis indica
tgccgcaaataacccttttatttttatatacttatatactagagttggtcattctatccaatctaatattttttttttatccaatctagtcctgggactcaaatctggacctggacctaaacttagactcggacctagacccgcacccgaactcggagagggaccagacccagactcggacccaggagccagactcagacccggacccgagagccaaacccggacccgaacccagacttgggacactcagacctagattgagacttggacccggactccggacccaaattcgaacctggattcaaaccccagacacgagactcgagacccagaccagggcctgaactaggactcgaatccgaagtcgaactcggactcgagactcgagacctgagattcgggacccggaacccagacccaaacctgacccgcagtttgtgtgtggggtcgagtgtgttgaaaatatattataactttacacaatctattaatacaagtcaataccaaacatagtattgtattaaataatactaatacaatacaatacaatacgacgcaccaaaagagtccatatagataagtattctccgtattagcttgtattataatatttacaaatgattcggagtcaacaccaatctctgacctgaacttggacccgaacccgaactcaaactcgagacccgaacttagatcccgacccaaactctggactcggataaactataaagattagggagtattaaagtcttcaagttgataagtaaaattgatggtagcactagattgagctcttacggagaaactattaacttattagtgttaatgagagcattagattggtctcacatgtttaatcttcctaattgttctatagactatttatttagttttggtttctgttttttaaaacattttatccttttgagttaacaagtttattttttaattttcttgagatattcttaatttatttttgtccttcatgcactcagggtgagtaatattgatattatttcattaaataagtaaaagattttcaactttcaaaaaatatgtaaaatcattatttatttattaaacaaaaatatgtaaaattattagtgttaatatataagtttgactttattagagttttgggtctttgtcctttccggcttcgaatcaaaaaattgaaattgaaacaatcttgttctacaagcactacttgtcctgctctgcttccctcctcgtcttctcagatatgatcccctactagctccgcttcaatatacaattctacccattcatcattcatggcggacttggtccaggttctctttctttctctttacttaatctgatgggttcctttcttcgtgtgtaaaaagataacctttacttttaatttaacactctatgctcttgttatctttaattttaagcttttactctatctgaatgatgattaattatctgagaggtttgggtagtattactgagacttaaattcattatgtgttataaaatttcagaaggggacccaattttgttgggacaatggaaacttagtctgtggcatagttcatattaatcaaaaggattgttatttgcttgctttaattttttgtccgctgagcttaaaaatcactaatttggatggatattgggtaatcaattaggacaattttagtttattgaattttttggttgaattgaatataagtaatttcaatgagtgtggatttcagttatcttttttatgtgcatatgtagttgtttctttacttgtttccatgatgctcatgttttgtaagggttaaataatgtaggagcattgcataaccccaatcaatgaaaattctgaggtaatttgttggggctgtgggttgcggcttttaattccgtctcactcacctgttttcaagtgtggatggtgtggagctgtaacaaatcagaatgcacgaaaacgtgacggcgagtaccttctgttgagacgatggcgagatcgttgctttgtttgtgttctcctcttgtttatgaccttta

SEQ ID NO: 187114 - DNA, 2693 bp, Cannabis indica
tgttgggctgtcaattcttaattagaacattaatttgtatatgtgaccatggaatatgtctaaagtgtttctcacatgtaaatctttgagtttgtgtgtttgtaatttttcttttatctttggaaataaagtggagtgtatttatggctttaattaatgtggtggatgatcatgaattttcaagtttgttaaagagttaatatcaattattaaaagaaatcttttgttcccaaaatatacatttctgcctccttacatcaaatttgacaaatatgaatttagataatacatatgaaagggttgaatttaaataattagcttaattaattattgtgtaaaatcagtttggaccacaattatagtacttttgtttgcttatattacagttagtcatattatattgtacttgggctagacctacgatagtaagtcttgtcttatatggccaagaccagtggcggacccagaatttaaagtgagggggggcgtaaataaatttaaaaagaaaatataaagtgtagttagtggggtttgaacttttaccctctaacctatttaccaaccagtggcgtacccagaatttaaagtgagggggcgtaaataaatttaaaaagaaaatataaagtgtagttagtgggatttgaacctttaccctctaacctatttaccaactaccttaaccattacaccaaggttactattatgtctataaatatcatcttttaatacaaatatatgttgtaactaattaaaatacatatacattttttttctcgattttttttttcagggggggcgactgccccccctcgctacaatgtgggtccgcccctgttaccaactaccttaaccattacacaaaggttattattatgtctataaatatcatcttttaatacaaatatatgttgtaactaattgaaatacatatatatttttttctcgattttttttttcagggccctcgctacaatgtgggtccgcccctggccaagacattgattgacccaacaaaagtaatgtcatcatcttttgattctaaattacttacaattgataagctctccaatgattgtagtggtttcttttgatgcgccacaaataacttgttaaaattttctctgcacaactaacttaaccaactcctcttttagtgaagattccacgttagcgtaagaaccatgacctctgggaacataaacaagctttcggacacgagggtcacgaaccttattgaagacgcttgcggacatgataaaactctaatgaagttgactatctgaactatcaatacaagaagaataactagccagatggaattcctttaaaaaaaaaataatttatcttgaagactggacccgaagtgaacatgaaagtcatccgagaattcccttttggatccgactttcattctccaagactccttccgggaccgcgagaaaactaacaaatgtagagaccttttcatttagagaaactataccacaaatattaagatcgaaactttgatgtgcttcatcatctcttctatcacctcaattacgtggaagaaagtacagttgtcacatcatgttatgcttttgagctagacctacgagtaagtcttgtcttatgggcaagacattgatcgacccaacaaaagcgatgtcatcatctccaatgactctgatggtttcttttgacgcgctacaaataacttgttaaaattttataaatagttaatgataaattattttcaaaataaaggacatatacttatttggcttctacgttcgatgtgaatacaaaattgacttatatattttgttaaatgataatttaaattttatattttgcaacgaattgatatcttaatcttttattcagtcaaatagatttttaactaattgatatcacgattgctcaatttttcaacaattataactaattataaagctcaatcaaatattcgcatgttgacaaaacaaacttacccgttttcgtatatatggtctccattttacgaaattgaatattcaaattgtcatttaacaaaaatataaaaagcgaatctacacttctatagctaaaaaaacaacttatgtatttttttaaaaaaataataataattacatattttcctgatgaaatgctggcacgaagactatgaatatgatgtgtaggctctaatgtttcttagagatatatatcaagaaaatatgaaataaattaatttaattgttttgaaattgctgtattttcattttgtaaagggttgcattcatctaacagctttgagaaaatttaatagtgttacacacatacaaataatgaaattatttggatcattaccatatattttattgtaacaaccacataatgacactatattatgatagcaatccttatggtatctaagtaattataaaagacactacttcaaacaaaaaacacaattaacaatgttaattatttattaactctaaataaaaattcaatgtaattaccaactttcattttgtaatgctatatatatatataaacaaattttattatttgttgctaactaatattgttagatgacattgacagtctcacaatgtccccatttttagttaaattgttccattttaattttattaccaaactattttattattttctttaacaattatttttctgtcggacaaactttaaaaagtaaaaaaaaaaaa

SEQ ID NO: 187115 - DNA, 3268 bp, Cannabis indica
tgcggagaagttgtttgatgaaatgctcaagaaaggtattaaaccggataatgttacgttttcgaccatgattagttgcgctaggatctcttctttgcctgagaaggctgttgagtggtttgaaaagatgagtagttttgggtgtgacccagatgatgttacttactcggctatgatcgatgcttatggacgtgctggtaatgttgatatggctttcagcttgtatgaccgtgctagaacagaaaaatggcgcattgatcgagtaacattctcgactttaatcagaattcatggtcaatcaggaaactatgatgggtgtttgaacgtgtttgaggagatgaaggctataggggttaaaccgaacgttgttgtttacaacactttgttggatgctatgggtagagctaagagaccttggcaggctaagaagatttaccaagagatgatcagcagcgggtttgaaccgagttttgttacttatgctgctctcttgagggcttttggtagatcccggtatggtgatgattgtgttaatgtgtataaggaaatgaaggagaaagggatgaagctgaatgttattctctacaacacaattttatctatgtgtgctgatcttggctacactgacgaagctatttccatttttgaagacttgaaaagttctgagaccatgcctgatagttggacattttcatcaatgattactatatattcgtgcagcgggcaagtaccagaagccgaggcaatgttgaatgagatgttgaaagcaggttttgcacctaatatatttgttttgacttcacttattcagtgctacggtaaagctaagcgcatagatgatgttgtgaagacattcaatgacctcttggaattggacattagttcagatgagcgcttctgtggttgtctattgaatgtgatgactcaaacaccaaaggaagaactttctaagcttactgcttgcatcgaaatagcctatccaaaactcggatatgtggtaaaacttttgctagaagatgacaatagtgaaaatttcaaaaatgaagcctcagaactttttgaaactgttggtgctgatgtaagaaaggcttattgcaattgcttgattgatctttccatgaacctggatcagttagacagagcttgtgagatactaaacattggggtcacacaagaagtatatactgatatacagaccaggtctccatcccaatggtctcttaatttgaagggtctttctcttggggctgctctcactgcattacatgtttggataaatgatttgaccaagatattggaatctggagaagaatttccaccattgcttggaattaatactggacatgggaagcacaagtactcggacaaaggctttactttggcaggtgtttttgattcccgcttgaaggaattaaatgctcctttccatgaggctccggataacgctggttggtttttgaccacgaaggttgcagccaagtcgtggttggagtctcgaaaatcttcggagttagttgcagcttaactttgtaccgtccttgatttgcttttctatgtattctctacacactactgacatgcaagggtttagattgcacggtatacttcttcctttaccttttgtagttgtatcttaatcttgctggcatcttctctctcgtagatagagatcatttttgtactttagaattcaaatcgaactcttcctttgatgcttatagagttaaagaaatgttaagaattatttacatctttgttggtttagattatctatctataatctatggttattatttgatcatgttttcaatgaagagttatgccatttgaagggatgtcgtttctaaacatttatcatttccattaaaaaaattgttgtatgaataatcctcgaatttacttccgttgtattttctgggcaactgttgtggtagtcagtctaaggggtcccctgtttcttgtagtgaaaactgaaaagctagttcacggttccagttagcaataaacaaaattgagaacgttatcgcagaagttctaggacaagaatcaatcaaataactaatttgaatcttggtcattaatcatctcttaaaagttactaaacaaagcaacccttgagcgatcaaaatttcaaaatccagaaaaataggaacctggtatgagatgagagttcatctaaaactcaaaatttgtctacgtttaccttatttactcatactgccgccaaaacaaaaccacatgtattaggggtcacctttgaaggctcacaaccatggtagatgaagtatatatgctcaaaaccaatgtcttcttttaattttgtctatttcctccttgcaatacccattgtcttccagttagagaagtgattgattccttggtacatgatctggagttttttgtctggaaaatggaaattaaggccaaaatttaatcttttcttagaattgtattgatcttaatttcagcatgttaactatgttgttagttttatataaaatatgtgtttaggaatttttgtttaactttgttacagcaggattcaggaagttacgataaaggtgttgcaggtggaccttaagtgtcatgtatgctataaaaagtagatcaaaaaagttctgtgcaaatttcccgtctaatatgtaatatatatgttatcattgtacgtatataaaattcagaagaaaaatattttctagttaataaattggcagttaagtgcatgagaatcatgtgctctgtgacagctttgatttcatatcttttttctcattgcattagggacactaatactattgcttagccaatcttgcattgagtatggaacaaacaaaggtttagtgtccgagatttccttcttgtgtattgcgcctgtttgctgtaattttggcgttatactttgactaacacaagttcattcttctccaaaagaaaaagaaaaaaaacacataaaattatattttcatacaatcagcaacatattttgataattaaagtacctactcattgtatcagcaacaatctgcaaggctggagactatcttattagcattacgagaaaagttcccagctcccataataaaggttgagaacttgagatgtaggtagtaatgtcatgtagctgcccctgcctaggccagttttaccaaagaagctgtatatggagtgtttggaaggtagacgtaccgtgtgggccatgttgataggatcgatgttagcagccacagccaacctgcttcaccatgtaaatgtaatcaatcgaatgtgc

SEQ ID NO: 187116 - DNA, 1599 bp, Cannabis indica
taatggaagcctctcctccatgagacttgtggaattcaatcatttccttgagcggatactcactaatgacatcactgttaaggacaaaaaatggctcgccggactcgtctatcaacttatccctagcaagcgccagaggaccagctgtgccaagtggctcagtctcttgtgagcaagtgatcttgatcccgagctttgcctcaaaatccttcaagaagttcagcatcacctacataagtggaaagacacagattattataatttagatacaccatccaactatagagcaaacattttaataacagaaatgcatcaattagttacctctggttggtaattgatagccaaaactacttcactcacgccaatagccttaagagcttcaatctgaaaaaccattgacacatagaaagttatggaaaggactaaatgagcaagtagcagagtacaaccacaactatatatcacaatttagatggatgtttaatacatgttataactcatctccttttttctctgaccaagaattgttttgaaaaaagagaagaaggtttacatgaaacatgagatgtaatgaagatcggaattttagattggaagcaggatgcagattttacctgatgcaagatcatgggcttgttggcaaaatcaacaagtggcttgggaacactgagtgtcaatggcctcaaacgtgttccgaaccctccaacaagaataagggccttcattttctgtttccctgttttgtttacctgtcaattactgtatcataaatgaggcaactcaacacagtgaaatacagactgaatacaaatagtatactcctaatataactaggtcaaaaagaaagaaaaagcagaaagattgaaaatatgtgtatatctaacataacatcactagtatcatatcccataggaaactttcaaactttagttaacgggtagcaaactgatgttgccatgaatacagtaggcagaaaagagagaaaaggcactagttcattaaataagtagatatgaaagagcaaaacaaatttaagcagggaacaaagggaagaaaccaagagatacaaaaaaagtgtcataagacgaatcacgttgctaaaatgaataaattaacatcaatccaaaccaaatgatttagctggtagcttccagctatactgcgggctggacttttagatgagacaatgccaaagccgtacacttggttgggactgatctcagattagaatttggaacaaaaaccaaaacctactactaatattcaattttattgcagtcacaaattcatccttctaaacttcaaaaaagaaaaaggagaaaaaaaaaatctccttggattatattttaaaaggtcaacgaaaattccaatctcagcaatcataacaaaacagatctcaagctatacgacaaatcttcaaaaaattcaggatttcaaaaaaagaacgaacgaaaagaaaaggagtcctacgtatggagttggctatacacttgtttttccattcttttggtaatattttcaccaaaccatcaaacacccaatctcaatcagtttatcgacgtaataattcataaaagaatacttctttagattttt

SEQ ID NO: 187117 - DNA, 3337 bp, Cannabis indica
caaatattttgcatatggattctgcaaggttagaaaggaagagggggaatcatgtggttgttgctgcgagtcctccaacagatgatgctgtaattgcagcagagccactaacaaaagaggatcttgttgcgtacttagcctctggatgcaagactaaggagaattggaggtaaaattctaatttcagactttacatcagccacatgtgtgtaggtttttactacccaagggtagttcattattattcttgaagcttggtgaatattttaatcgtactgcctaaattgtccatgtgaaaaatgttttggaaagcagcatatttctcagtctgtccatctgcctctctttttcttggcataattgatcactttctgattgcagaatagggactgaacatgagaagtttggctttgagtttggctctttgagacctatgaaatatgagcaaatatcagagctgcttaatgggatagctgagagatttgactgggataaagtaatggaaggtgactacattattgggcttaaacaggtaatggtcttttttccctatcctctgtgaaattattttcttttcacaatcataagaatatttgtaagtgaaacagctacttgcaaaatgctgaaaaacaaatgtttcacattttgtcaccagttctgttaaatctttatccattcttatgggccagggcaagcaaagcatttccctggagccaggaggtcaatttgagcttagtggtgcacctcttgaaactttgcatcaaacttgtgctgaagtcaattcacacctttatcaggtcagttaaaatgatcttttctaatactttgcggtcttatactattgcttgtttacaaagtcttggcaattatctggatttgtttttttcttttttaatagtttcttagattgtaaacccgcaaaagttcaaatgaattatgtgatgaacctttcttcgcttggtactatgttattcaatttatcttagataaattttgtagtgatgagtgggcaaagttttccataatttcttatattatttcatcattattttcgttgttaaatatatgcccaaactcaaccgagacgggtagctcaattggtcaggcatgtggtttgctactttgcttaggtctgaggggtacctaaatagcagttgccatagcttcctggtctacaaatattgtagaattaggcggggatcctagttttaggaaaaataaatagtatatgcccaaactctttggctgcctgttttccatttcgaaacctcatatatacatatatatttagagatagatagattgcatatctaacttcttttattcacgaaattatacaggtcaaagctgttgctgaggaaatggggattggattcctaggaattgggttccaaccgaaatgggaacgtaaagacgtacctgttatgccaaaggtactactttactttagatcatctgaatgatatgatgtatattatatcatctgaaatatctttaggtggtattggaaaaatgattaagtgggttttgaggtattgcctctgtgaggcgaggcataggtcctatgtactttgagttataaactttaaaacagactataacttcatagaactttgataaatataaaattgtgattataaataacgtgcaatttcttaaaataaataggcgtgtaagaagtttaaatagtccaaaaatatgtaatgagccttcgtagaaaggcatgaagactatcattgaatactctacctctcaaacccgttagctcgtgtaaaagaataataccatttcctaaatcagttttgtctcaagcagccgatgaattatctctctgcaaaactgatacatctaaaatgacttagccttccacaatatattaaaattaaaatgtctgccttatgtcatctaaaatttttaaactaaatgcagttttgattgacctgtgcctcgacatatgaagctcacacctcatatgctccaaggcacaaccccttacggttttaacattacaagtgtaatgtttaatcactctgcttgactgctcatgggacacttgccttatggcagttttttgggaacctgaatatatgcctttctaaaacattgtctggagaccttgatttattgaagatgctgttaaaataatttcatggaggtgtttagaaaggctttgccaagcacaagattgttgctgcatttctaaataataattatgaggacatatcactttatattactactgtatcctctccctccccccctcctctctctctgtctcattgtttctttaatttttgtttgtacttactcaatgatggagttacttttgcatgttactttggttgttgtgattaatcccacactgacagagtatttggctcagggaagatacgagattatgaaaaattacatgcccaaagtgggtacactaggacttgatatgatgttcaggacgtgcactgtacaggtaaaatgagttttatgatattttttaggtaatttgtgtataagctcttcaaggttgtcatgtttatgatattctggtaaattataaaaaaaaatcatatcttaaaatttgtgcttctgtgagaaagtgatgaaatgtagtgctctttctataggttaacctagacttcagctcagaagctgacatgatcagaaaatttcgtgctggtcttgcgctgcagcctgtgaggaactctgcttcattctgtttacattgaatgttttctctttcttatggtatgaaatttaattggtttttgacaaatgaaacagatagcaacggccctttttgcaaattcaccattcacagaagggaagccaaatggttttctcagcatgagaaggtttcttatataccgctgtattattgctccctgtaccccatttcagaaaaaaaagttgttgtctcttttttaattatttattcttctgtttttgttcagccatatttggacagatactgacaataatcgagctggcatgcttccctttgtttttgatgactcctttgggtatattttctatgctttctgaataatctggctttcaagtttgtagttcaagtggtttatcaataacaatgtagttgtgtatgatttcttcttatgcaggtttgagcagtatgttgattatgcacttgatgtcccaatgtatttcgtttatcggaaaaagaagtatattgattgtactgggatgaccttccgggtttctatctatccttaattgtcttgtaatttaatactttcccttctgtatctgtgctcatctttgtattgtaccgacacttttttccttcaactgtttttcatcttgcccatataatttttttttt

SEQ ID NO: 187118 - DNA, 3209 bp, Cannabis indica
ataagggttcaaaaatattttttccctatgacccactcaatttaagggccggtcctgattacaatcaatgacaatattaatgttggaccccgttcttccatcttgttaggttttcagctcaccttaacacccacattagtataatattgcccgttttacgccttaaccctcacgattttaattttaagcacattcccaaaaggttgcaaactaatagactaagtggaacacttatgttcaatgcaactcttaaatcaggtacgagcagaataaaagtttctatcatcgtaccacatcttcataatcaccatatgtatatatattatactcctaaaagtaaataaatgaaaagataatttacctcttgaagcttatcaagtatccttgatcctttttatatgttgtattattggttgatctcaaaatactcacatagtagtcttctaaatcttccactatacacaaggactagtttgggctattagaataaagtgtatacaaaatttttattcaattctcaacacatgagcaaaggtattctgtagttatgtagttatgatggagagaaaagattaatcaaattaatcatttttaagcttacaaaaaataatacgtatgatttattcgttatatttaaataaaaacgttttatttaattaattatttaaattaatttttttttattaaatcatatttaattatttgaataaataatataactgaattctgttacatatttatttcctataatcgattgagatctctcaactaccttgagagaatatatcaactgataaaaatatctataacaacttttcaaattcaaatttaaataaatattatcttctaaattaattaattaattaactcaaaaataaaaataaattatttattacaaaataaatagttactatataaacaaatcaaaatagattttttgagcttctatatataacttttattcctactcttgataatattttaaggtggcgatctggaatcatagatctataattataagctctaataaactagattatttattgaatctaattaatcaaataatcatgtttattaattgtatgattactttactataaatatgaagttgggctcttagtatagaattatatttactgagttttattatagtgaccattgatataattaattccaatgactaaccctccttgtgtcgattcataattagttttggtcaaattactgttttacctttctaattacttctttattttttagtatcgttaattcaccagtgaaagtataatttatatccaatctaaatttgtgcacaacttttcagttccagaattaacactttaatggaaccaacattcgatccgttagaaaagtcagaattccgtaattgtagatcatgttcctatccatccatattattagattcccaaaataaaaattggaagaatcatattctctgaaactttaacgagtgaatcaaagaaactaataacataaacaagaggtcatgattactcaagatttatgtcgatctactattgatcatctttatcatatatatgaattatatctttataataaacaacatgtgtaataaaaacaacttaattacatatcgatttattgtcatatataatctctattatgtacaaccttgacctagatgtcattttatacatcaacaaattgaattgagattgtttgtaccacataacgggcatcagtgaaccacattaacaaccattgattaaaaaaatttataactttaatatattattgactgctttattcatagttaattaattttaattctctttacaatacaagtcacaacaatatgtatatatatgaataaaaaaatttatgatatttatatataaattatttaatattaaatattaatatattttttttgaagacattaaatattaataatttaacattcaagcatatattaaaatgttcaacttatatttataaatataattatcttttcaggagtatcgaattgaagtaattaatatgaatcagctaaatacacatacttaattattatacattattattctattctatatacaaattcttcttaaatttattatcaatttttttaacattcgacacaacaagaaaattgtggttggatagatcacttttatttgtactgatttattacgttatcttataattattattatctgctaatataatgttgcctattaattaactttgttcatgaatgaaccttatgtatggtggtattgtttttttcttcttctacttttattttaaggctgatattattatggttctctctctcaaaaaaaaaaaaaaaaaattatcacgagattgagtaaagagtaatttttactctctcattattaatttagcttaattaattaggcctctataattttttctcaagtggtcccaacaggcgtaagaaaaaagaaggaaaaaaaaactagggaggcatgattgatctattatataaggaaggaaaggaagtagatgttatataactctagcttagatagagtaaaaaaacatatctagaaagaaaatcaaaggaattaaatgaggaattatggccgtttgataagcgcgatggcgagtttgatggtggtgatctcgacaatgatgatgtgttatggggcggaagttgcaagcgcgcagcttagcaacgcgcagtgccatgaggagagaaggattgggctgaacgcgtgcaaggcggtgctggttgggaggcctccctcggcggcgtgttgccaacgagtaagggtgactcatgttcaatgtgtttgccaagttataacgcccaagctggctgcttatatcgatctcaaacgtgctattcctcttattcaaggctgcggtcgccgtgttcctcgccacttcaagtgtgggagtaagtcaattaatcaattataaatactctatattagtacatatgatcactcaacaaaactaggttccacacattaattgagcatcattccaattatatccatggattttgtaaattattatatggttaataattggttattagttagttttcttttttattttgataaaattagagaatatataatagtgtcccataatcaattgaaagacaataatgagatgtggtacattaatcttgttattacaatttcttagtcaatttctgtacttgaaaatacttgctgaaaatatattttttt

SEQ ID NO: 187119 - DNA, 1592 bp, Cannabis indica
aaatttggaggaagccctgatgataactgaggtctagttgatgctattgaattctcagatcgactgctttgcaactcttcaaaaatttcatgtttagatttaggcaactccttacgggactcaggttttccctggtttcccgcatttaatgcagctgcagaggctttgaatttactcattgcctatcccaacatcaagtctcggtcagtacagtactatcacaaagagcatgaaactaaaaaggttcacaaagcattattatgtttcatttcaaactaatttagtattccatttccatcaaacaggactatcatttatgaactggcgaagctgctacctgtgtggtgtctacatgtgagcaaggaaaacatggaatgatctcatatgcaagtttaagaagtataatattgattgaaatcaataatagaaaatcacctcgtgatgtttacgggaaacttgatgcacatcccaaaaggattctgacttcaagacaacatcacagaccttacatattggctgattattgtcattatacctgtatgcataagaacaaaggccaaaagggtcttcagaaacaacacccttgatacttcaaactctatctattatatgtatcaattcttcgaaattttaagaaaagtaaattccacaaacaaaatcaactaaaacaagacttactaataataataataagaaaaaaaaagtccccaagcattgggaaaccatatagtgcaaagactcgaaaagggtgtgcaaaatcaatgctttaaacccaaaaagtgaaatcctttgtttacaataagaactaattgaggagattcaacgaaatgttttgcagttgtaaggattgaagagaataatcagtaatgcgttagttgtttgttaagtaattccaaaagataatattgcataaatcaaaaaagagctagaaaacattaaaaattaacgaatggaagacagaccttacaagagcggaaactatgcgcttgacttttttctgatcattcaatctatcacgaaatgatgattttcttttagctttataatccatccttcttcttctgcaaaattaagaaaaataaatctcaaatcccccctttttttggtttctgggctccttacacgaagagaagggaagaaagagtataaacagaagaaaagaaaagagaaggtaaggagacaaacctgagctgcaattggtgccttggtggtgactgagtgaagttgtgaagccagaaccagaatcaaagagcagaagaggagtccacaaaagagcgagcgagagagagagagaaataggaatacaacttaccaaaaaactaatttgtccaacctattatttttattttttcggctgttttaatttttgttagtagatcacttgtgaatttacaatgtagatattcataatcggtttaaaatattctcgaattattataattcatcgtctaattaaaagatgtgatttgcctaaaattcttatcacgagcaacatacaagacaaaactacttctaaaaatttaaacaataaaattctaacatttttatagtctatattacagttataaaagcgaaagttgaatttgataaaa

SEQ ID NO: 187120 - DNA, 735 bp, Cannabis indica
atttgtaataagttgatgatggtggtctttcatggggtggtgttattctttgtcattgttataaataagattaagaaagttgaacttaattaaaaccaattatcaatactcttttctctcccattaaattcccacgttacttgatgaataatgttcaataatatttaattggagattcttagcataattacttttgtagtgttacttaaaattatttcccaatttttcattatatcatgttgtatattgtaactaaacattttattttaaataatttatgacgtgaaaaataagtttaaaataattatcacacacaattttaaagaaaatatgcacggactgttttaaatttttaaaatttacagaaataattctttggaaaataactatgttattagaaatttgagatgccaaaaagaaaaaacacccctatcatacaaataaataatgtccctacctaataattttgccaatttatatattgcaaagctggccttgaaaaagttttatgtgtgatggttctaatgtatgtctctatatatgcttccacctataaaactttgttttttgcattttcttttggggtcaccgacagtttatatatatatatatatatatgcatgtatgtatgtatgtatggatcttcatttatgattaaaatctcaatgagagtagttgtagaagaaaagagagtagcaaccagcaacactgatagtaacacaatagccatatata

SEQ ID NO: 187121 - DNA, 8268 bp, Cannabis indica
aaataatcccttgaaattatctatgatttctacacaagcccaaaatcaggctcaagcccaattgaacagcccaaaagctcataagcccatgttttagccactccccatgatcgggttcagttacaaaccacgtatagtggcatgagttgagtaatggcgaaaaataaagagaaatcgacgaagaatcaaaagttcagtaccagagagaagacttcttcttctctcttaattgcctgagcaaagcagtttggcctggaatttacgagtattcaaaccccagtttatctaaagtaagaacacaaactcgttgcttttctgttcttttgcctttttttcctttctaatttctgctattaattcacaatcttgaatgttaaaaaattcgtaattctcggatgaatgtgaaattttaaagataaattttgaagacccagaaaggaatttccaaaaaaatgatgggtatcaggctgtttgcggctgcaatcattgtgtatagaaaatttagtaccaaaagtattgggaaaatcagttatgagtctcccaaaaaggtgtacaaaagtagaaagaagaagagttatgatgataataataataaacccaaatggactgatcaacaagagaagattatagatgctgttaaaaggcataaatcagtgttcatcactggctctgctgggactggaaagacattcttgctaaatcatattattaagttattgagaaagcaatataagccatcacaagtttttgtcactggctctactggtgttgttgcttgtgctattagaggacagacccttcattcttttgcaggtattcatagccataagtgtgataaagaagatatgcttaggtgtgtcttattaaataggaaggctagttcaaggtttaggacagcaaaggcattggttatagatgagattagcatggttgatgctcaactgtttgagaatcttgaattcgttgctcgaaaaattcgaggggatgattcgagttggggtggaattcagcttgttgttagtggtgatttctttcagcttccaccagttaaaagcaaaaggattggtgatgatgatgatgataaacaatttgcttttgaagcagattgttgggactcaagttttgctttacaagttgaacttaccaaggtttataggcaatcagatcctcagttcatcaagttccttcagaatataaggattggtaagcttggtgaagaagaggaagagtactttaaacggttgcaatcttcggccgcaatggattctaaagcaatgctagctgtgcaggtctatcccatgaataaagatgtaagtagagtgaatgaagagagaatgaaaagtttaggtgatgaagcttttgtttttaaagccattgatagtggcagtgacatcaaacgttgcaggaaacaacttgatcaggcaaccccttctgagcttagtttgtgtttaggtgccagggtaatgctgaccaagaatttaaatacttggcgtaattttgtgaatggtgccactggtgagattgtggatttttcaaggattgatgctgttggtgtgggtgatgaggataaggatgaagatgaagatatagatactgactcgaatactgaagagaaagatattgctacaatatgtcaggatgggctactaccggtagtgaagttcgactcggggaaaacgaaggtgattgaaccagtaacatggcaggttaaagatggagataatattgttgcagagagaaagcagctgcctctcactttggcatgggctacaagcattcacaagtgtcaagggaagactattgacttcattaaggccgatttgtctaatgcttttgagtatggtatgcattatgtagtcatgtctcgcgcgaaaagccccgaaggacttttcataactggtttggatcccgccaagattaaggcacatccgaaagtactgtgcttccatgagaagaagcttgcttctgaaaaggatgagaaaccagaggaagatagcacaactgcaccacttgctgtgtcacgtacaaaattccatttctctctctctgagtttctacagaacaggccatagaacacttaatcttctttgtaaatattttacttgtttcctttttcaaatctgtaaatactgaacaaaatgaatttctttatttctttcaaagtggggccctttttgttctatgacctctgtgtgcccaagctggtttttttttcatggcaatctacaaaggatcatgcattttttgttaagttgccccatttgactttacagtcacagatttttaaaaaaaatgacatatcagctgctatattacaaggccaactgaaaccagtttaataaacaaaggaaataggattgaaagttcacacatcaaattttctattcacatgctttcttgcttccacttagttaacatgccatgaataacagattggcatggctaccactgaaatgaaaaacagggtcaagagtcgatacattttggttcctactgctaaaataacccaaagaaaatatcgttccaagcaaaaagaagcacaacatctacacgcattgactccaaccccaacggtcacctggtaggaccagaacgagagtgcgatctactgcttggactcgtacgattccttctcagaatagcccctaggttatgaaagcacttaagtggccttacctgtataaaagtaagattccagaaagaaacattgtaaataataatcagagtcagtgacggggtcatataatacagggtaggaaatcagtaatcttgactagcatacatcaagttgaaatataaattttagccaaatgattatataaaatatatatagagaaagagagacaggataccttccaccccctgttccgagcaaattgatcatagatgttctccaatctgtttattatttgtttgaacgttggtctgtggaatggttcctcactccaacattgctcaattaacctgtgaaaattgcatgagcttcttcagaaggtatcattgaggaagagagtttttataatgaacaatgaggtttacaccaaactaagttctatgcataaaacaaataaatacatgaccatagaacaatgaaaaaaatagccaaaaaaatcaaggcaactgtcacttcttactttaaagaagattgttatagaacttactctttcaatccatgagcataatgctttggtggagccctaaatggtgggcgctcatttgcagcatatgcttttggaacatccgtttctggcttggtagaaaatggtggacaaccttcaatcatctaaagtagcccaaaaaattaaaattcattattgttgaagaagatgcgcacatgccacaaagaaagcacaattaccatttacctcttgcaaaatcaaagcaaatgagaaaacatccactttggtatcgtattcttcatttttaaaaacctcaggagcgacatatcgacctgttgacgaggaattggtaaagtcagcaaggcatatatgggttgatagaaagaccaaatgcaatcaagagtagagaaactaacatgtatttgcattcattaaatgaacctaaggccaatcaaatctaacattaggacccaataaaacttaattaaaaagctttagttgtacaacacccagtggctggtgcaataagagcctgtttggattttaatgttccaaagaagcttacgaaaagaactagagctatatcataactatttcattcaaagagtgtaatctaaactcgtttggtctatttttctaataaaggccaaaaatgtaaagatgaccactaaatttcccaaaaagatgttaatgttacagataatgataccataatagaacaggtaacttacaagagaaattttgacaagtcacaggtttgtcttctttaattgtatttgcaactttcagtagcttactcaacccgaagtctgcaacttttagatgcccggaatcatcccgcaataaatttctgttatcttactcatgaacaattaagaaactgtcaaaaagcttcaatgattcagatatgatgacaataagcatgctctaaaccaagggggaaaaaagatgttatactgttataaacatatcttgaaaaaacaaattacaacagtgatagagtaaaagagaataaatgtgcatacatccatacaaactaaacccagcagtaatctatacgatttaaagtgaactgtgtccatttatctattaggaaagagatttggttgcaattcccaaactaagtatgaaagactttttcaacaaattattgtcaaaataattatgaaagttaacttagaactcagaagggaaaattgctgatttggaactgtatgcaagtctgcagtcaccgttatctctcaacctaaaaaacatggtgtgaccaaaaagaggaagagagagaacatacgaaggctcaagatcccgatgaatgattgcctcaggtttatgttcatgcaaataattcattcccctgcaaaataaaaacagcttagggatgagctcacaaaatataaacaactaagataaagcctatattcaaatacacattagctaaagttagtatacaccttagtgacagaattaactagctggtgctaaattaacgcaggggaaaaaaagaaactggatttgttttattaataagaccctggtagttcaagagccaggcctctcccaaaaacaaaatccttccagctcaattacaccccctaacagcctaatcttatcctcactgatggagtttccataaacccaaaaacctcccataacagaataccctgtgagtggctcataactattgcagaaatctaggcatattccaactgagaagtccctgtcatacggctggcatggcttcatattgtttagggtacttgcaagagtaggtgtaagtaattgggggtctatcactaagctccaccactaaaaactcaactcttttgatatcaaatcaacaaaatcgcaaataatattggcagctcaaagagcaagcagtaaccaagaagatgaagggtttccaacataactaaatgctccacaatagtcatttttaaaaagttaaatattagttagttccacccaagatagtataaagctaaaataaaaaattacaatcatactactaacgttgaaccctcttaagataaccataagttagattacacccaagaggggaagctcaaatggtcaagcatgtggcatgtggcaagtggtttgctcccaccaggtttgaggttcgagtccctctgggtacctacattagcaattgttatagtttcctagtctccaaatattgtagggttaagcggggatcctagttttttttttcaaataataaaaaagattacaagataaaattattacctatgtcatcactaacaaagggggaaaatgcacctcaaactcatattgcatgaagaccataaattacagccagatcggcaatagttataataattcacaatgaaagaatattttgaaatagattaagccggttaactgacctagcaatgtctagtgcaaacttcactgcaacaattggctttaatgcaccttttcttcttagatattcacaaaagtctccctgcagtttagtaaaatccaaggaaaacatgtaacaattatattggaaatgattttgtcctctcctaaaaggaaaatttttcaaccagcattttttttcactttattaatcagtcttatatcatgacagacaggatcaagccacaataaactatattgcagaagacagtgatagaaatggtattgttttaagagaaaaatgggataaacctttggtagatattccgtgacaatcatcattggactgctttgtgttacagcacccaaaaattgaacaacatttggatgacgcaacttttgaagtaatgcgagttcatccctgaatgcatttctacatttcatagggaatagtttcagtcaaaaagaatattcaacaccaaatttcatatttaagttacaccagatgaaagtatagggataaaagaaatagaggaaaactaactcacactttattatcatcagtaagtacttcctcctcaagtgttttgacagcaacttgaattccacgccacgatgctaattgaaatgttccctgaccatcaaagaaaaatatgattgaatacaagttattgaaaagaaaagtttggaattagcaaataagtgctaacatgagacttttaagtataaatatgcgctgtcaccatgccaagactctttcacaagtaaaatgaattagttcatgatgctccaaaattcatattttaatattatagcatatgtcaaatcttctccttttttaaccaccatgcatcttattaaggtacttagtcattattgcaaaattcacaagatcttgcaaataggttgtataacccaagatctctaaacttgcagactgggattgtaagaagtatgacactaaataaggataataaaacactactagaaacagtgtcaaacaaatacctggcagactcagtgattcaagaaatacaaagttgaaggcaatgaatagtaaactaccttggttatgggtttctgagacaaatcaagctccttgggatcaatctcatactcagggacttcgcgagcatttttaacgtgcatgtcatgagccatctaacacagtaaagttcaaaattaaacatttgcaacaagcttttattttgtcaaaaataaagaacaacaacactagacataccggaggctttgcaccatgttcctctaaaagtttgatcacatcttcatttttgtaatgaacagcatctgcaagaggctattgaacaaaacctaaaatcaatacacactatatgataatggcccaatactcaaaatctttctaattagacttccaagcttctttctttgtctataatggtgcaagaactacaatcttcatattttcaattacaaacccaatcaacttctttcttggcacaataagttcgatttcaagcaaacaccactccaaaacaagaattacaatatagttcaacgaaaaatgcagcttctcttcagttcaaatagacataagaaaaaaaaaaagggttttaccgtgcttccccaccgatccttagaatcgaccacggcgcctcttccgagcaaagcctgaacaacatccggtcgaccctgacaagcggcgacatgaagagccgtacggccatcgatgtccttgaaattaacatcagtaccttcatcaagcagctcgttaatactatctatatctccttcgttagccaagtacattagtctgactctctggtcaatggcggcctcaaccagctcctcctcctcctccgccgccgccgattcgtccctttcgggtttcatcgatgactgcttaccgagagtgaacctcggcggttcttggtgttggggtttagccttagcatcatccatggataatgaaattattattatttttcaaaaataaacaaaatttatagaaattataagtaagaaaaaagaaagtgatgaaattataaattaaaaattaaaaagaaaaatggttggaatgagataagagtaaagtgaaagagtttgagtagttcttaatattattaaagattctgattcttgactttttacaatcccataactcaagcaagaacattgctatatattatggagtgttttgttttgtgtcttttttgaaaatataaattaaaaaaaaaaagataaagagtaataaccgacaacttaaatcattctatttttagaaaaattgttagatgaagaaaaaaaaaaaaaacaattagccctagtgtaggacctatggactatacttgtaataaacaagtggtttttttttttttaattaaataagcaagtgggtatttttgttttgaagtcaaaattaacatttccaaatcttattttggatatgattattgattgggactaaaaataagaaaatgttggttctcttgcattgagtaaaattacttgttttataaacaataaaattacttgttgaggataatatatattttttttaacaaagaggataatatcatttgttggttacacttagattagattagatctcaaaattgccatcttcaataaattatattctctaaaacacacttattaattaaaataaagattgagacttaaaaagataatttctaagttcattttcaatgggacaacaaaaactcatatatgttgttatttttctctcaaaatactctaactacactacaaaaatcaacctatttttattttttatggagctcta

SEQ ID NO: 187122 - DNA, 2518 bp, Cannabis indica
ctgaactatttttctctgcaacttgatcttattcatctaagttttctttactgatttttagttttaattcaactcatatttcttttcttttagaagattgtttacgttcttgatttctgttttaattgtactatcacaacagcatcagtaatggtaaaagtaacctcagaaagttacattggttcaagttcaagaagaatagaacgtcacattctgtatatctaccaaatttatgcaagtgaggtaaactaatttgcctttcaacgcttaatttttttttcgtaaagattgacctcagaaaggtgcatcatggtttgttttgagattttgaatagcaattaattaccttatccttattataatatgtgtaacaagtgttacttacagaaaatacttggttaaatatacaatcaaattacaaaattactacttaacatatatacagatgcaataaaaaaaatctttgttatcgacaagaccatagctgtaattccgcaattataattatcctcaaaactcaaaagacctcaaggtcgatcacttttttcacagaatgaattgtagggtatatgtatatacacatacatgtgaaacacgactcaccaatcatcaaaaattccactttggtcttgtttctgcctctttctctgtcaattcccggtactggtaccaatcttccccagacttcccaacaggtaatgggggccttacaaatatctcgactggtcttggaacatggactactatatgaagttcgccttcggttttttctgagcttgagtctgaattgctgaccattttgctcttaggctccaacctaaaccatcctaggcctgatatagcaacatcacaagcaggcctgtccaaatagacaaaaaccaattttcatagatagttagtttcgaccaaatgaactaaaacgatgtaccatttcaacttccttcataaaagtttgaggcaaacaaaatggaaaggagacattatggacaattcaatctaacctttctacatcttcaaaatttaatcgtaattcacgcactatttcaagtcctcgccattcttctactcgttctcctgttggaggtgtcagcagacctccaacttctttctgtaacatagtaagcactatttagctttaagagaaatagtttcatgtaatggtcatattaatttatcacaattgtgatgaaagataacctggtaaaattcatctgcctcgtcagtcggtactgtgtgaatctgaagactcttgggtccgtaaaatattaagcgtgtttctggaagaacctgaaagtatcaagattttagaatacgttggattgaggtgaattacgatataaaaaagagcatgttaatttaatgacaagacctttaatatgtctattctgacaagacctccccaaaataatgattgaccgtttaagagattggccatattgttccctgcagtaccattttctgattgaacctgataattatgtgaaataagaaccaagaagtttactgaaaagagactaggaagtcaaagtagtacagaaattaaacttacaggaaatatttgacccctgattcgactccgaggagcaaggactggcaaatcttctgaatgaaccactgccgcttgcctatggtggagatgaactccaggcgtgtcatataacttctgcatcaagaaaagttacaccaatgttggttcctagatataaaagcgcgtgcacacacataactttccataaaaccattcaagtttaaatattaagttaccattaaaactaataccactgtaaagaagagaggaattatcataaaagaattgataagtaaaaggcatacccctccacttaggaaagcattaatctgaatgggacctaatgtggttccaggaacagcagactgtatcggtttatatttttgtgctgctgcagcaactgggtccttttcccccatcaattctggtatcaaaacaaaatagtagtacaagttaaaataaaaatgaacaacagtggcattcagaaggtccatccttggcccataattccagctgaaaggaatgtagctttgctttacgcaatagatatttgaagttcatggataaattacataacatgacataccaaagacctagaaccaggatagatcctcacttacaaaacatttaataaaacctcaatcacagccttacagccatatcattatttatagttttggccgtctggccctgcccccaacactgaagacattgggtaaagaatcaccctaatgatgtgaaggggtttaaaaaatcctccaattatcatctcacttaacaatatagaggaacaagtgaagttgacaattattaacaagacgtctatgctctttcattgagattgtttacaaactcattgacaaacttcaatcaatgtagtagcttcatttaaaccaatgcaagtttcataaactgacttactcagcaaagcagtgataaatgctgatttcccaacgttagcagcaccctacaaaaaaaaaagaaaaaaaa

SEQ ID NO: 187123 - DNA, 4847 bp, Cannabis indica
tatagcctctaactcagccgccagggcattagaacaggtaccaacagtagagcaccaaacccaatctgaacttcctctggtttgagccaccaaggcacacccatacaacccgttagcgtacgaaccatcaacaataataacactctcagtcggaatggatagagacagagggggttccgcttggggcaactccatccgagagtgttgacagtctttcggagtcatttcatggaatctgttaaaaacgttggcgagagcccgattaatgcagagttgtacagcaatgctttgtttagttatttagtacaacagaaaagatggcagagggaatttcctcgaaccacatacaatcattatctaacaccaatgtttgattagccaagccatgaacagctaaaataacttccgtaataaattatttatgtgaaaaataagataacaaaacaaaacatcctaatttaattttcactgttatttttatttaaaaaaagtataactaaataaattactaattattaataactaaatatacaaagattttaatatgaaataaataaataaataaatacaagtcttatcagcgaggcgaggttggttcctcgcgagacgaatccccgtagaattagaattagaataggatgaaaataatatccaaagacaaataataacggtagctttagtagttactttttctttcaaacctttctcaaatgtttttcaataacttcccctaaattccttctccgtctcctacgcctccgtcacctacctgtcacccacaccccccatgaactcatccaaaactcgccgcaaaatcgctccggcggctgcggaaaacggtgactccgccgacaaacttgaccaactcttactctcctccgccatatgtaacggcgaggatttaggccccttcatccgcaagaccttcgcttccgggaagcccgagaccctacttcaccatctccgtcacttcgctcgctccaaagagtccgaaattgaagaagtttgcaaggctcactaccaggacttcatccttgccgttgatgatctacgatctcttctctccgatgtcgattctctcaaatcatcactttcggattctaactccaagctccagactgtcggagttcctctcctttcatcacttgatgccttcgttgaagctcggaatatctcgcagaacgtgaatcttgctctcgattcagttgggacttgcgttcggctcatggagctttgttctagatcgaatcaccatctgtcgaataataacttctacatggcgctcaagtgcgtcgactcgttggaggctgatttcttgaagaagacgccgtcttcgacgctgaagaggatgctggagaagaaaattccggagattcgatcgcatatcgagaggaaagttagcaaggatcttggcgattggctggtagatatccgcggcgtgagtaggaatctgggtcaattggcgatcggtcaagcctcttcggcgcggcaacgagaagaagagctgagaatcaagcagcgacaggcggaggagcagagtcgtctaagtctgcgagactgtgtttacgccttggaggaggaagacgacgatggactaagcggtggaggagttggcgatgacaataatggcgggagtggaattctagggtttgatctgactccgttgtacagagcttatcacatacaccagacattggggcttgaggacgggttcaagcaatacattttgagaatcggaagcttcaactcacttcggattttcaggtatcttctatgactccgttccttgagtcccaccaaactttttttgctcaaattgctggattcttcatcgttgaagatcgggttttgagaactggaggtgggttgatatcgaaaatggaagttgagaacctttgggaaaccgctgttagcaaaatgtgttctgttttagaggatcagttttctagaatgcaaactgctaaccatttgttgttaattaaggattatgtgagcttgttaggagtaacattgcgtaggtatggatacccagtggattccttacttgatgttttgagtaagcatagagataagtaccacgagttgttgttgtccgattgtcgaaaacagattgctgaagctcttgctgctgataagtttgagcagatgttgatgaagaaggagtacgagtattctatgaatgttctttcatttcaaatacaaacgtcggacattacaccggcttttccttacgttgcaccattttcttccacagtaccagattgttgtcgcattgtacgatcttttattgaggattctgtgagtttcatgtcttacgggggacaattagatttttatgatgtggtgaagaagtatttggatcggctattgggtgaggtgttggatggggcattgttgaagcttattagttcttcaattcacggtgttgcccaagcaatgcaggtggcagccaatatggctgtcatggaacgtgcttgcgattttttctttcgtcatgctgcacagctttccggcatacctctaagagtggcagagagaaagaggcagtttcccttgggcaaagcccgtgatgcagctgaagatatgctatctggtatgcttaaaacaaaggttgatgggtttatgacattgatcgagaacgtaaattggatggccgatgaacctccacagaatggaaatgagtacgtgaatgaggtgatcatctatttggaaacattggtctccaccgcccaacaaattttgccagttccagttcttaagagagtattacaagatgtccttacccacatatcagaaaagataattggagccttatatggcgatttagttaagaggtttaatctaaatgcaattattggacttgatgtggatgttcggatgttggaatctttcgctgataatcaagcatccttgttttcggacgaggaagcgagtcagttaaaatctgcactttgcgaggccaggcagttgatgaatttgctgctgagcaaccatccagaaaatttcctgaatcccgtgattcgggaaagaagttacaatgctttggactacaggaaagtactgacaatttctgaaaaattgaaagatcaatccgatagactatttggaacctttggaagccgaggaaccaggcaaaatcccaaaaagaaatcactagatgcattgataaaaatactcaaagacgtgagctgatttgttacatagatgtatgtacaagtacaatcctttggtcttttttccctttacgattgtgattgggatttatttcacagcagctcattgctaacttcttttccagtgccatattgtttgctttcccaatgaatgtatcattaaacctagcaattttttcttttgtatgtatcattctcttagttcggtattgtttgttaatttttatattcaacttttcaagttataatattaaaggatttgatttatatttttctcacaacttctctttttgataataatgataataataatattcttgcatacttagtgatgtacttaaggtgacggtggttgaagtccagtccaacagcaaccaataaccattgttggcttataagataagatgttgtgtgggcagaaatacaggtatgtagctccttgaaattatttacaggtcaaacaacgcaaatgggaggtcggttgaaaaagttgctttacattggttttatgagatgtatgtgccatttggtgcttttatcttaattattttgtccccactactcttgaataactcttataagataagctgtttggggagataccatgtctctgtttgctgacttctggatattgttattaagaaaatagaattattttcttttctaattattgcctcatttattattctattttctttctttaaaatatggtttggtgcatttgttctcgcaaaatgttaaaagggaagagtcatattattattagtaaaattaaatattaagttttaatattattatttaatagttactatggaatataattattaggtatcactgatgtttaacagcttgtaattattttgttacaaaatcgaaatttctattaaacttggtgtgtttattaagtgtacaacaatagaattttagtgaagaatagcattgtagagggtgaaatttataattacagaattcgggtactaacctatcaagaacaaagaaggagccaaaggttcaattgggagcactgctggagtgtgagctaaagggattctcatgctcaagccagtaagataatcgataaaataattgaagtaatgtaaataaacaagtaaataatgatggaagacggatgactgctgagtgattagttggctggccagaattggaggattgactacgactaggttgactaaatgagtcatgtcagctggagtagttaggtgatagctagacagttagtgacgactaaacgactagtgtcgattagatgtccgataatggtacaaatgacagtgaggagtaaagagcaagtgatagtaggatgacttaggttttagtgaatgtagagcgagtatgagatattggataatctaatcgaacctttctctttgccttcataggcccttaggttaggtcatactttgtaacaacttctgtctgactaactccaactacatgttccttccattttgggaggtgttaacgactcttatgataagttcttatctagctagcttgacccatttggctaacttggttgagtatggacctaggtgcgagttagatggaacgcatggcctgctagcaatgtgggctagctgcttggtttactagcgtcgtggcgtagttttcgtgcttactagggttgtgggctggctgtttgagcttactggc

SEQ ID NO: 187124 - DNA, 1556 bp, Cannabis indica
tttttcaagctcattacattgcattttttcttttccatggtgaaaagtagtttataaacttgactcattatatgagcttttgattgcccaagttttatgacataagattatctaaaagaatcttgaaactagagagagaattcaaccatggaatacacaagaatgagcctaacattgtaaaccagatagtttgtgtaaaagtttgtaaaacattggaaattcagattctgaaccgctaaacctgaataggcttcaatggcaacttttgcaataccatttttgacaaaaatttccctgattttcctctgctcttttccatgcttgaatcatttgccttctttttgatagcatgatttttcttaggaatgcagtccgcgaaaagcatcgagtcaagtaaataccaactataactaataatgctacaatgaaatttgaacagtctttggtacttaattccaaacatataattctgtgtatgcagatataagcgatcaggaggatcaatgagaggtatagacacagcagaatacttgattgagaatagcaatttcacctgtgttgcagtgcagaagaagggccaaaatggaggatatcttctcaactccaaaactcagaagaacttctggctgttagcctaacacgccaacctaactcgggcttggtttgttctcaagcttgcaagtcttcttgagacatcagatgcaggtcaaaatcggctcaagctggttcactgaccgtatcgttaagaggttgatcaagtctaccactttctctggtcatagagtgaaccatatgatgatatttctcatttccaagtactaaacgtgtgcatgtttgaacacgattggctcttaaccactagaaaatgtcatcaaaatatatgctagcagtagaaatgagaatttcccttttcttttttctgacttttatcacttttaaatacaaatgagaacttccctaaaagaaaatggtaaacacaagaaaaatataagattgtgtgcctattgttatcacaccacatagaacattgaaactatttaaaggaaaaagtactgattttcagagctcatcacgaataactctttctaatggatcgtccaatatattaacaacattatcgtcaaccacagctcttggtccgttcgctgcttgtcgaaccataccagccttaatagcagcagtaactgtcctttgcaacttcagtaaccccatacgctttgagacaacatatagaacagcacaagagaataagaaaaatcccaaagcaattatcatcctgttcagatagaattcatcatgagtttttgacagatatagatagtagtcattaggaatttgagagttttctctttctgtacctgtccatgacatcttgcctctgcatcgtggagagtaagtttctggttctcatcaacaatgaccggtggcccttgtactcactttcagccttcaacagtactccagttgattcatctgaacaacccaccaccacattcatagttttaatttaaaggcaatgcaactaatcgaaaacatattttgtgtaaatctacgtt

SEQ ID NO: 187125 - DNA, 1689 bp, Cannabis indica
aagattgtcacttttatagtagttataaattataaatatttatatatataaatatatatctgccttggctagccttatttgtttaatttttaatgactactatgccaaaattaggaatagggggaatcgtactaaatctaaatctacaatgaactctaatttttttttttttcaaattttttattattatttttgaatggataatgaactcataaattggtttgcaacaaatggtgaagttttcaggcatgttgtagttaccaacttcgcagtagaggctctacaaatgaaggaaagtttcgttgtaatggcttaggaggtaggttggttggttgatgaactttttttaaataaaagagagttgaattgctggcttaaatttgcaactcaagtacaattttaaagcctagtgaagttcaaaagtgattttcttataacttgtttcttcaattactttatatgtttttattctttcttttgggttggaaaggaagggccgcttccttccaatttagctttttctgcttcattttgtttgtatattttgtcccatatgcatacctttgggaatagaatagattttagtgacaaataaattagctacattttgatgaatagtgaaactttgctccttgtaataatttaaagaaaagtctctcacttatgacacttaaaatcaacatatacgggtacattattaatattattattattatagtaaactttaataataatacctcctctaataaagcttatagtaatttcatggcataaatttaggccccacacattatagccaaaatcatatgattctccacaaatacaatagttgacccaaacattaagtgattattaattatgatatttgggatagccatcttttgttgttccaatatattttgtattttaagtgtaactttattgctctccatttcctttttgaaaagattatggattcttcactcctttggggtacaagattttattaacttttttggtatgctaatgaataattcattaatctctataaagtagaaacatatgcattattgttttctttctctctggtcaagaatggttagcaaaaacatcattatgttgatatgctccttatcaaaaacactaattaatcatgtaaagtgccacaacaagaagaatttgattactcttaacattcacggtacctatcaaattatctatagcctttttcatttcaaatatatcaaagtattgataagagaaaaaaaaatgttcatagaaaattttaaaaacaaactaaatgctactacctatagccaaaaacagtaatactactacaaaactaatgactaatcttccaatgaacactatttttttttaacaattccaataaacactgtttggggggggaaataaatgttataataatttttttataaagacaaatattataggagattattttatattgtatattttaattaaaattaaatatatttttaaattagtttgatgtatttaaaattgtaactagatcaaacatattaaatataaactttcaagcaaaacgagaacttctctctttttagagaacattggaacacagtgtagggtttggtctcattttttgctctcggtctatttcagccgttggttcacctttagtggtggtaaagattaaaattaagaagaaattgcactaaagaactt

SEQ ID NO: 187126 - DNA, 6363 bp, Cannabis indica
ctaaaaaaaaaaaaattgatagtgtaacctttttaaataatgagctaccaacacataaaataaaatgtacaatgcaaaacataattaactagacaatattgagctacttcgttagataaatggcaaagcaacttgacttgagttatgataattcaacaaacaacattagatgtatgagacagaatagccatgtagtaactactaagcttcatttttactttgagaattttgcaagcttagttttctttgatccatgcttcattttttaggcatttggttcattttagttttaattttgtttttttttttttttccaaacagaaggaaaataatatagacgtaaaacacattaagtctcgtggccattacaaataatattatctggaattgagaaagcttcaatccaaccagtcacattttaattaaaagttcacttagccaaagtataagctaaaaaaataaaggatctcgaaaccttcatgaaattacattctaaaaatgaattcaaaaggctcatacactgagctacatagttatcaatttcccacttcaaatttaacccattgaccacactttgataacaagatcagaatcacattccacaataacaaattgtaagcattttttctctgctagttccaaagccaacaaacaagaagcggcttccccactaagagcattagcaaaaggaagcctcttggtactagcccacaaaatcttccctacatgatggtcatgagccactgccgctagcatcgtagccccctctctaactgccacattgtaattaaatttaattagtccacatgcagaggactccactcaacgacaacaagagacatttgtaattgagacaaaagagagtgaccataatctatatagcattgagaaatagaattaatataataataaatgctatacatagatttattatgtaccttgtcatttctcactctccatatagtgtcagctacaatagacggatacaagaacacctcatcagcgttcacgttcctcacttttaggctcaaaatgattttggcctaattccacattctagtcctcgattcctgaacaggaatgagactacaaggataagttctccacaaatgagaagtcatgttacaataaagaaataaatgctctatagtttctttctcgctcccacatattgggcaagacgcgtcttcaatgttcatctaatcactaaaggtggatcgaattggaattgcattggacaaaatgctccagagcactttatgtcactcatgtgttttgcttttctaaattttgttccacaaaaaaggaacagcatgacaagtgttggttctctcaagatcttgcaacaggtaagcagctttagttaaaaatttaccatgcagttccttcatccaaatccagtgatccatccctttccttgaaggctttcattctttgaaaataactccaactatgtcctaatcatacaaactattaagcttccaaagatcccatcccccattgtccaatagtaagtatgccatagtcatagagcttggagtaagaaccccattcggagttggttaaaaaactataccatgagccacccatggattttttccagatatttatatctctcccatcagcaacctcatagcaagcacccttcctcagtccttttccttatccgcattcttccagtaccacgaattagaattcttgtaattgcaatgaataaaagaggtactcttaaggtatttggcagttaccactttataacataaggattgatctttctcaatgagttgccacccccattttactagaaaggcttgattgatcttcatagtttttggaatgcctaaccccccgcgagacttggggaggtaatattagttttatggtaatgaatcaggtatgcagcgaaagggttttgtattatctgattatcattgtaccatattctattggatctctaaatgtgtgtacattaaatcgaaacaataaaatacaagttaagtttagaatatatacctcttgaagactatcagtgtatccttgaaacttctcgtatgttgtatcccttaatctaggtgatgaagatgatgcaattggactcacaccagtgccttccaaatcattctactgcacacaaggaatagtgtggactattaggataaaatgtataatgttgttcttgagttctcaacacatgagtaagaacaattgagagagaaaaatgttttctttttctctgtctattttaaaaatagctttcttaaagtgtaagtttgatttctcaaattaggcttctatttatattaaacaaaactctttaattaaatcatatttaattatttaaataaataaataaatatctataactgaattcgtttactaatatttatgagagaatctcttaactacttgagagaatatttcaataacttcgaaatatctgtaaccacttttcaaatttaaatatctatctaattgaatcaattaaataattaattaatcgtaggtgcctaccttgtcttgtttaagacaaagttggaattttttgtcctaacaacttttgtctcaataaatcttatcttgaaaaattttgtcttcacaaatttggtctttttcctatttaattaatttaattatttatttatttattacaaaaataaataattactatttttccaattcaaaatagatttgtccgaaagatattatactactctttatccttgacagtgtttcaagatggcgatttggggaccatcggcctataattataagctccaataaactagattatttattgagtcttatcaaccaaataatctttgtttattaattccatgattactcaactaaaaatatagtattgaattcttagtaattatagaactatatttattgagttttactgcagtgtccattgatataaccaactccagtgattagccctccatttgttagttcataattagttttggtcaaattttatatttcacccttctaattacttccttatcctttagttccattaatttactagtataagtataattcaagattccatctgaatttgcgcgcaacattctagtactagatttaacacataaagggaactggcattcgattcgttagaaaagtcatgattccataattatagatcatgcttccagccatccacattatttgtttcccaaaacagaagttgtaagaatcatcttctgtgagaaacttcaatgagtgaatcaaagaaactaataacatgaacatgagttcatgattactcaggatttaggtctatctactattgattatcgttatgatatgaattaattctttatagtaaacaacatgttaataaagacagctttattcatatcgatccttgtcatatatagtctcaattatatataacaccttcactttgatgtcatactacatccgtaattcgaatcgagattacttgcaccgaagaatgagcatcagtgaaccatgctagcaactattgattaaagattctataatttaatatgttgatgattgttttattcatagctaagtggtcttagttctctggttagttacaagctacaacctcatatatgaataaggaattttcttatatttatataaattattcaatgataaatattaataatttaacattcattcatatatcaaaatgttcaactctttattaataatcagaaatgtctttatatacttttcagggcatacaccccaacaggaaaagcttatctcacgttttgagacacaaatcacggttccttttctcacttatccaccaaaagtctccaataacgctatcaattttggatgccaatcattgaaaaagttttgtagtttgcatagaataaactaggagggacagaccaatcgatttaatacgcatgacacgacccacgttagaaagggtttccactttccaaccttggagcttggatgttaagttctccaagataaagttgaaatcaacatctttctgacgggttctaaacataggaagtcccaaatatttgatgtttacacttaggttgtcatgcctagcacatattcaatacccatattttcattccttcagtcgtgtttttgctaaaaaagtagatgtcttaagctttttgattttttgcctcaaccaagaacaaaacttttcctaacaaacctaaaatttataggcttcctcaatattgactcttcccataaggacaaggtcatccacaaagaaaatgtgagataatcgagggccattcctactcaactaaattccctttattttttcacattctaactcttactgtaaaagtctagaaaggatttcggccacccaaatgaagatatatggggaaagaggatcccttggcgaatactacattttgggttgatcttttgattggccccccattaaggaaaatattgagcaaagaagtggtaatacatcgggaggcccatttgttgaacctatctgggaccctaaaactttctcagaaccttcgttataaacggaaaactcaacttgtcataaaccttcacaagatcacttttaacgacaaataacccttctttacccctcttaagcttgaaagaatagataatttcttaaactaagacattgctatcttgaatatttaaccccaagacaaaaaagcagtatgagtgggaaaaatgagtttaggaagcaaaggcttcattcggttagcaataatcttagagatcacttcataaataacattgcacagggagatagatctaagttaagataccttcttggggttctggaccttcaggatgagcaccaaattagtcgagttaatccccttgtgcgttgtacctgaactaaaaaaatcacccactgaagcacaaaagtcgtcaccaatcgtaccccaatagtgtttaaagaagatcacaaatataccatcttagagatcattttataaaaaaaatgttgtttttgttattccacgtgtaatttttcttcttttatttttgaaataaggacatgtacttctttatgattaatttaattcctttagttgagtaaaaaatgaaattcaagaccatcttatcatttgagtagccattctagggaacactcttgtgtcacagttcctcaaaatgaaaagatcttcagaagaagtctcgtggaaagctagatgtcgtcgggaaaagagttctagaagactagcttgtccactacgaaagttgttcatctttatggaaagttagatgtcacctggaagggcattcccaaaagtctaacttgtccatccaaaaggagtattcaagaacagctagtcttcttccaaaaaggatttacggattgctagttgttccctcttgaaagggagttctggatagtcgactcaagctatcacttttcctatccaggaagtctcttcagcgtatgcttcagtttgtcttttaggaagcgtatgtctcatctagaatcacttcaacttaagctgatgtggagatattgttacaaggagtttatcaagttttttaagtagtaactaacttaaaaacttagcgtttgcaacaactgactttgggatacatattccttatccataaatagcaccaacacttatcatttagaaagaagggtcacatacgagtttcaagagggtgattttaaagagagaaactgagaggtagagagagaggggtatagagaaaagagagagattggtttgggttttgtatgaagaatcttctatagatgaagaagattcctgggtaagtgtatgagagataaacactttgagagaatccaacagaatcgatctcgactgtattgtaccatgttcttgctcaatcaataaagaagattttgctggtattacaaaattggagtagagccatagatcacatcgatctataaaacttgaaccagtatatatcttagtgttgatttattcatggctttaataatttttggtttgggtacactgttcatccttattttatctccgtttattgtatgtgaattggttaatcttgtcattaataattgctttttgtttaagttttagttaatattgttctgcacattagttataattttcccacaaatcaaagcttggttatttttgcttaatttcttgaagaaacaattaacgttgtcaatggagagattcgaattggagaaattcgacggaacgggagactttgctctacggagagaaagtttgaaagggaacctagtgcaccagaaagtctccaaagttcttggatatgagaaattgttggttgagaagaaactagacaagatagccaaaataaagaagatgacttattacacgttcatcatgtacttgtccaacaatgtaaggagaaagcttatcacaaaaa

SEQ ID NO: 187127 - DNA, 2136 bp, Cannabis indica
aaaagtctgtaaggggtagtgaagaacacaacgactgaataatccccattgaagagcgcattgatctgtcattgtcctactctcttgattctggttcttttattttctacagtttgttatctgtattcttgaaagttggcatggcctgtagccctcgcatgatcaacagcctcctgaaaaattacgtatataaaacatcaagaaaacttgtgataacaaaggccattgagaatgatggaagttacataatcaaaatttgatggatgggagataatgaccttttggcccttcactccgatttggcataccccacagcgcaacgtgaagttagaggtgtctgtgaaactccttttcctgagaaaaattcacgtaacaattaacataaagaattctatctaaatatgcatatgttaatgcacgaatgtgcaaagattccagtatttagtcaaaactatgctagcactcctccaaggaaagctctttattgttcagttctagtctcaaaaacagattatagtcgatatacaacagtcaccttagccactctccaatcagtcaatgaattacggaacactggcaatcattttggttgtaaactactaacaagaaactgactgaaaaacactgcaaaccaacaatctcagccacaaagtacccaactagtcactcgctgtacacctcacataagccttagggaaaggtctatcaaacaatgatctaaagctaagaagccaaaagaacgattgcactgaatttaacagaatagttagacaatatgatggaaatgttttggttgacaacatgttctgaaacttgaagactagtgtggtatgtacatctattaccagaaagcaattgtgcggtatgtacatctataataaaacctaaattatagtttactcgcctattcaatggtaagtgaggtgtagacaagtattacctttgttgctcctttataaagttaagagcaattccttcaactgagccaatagttctgtccggctgcacggaaaatatagtctgatcgaactcctctggtgctccttcaaagggagaactctgataaattaagatatataaagtcagaagacaaccctttaagtggctaactcacatgtaaaaccattaccacagatcatcgaaagaagaatgaacaaaatactaaaattagaaaaaccaaatttctcgtgtcctgaaaactgcactggagtaattgaaacaacagaggtggggagagagtaagccataagaagcttggcagaaggcaaaatatagaagtgacctaaggatcatgcaaaaatcttctttgtaatccctctaaaattcggtgacagacagatataagaatatgataaaataaactgaattctatacgtacagctaaagcatcatagtgaagtccatcatagatcagcatgacccgctcagagtacctcatttcctgtcaaatagattattccacatgaactaagtaagaaacgctacagtaatagcatggcaagctgacaaggtttcgatatatgtaaaagtaaaaacctattcaaatgctcacctgtccatacaaatcacatcgtgtggtttggatatcatatgccgcgatctcacgtccatagtgttcagctaatattgacagctcaatggcaccttgatggtagatcaagatataagtaagccaattaaatattgtaatgcttagttgtgacgaaagtcaccataaaaggagagaaaatcttcaatttaatatttcgataaatatgaactgtgacatcgatatgataagccttccttgagtaggcactcaaggagagtcaaaaagaacggaaatactgccaggtcagcagctgagaagagtgaagcagcaggttagttattagagttaggctatagtagctttagggtgtactgagttgtgatacaccagcaacaatagaataaagttagtgcccgaaactactatctgtctaccatctcggtacatttgcagggacattcttatcaaattggtatcaatgcactgatcttccatgtatccaaagagaaatgctaacaatgaagcttgggacaaaagatttgagatgttacgacaacacttcagtcggagctcgaggttatgaaatttgatttacagagggtgtc

SEQ ID NO: 187128 - DNA, 1247 bp, Cannabis indica
gttgcaggaatacttgagtatgaaaccccattaccaatgaagaaacttcaactcttaaaaccaatattgcctgctctaaatgacacttcatttgcaaccaaattttccaacaaacttcgtagtttggccaattctcaattcccagctaatgttcctcaaaaagttgacaaacattttttcttcacagttgggcttggaacaagtccatgtaatagtaacaaaacatgtcaaggacctaatgggacaatgtttgcagcttcaatcaacaatgtttcttttgtactcccaaacaattcagcccttttgcaagcccatttttcaggtcaatcaaaaggggtttatagtccttactttccaagtagtcctataattccatttaattacactggaaatcctccaaacaacacaatggtgggaaatgggactaagttagtggttcttccatttaacacaagtgtggaggtagtgttgcaagacacaagcatccttggtgctgaaagccatcctcttcatctccatggttttaacttttttgtagttggacaagggtttggcaatttcaatccaaataaggaccctgccaaattcaatctaattgatcctgtcgaaagaaataccgttggtgttccatctggcggatgggttgctataagatttttagcagataatccaggtcagtatccaattataaatcaagtgtttattaatagttttgtttatatacacacaaacttgacacggacttagatttatgtgacaagtaatttcaattaatcattttaatttaagatcacctatctaaagtgatttaccacatatgtatgtgtcatatttatctacgagcattgttattgggcaccagtggtacttagcacatctagacatgtcgcattcgattagcagaccaatagcgatattgacacataagaggatgctagatactattggtgtcctgtagcatttctctttgtctatagttcaaaaatttgatcattttgcatgtgttgtcaggtgtgtggtttatgcattgtcacttggagattcacacaagttgggggttgaaaatggcttggttagtcttagatggaaagttacctaatcagaagttgcttcctccaccggctgatcttcccaaatgttgatttttattaatgacctatttgaaatagttttctaactctaagctatttcgagtaactttgtgattgttctatttttattgtttgcatttttttcggctttggtat

SEQ ID NO: 187129 - DNA, 3045 bp, Cannabis indica
ggaaaaattggtaagtatctcaaagaaagttgattatccctattactactagtattaaacaaaagaaagttgtattgttcctttatgtaaacggcccatgtgggttggtgggcccaattataaaaaacaaaacaaaataaaataaaacggtaatccacaaagacttgcttttttaatttcttaatgacatgtacaccttgcaattatcaataacaattctccattattgcatctttcacaagagagaattttgatgaattatgggacccaaaacccaaaaggaagaactttcttccatacccttttgtttcttggcttgcttttttggacaaagacaccgaaatggtgggggtggtggtgggtttttttttttttacttctttcttagaattaaaaaaaaaaaagaatatatatattatataatttttatataataaggttgaaaggaatgaataattaggacccaaatggagccctatgaggtatgccttttcttcttcttgcactagaaggaggtggagaaggctggggggataaatgtcttgatgtgagccttcacgcaactcttcttcttcccttaataatcctcttcttgacgatataccttctcttcttcccatttcctcttcattctttccctctaaagtaaagtttgcatcaccatttctctttattcccacaagctacattcatatataattaaaaaaaaaactatattataaatttaatattacaaattttaagtcaatccaagaataacccataatttctataacatgggtgattcacattcacattcatattcacaatctcaatcgcattggttatatatacatttacattatatgcacaatcacatatgtggtggtggcttatgataatggtaattatcaatgtggtgggttacaatgacattgatggagatgggtttatagagagagttcataataaaattatttaagtgggtgaagatggtgataatgatgatcatatatagagagaaagagtagtagtactagtactacatccaaattgaaggtaaagtaaaggaaaaggaaaaataaaataaaataaaataaaataaatgctaaccttacaaccaagtgaacaaaatcgaaacgggtccagtagacttctcccacagatttcacaaatgtgagccacgcccttaccggtcttaggctgaggtctctcgttgaggaacaaaaccctcgcactgtttatcacatatgtctgaaccccactaatatccaacactttctgaatctcagacactctcaccacatcgtgatacgaagatcgcctaatctgaataaaaaaaaaagtacagaaataaaacataaatcaaaaagtcaatgtaggggaagaaattcaaattcttgataatgtacaggactgatttcgttaattacgatacaataacaatatttactattattaaattgatatatctaatactttacctgaatgacttgatgatctttatgccgggaggagcggcaatagaagcaaaaggcagtggctccgccgccgccgccgccgccgttgttgttgcaatccaaacagtacatgttacattcgcttctggcggcgtcaccgtgagtacggcaaacggtgaaaaacgacgtcgtcagcaatggctcaagccacggagggacgagcattttgttgtcctgttcagtgatcagtaatcgtacagtgcgtccaattagaaaagagagagaataaaaaatacaagcaggtgatgatgaaacgggaaagagaatttcaacgacattagtaccataaggtattggaagagaatgaggaagaagtatttgttgtgtctgaaatgtaacggttttgataaaaattattctcttcctggaaatggcctcggattaatcaattcgccatttgtacggacagaaagaagttgcagaggaaggaaagagaaatggttagagagagaaagaagaagagaagaaagaaaggggaagagaaagagagcctaaacgacttgtaacttagaattcaacaacaaaaacaaaggcttagactaggggacacgactcgtaaaacaaaaaaaaatgccgaagctatgatattggacggttgagatcttaggtagtggctggagtcaattatgaggcgttggattgagttttggacagggataggtgggtttggcgcttacgctactttttggatcttctttgcgtctctacgtaggctccagctcccacaaggtttagcccactaggctacgcataagccgattactccttccaattccctctttcgatgatcgccacgtggcatacggctaatatccactgtagatctattattaatcacccaaccccatattttgggttttctttttcctcttcttaatttttgaaaaattattaggctatgatatgaaaatttgagttggggacccaaatgaaagaaattgatcaatttcttcaaaatcattttcgagaaagaatcgttttatttttgtagttgaatatttcaataaagatctatacaaatttaattacattcaattaggtcattctcacatatccatttattctcatataaagtaagcatgtttttccattttcaaaaaaaaaaaaaatatatataagcatgattttataataattaattatgtttatttttttttatcaaaaatcaatacaaatagtaaatatattttattttataatttcacccctagttgaaacaaattaaaccttaaaatctcttggtagccaatcatttctttacttttttttttttcttttcatatgtattaaagatataataactaatatggttgacgttttagcttggtcatgaaacgctccatatgcataatttttaggcagcatgtcatgtcggaagggatattttgattttattataataagaacttaaaaaagaagagacttaaataaataattaaattaattaatcttttaaatttatatttatattaagaaatagttttgattagataaacattatttttttgcaaaattattgtggccggcaatactacttagttggtat

SEQ ID NO: 187130 - DNA, 3488 bp, Cannabis indica
aaacaaactgcttaaactgaatgatatctcaccttaatcgtggatcacttgtacaaggtgtaaagaaccaaccttgaccgcaactataaccagaatagatcaactgcaacaatcaattagaagagttcagctggtaaaataaataagcacagtgtttttctcttttcggtcagtaaaacacattaacatcatgatacaaataacaattctactactaaaaaaccatcgataatagtacataatcacgagacttttcatataataaagaagacaaagcgcaccttatttgaaattggtccttgtgccaggtaaggtttctcgttacgtagatgatgaaacccataagcaacctgagcatccattcctgaaaatataaatccaataaaataaggcggttttgtgtagaatgataaaagatatagccccggtcttgttcatataaaactacgataccacatgaattagacaaaacatacctatgctaaagtaattataaaatactccttcataacaagtctttttctcaggcaactccccgtcgatatccaacccctgcaacaaaaacatttcacctatttaggttaatatgttcacacgaaaaataaataaactcaacatgtttacattgttgtagatagatcatatatcttgacaagtaaaataatctcttagacaataaacatagacagaaaattaaaaagcaattagatgaaaacccccgaaatcccatcgcctatcctcttcataactatttttctgcatgacttataagattcaaaagaatgatgcacatcacattgcctaatgtccgagctagcataatacagaccagagccgagtaatatagattacgtgctataatgctatatcgaccaccttctcgataaatattcttacattgaaaaaacagtgcgaggcttgaacaatataacaattaagaacataatttttcatagcagagaaacgaaaaaaaaattaaaagtcgttttacaactgaaacattcataaagtgatgatgctctccaaaggaagaacctaattaaaataaataaatacatgaaaactagctaaaattcccaacctcatcaagagcacactcttctgtatgcttcagagagtgaggcggatccacaacttctccagcaggcattgacaatagaacttgccaactgcatcaccaaaattcatattagccttctaccttaaacaatgtctagccaaaagaaatgagaataaaatctatcaaacctatacataaactaaaatgtagcacatgtagtctttgtaagtgtagagaaattctattcgacattcttcaatgagaccgctttcatttatcatatatctcaacaatgccaccaaataagaccatatctgtaattgaataacaaagaagagaacatttacctatccaaacgacaaatttgaccagtagtagctctattgagtgtttttttaatggctgatttccatgcaaaagggaaagaaccaccctgttgaaaacatccaatccaaaccatcaatgctcaacaagataaggaaagcaacaacttacataattcaacattcgaaagaagaaagcttacccagccaaaactcctagataagtcatttcctgtaccgagtggaattattcctacgggaggaactggatttcgactctgtttgttaagttctccaagacatcccaatacccaaccaaccgtaccatcaccgcctgcaacctggccaatcatcacagtcaaaaattgacgatatcctaaacgccaaacttaaaacatcaagtgaaaaattgtcaacaacatcacttccactaatgtcataccataactctcatcttttcacgacactctttggcacaggagtcaccaagttgagccaacagttcgaggcaacccagtccataacggacaaattcgtgaggcttcacatctgataggtcaaaaacctgcattaaatttttattttgccaattcaaaaaacacccaagaacaaagaaacaaaatctaaaactggaaaagtaggttcacagagcaaagaaaagaacaaaaattccaagacttcacataatattggaaaacattcagtgcacagttggtttcaagttttccaaaactacttgattacagaaatcaacacacatatagacctgtactgagaaaccccatcagaaatgaaatgaaaaaaagtaggtgaactgaacacgtaaaatgtgcctcaaattggattgtgcaagattctaattgagaaactacaaaacaacaaacctcaaaataagaaagtcgtgataaattctgtctcatacataaaacaactaactaacaaatatgacagaacaattcctagaagtaccaaaacatcactactccacagtctcaaacccatcattgttcatactacgatcccttaagcaactgaaacaaacatcaaaattcaaaactacatacacgtgcctacatgcatttccaaagtaaaaaaccaaccttttcaccaaaaaacaaaaacaaaacctgaactttcttattggttgttttacaaaattgggttttaagaaataaaatcaacaaaacccaatttacatcgaaattcgtgagaatgttttcacactcaaactcaaacaaacaaacaagagcaaacctgttcttcccccattaactgttgaagcctctccttaagcataggcccatggcgaccaccgctacgagaattaataaaaaccaccataggacacaaaggcgaatgctttaactcctccaccccaaccccatcaccatcaccatcgccggcggcagctatagaggaatcagcatcgccgcgttcttggagacgagtctcaccggcggtagggtctttaaacctaatagagtcacgcatagcgagacgcaagtatcgaggcatgaaaagcttcttcttcaaatcctccttatcaatcctcatcccactcagtccacaacccctaaacgagtctatcatcgatgacctcgccgcgatccgggtcgggtactcgccggccttcgacggcgagcccattgtccccctctgagaaaaactttatttttttttttttttttaaaaaaatcaaaagcccaaatctttctaaaaaaaaaaccccaaaatccaaaaatcacatcataatcatcatcatattatatatatataactgtaccatatacgatctatacgtataggttgtaatatgtaataatacataataaatgtaataatgaataattaattaattctagatagaggacagttcgccctggaaatttggcctttgaattttttaaatattattttttaattttaattttaattttggcggcggtttacactctctgaaaataatttttaatattaaatcaaaaatgaaaatgtttttttttattcggtaaccgaatcttaagtcaggtccgcgtgttttactttgtttttacgaaatacccttgattataattttatttactagaaatgccagtgagtggtgc

SEQ ID NO: 187131 - DNA, 2337 bp, Cannabis indica
aactaatcctgatcattgatctatttacttttctatattgccaaaattatgtaaagtaaaattaatgtctccaacttaagaagcttaagcacttttttcggcagaaagacactactgccactgcacttctatatctgtattttatcttacttttatgccattgaacgttgagatagtccagacaaagaaggaaaataataaagcatccaaaagacaatttatttgccatagtattttggaaatcacttttatggctaactaaccattacagtgttaggctgattagagtagaaatttaattggttgctaaataaatctatactatatactactactgttggcacacaacatctgccaaaatcaatgccccttgttcttgttcctgttcttgatttccttctccttctacttctttttcttctaaatcttccactatatgctgccggcagtatcgaactaataccaaacacataaatgctgcaaaagaaaattagcatatacataaggaattttcgaacaagttacttgccacatggaaccaacataatatatcgatatcttaagatgaaatcacctgtaaaaattcttgtctttagagaagacagattccaaaaggccgtgattgctgatattgccaccatttttttatgtgagcaagttccccatgtttccaacaccctccaaatcaagtactcaactacatgcccacagttcacttgccttttagtttttatttatacacactcacaataagaagaatcatttacagtcagtttggttgatccttttacctctttggctgatctgaatggagtaagatgagtacatttttgggaccataaacgccatgaaaaaccctattcaaatccgctcaaagtgttaggactcctattatccacataaaaaaaaaatgacaagagtgtgaataatgatagatggttggaagtaagtgacaatcactataccaattgctgagagtctccacagggtaaaaaggtggccatattcagctcctaaaagtaggaagggagctacctgtaataaccagaagaatgggagttgtctaatgaattcaaaatctaaagaaaagttttgaagtaaaccatgagagcttttgtgattactttgagggtcatggatggctctccagagaaaagatctcttgtctttgagattgcaagatttgtaaacggtagaatcactttagcaaaacgtaaaatatcgtcttctttaagcttgaattccttattcccttcattattatccctgcaagtacctcaaaaccattaattaaaagcttaagctccataaacttaacataaaccggttgcagctgtacctttggcgtattgagtttgagaagaaagacaagcctaaaaacaaaaatcctagcttggaaatcgctgagaatatgctgaaaacatgaaaataagcctaaatttagatgtttatataaccagaaactttagagggagaaacacatagataattaaagaacatacctaaaactaaatccttgtgcgaagcaagaggagaagaagaacaaagatccaaaaccaaaccaaaggctcgacttggccacatctctccacatgactagatcacttatcaaatacccgattcgatctagactagcgtgatagtcctcatcaatttctttactaatttttttttttaaaaaaaaaggattgctgaatggaagtagcagaatatttggaacttacttggaggtaaacttgaagagggcacacaaggaaccaagctcagcctttccttcttagaccttgtgctatggcgccttctcctcggctttccaaactcttcagccagaggtaattccttctcttctctaacttctatttccgatcgcctcctcgatcttctggcattccttggcgaggcacaacccagcaaacccaattgagatgtcctagtcttgcaacgccgccgcactcccacctgctctgacggctcttcagccatatctagccgatcagcgagacgggtcttggattttcgaagaggggaaggagaaagaagaagaagttctttaagaggaagagaactgggagattttagacacagagcagaaggtgataaagttctcttgggcgatgactcgatgagtccaagggagagatgagggacttcttcggtttgagccagccgcgatgctgatttagtccgggaccggagctcagatcggtgctggtgatttgggggagttaaatccataatattcaagcaagagtttcttcgaaaaaaaaaaataaaaagaagaaaaagaaaagaacttggtcttcgtgaatacagtatgagaaaattctggggttcaat

SEQ ID NO: 187132 - DNA, 1879 bp, Cannabis indica
catcattcttatttcgatcgatagtacttggaaggcctaagtacttgctatgttcatcagcttggaccattcccgtgacagccataattcgttgccgcacagaggcatcaatattgttgttgaaaaaaaatcaatgattttgccaagttcaccttttgccccgaggcaacctcaaatttatgcagcagagacatcacacgagaagcttcttcctccgaggcttgacaatatagatagctatcgtcggcaaaaagcatatgtgagactgatggcgcaccacgggcgatcttacaaccataaatccattgtctttgttcaaatctttgaataagagtagaaagtccttcaacacacagaatgaacaaataatggaccaccttgtcttatgccacacaagggaataattggcccgattctctgtccaccatgaacaacattgtatttaacagaagacacactggtcatgatcaaagcgacccaactaatattgaatcccatctttaaacgcatagcttcaagaaaggcctactcaatgcaatcatacgctttgctcatgtctaaattaagaaccataaatccttttttccctttaatctttctttttaagtagtgaaaaacttcaaaggataccaaaacattatccgagatcaacctcccaggaatgaaagtactctggaaaggggagataacatggtcgaggagaccttttaatctattagccaacatcttggagataaccttataaagaacgttacagagaaaaattggcctaagatctcccatacccactggattttttttctttgggatgaggacaaggttagtatcattaagcccctgaggaatggaattagagttgaaaaatgttgaacaacaactacatccgatccaacaactgaccaaaattttggtaaaaagtaggcgtcataccatcgggtccaggagctttatcgggatgcatatcgaaaagagctaccttcacttcatccatagtaacaggttccattaaggaaatgttttgaagttgagcaataaagggtgttatacaatcaacaatctcatgccaatccaacaaagaagcttggaaaatattagagtaataataaaaaataacctgatgcaagccgttattccaatcaatccagttcccgtgatcatctttaagtttttgaattgtgttgctattccttctttttattgcaaaagcttggaaatacttgctgttacggtcaccatcttttagccaaagttgcttcgatctctgtctccaatacacctccttttgatggaaaatatttgccagcttctttttttcctcagagaataaagaacgtgagtgggcatctcttaactttttgagtcttttcaaggtagattttgattgagctattctacctttaaagtcccttgtaattgtattcccccacttagctaaaatttcaccacaataagccactttttcttgcatggtaactagaaattgtctacaacaaattacaaactggttaaactggaatgtgcaagttactaatcttcatatcctcatcaggtggatagatagatctaaaaaagcaagtttaggagaatggtgtatgctgctgccttagcaggttggtgtgtcacatttggtagctcatgaacatcaagatttggcaaccaagctctggttcaggtaatctctctttacaagagctcaagtggcatatcaagactaggattatttgtataatgcctaggcaagttgaacaaggagacaaaacttggtttgaccaattgtaaatattttaggtatagattaatccatgcgtccttcaaaagaaggagagctataggttgtaaaaattcaattttaatgcaatgaaacttctgattcataaaa

SEQ ID NO: 187133 - DNA, 2582 bp, Cannabis indica
tttttattgtctttgattttaaagtgctgaaactttgcccactaatgatagtgtcaaggagtcttaagaggaattgcccttaggaaaacttaatgaccaaagttttccatatcttaaaaacacaaatgttcttttttaaaaattcaaatttatgttcaaagacaactttttacaatcaagtagacaaatttgttctactatatttggaaccattgaatcaactatacaatcctcaaaaaaaaaaaaaaaaaaacctaagataatacacactttgcagaaagagtgatgatccaacactaatggagaatgtgctggattggttttatctcgttctgctgctcacgagcaatggaagacgagagaattccaagatcacgatttaagaacgtcaaggcagactcacattcggatattatccttgtaacagatgagggctcactggcaattgtttctgatgaaccaacagcaagagctgcatgcgagtccctcaaattcctcaagttccccagaaactgcaagtataaacggcagatgaaaagagccacttcgggacacaaacagctttcaatggcaacattacaattagactaacttcaatgacataaaataaaaactacctttaagagcatcttgtatgcctccaataagcgattagcagctggtccgaacccatgtagttggggtacctccatcatgtgtgtccaaggacggatttcctacagataccagtagaattttaaaattctgcaaaacattatttgtaaactgtctacctccctctcctctcttttgctcctatacttcatatggtgcaatacaagtagaaaagtttaaaggtaaatcaaactaaaaagtagatatgtgacataaaacatcctaaccttggtataaattgtattaaatgctcttgcagtttccagaaaagattccaaatgtgtccgcaattgggattcgacctctgcatactcttcatctgggttgtaagcatgctaaatacatgtagcattaaaaagaaaagtaaatcataacatcgtaaaacagatcaagtaaaaagttcacaaatatataaagcaacagtccatattccctgtaaccatagtccagcaaccatagtccacttcacaagtgatcattctgagaacattgttgtaaaaattaaaagcctaaacataataataactacaccaaccattagtgaatgttaagatcaaagaatagactattagtgcagggaactattaaaaaatactgcttcagggtaaaaaccccttccatataataagaaactagaattgaaaggtggaaaatattaaatttcagaaaagggaaaatgaacagttacagttagcagggttcactcatttccttctcattcagtgtatttgcataataggttaaaagtcgattggcagacatcaaatttcataaagttgtgcagttaaacaattggaataagggcactgcttttcagtcgggtaaacagaaaagtgacatgaacacattcaaagtaacttaaaatacatgaaattaatgaaaccattgaaaagagtgaactcataattctctcatttatagtattatatggaaatgaaaggaaaatgatgagataatagaaaagactattgacagagagttatgtaataacaagacaatgtacacttgtgtgtgtgtggcaaactaaacccatcaatgggtaggaaagtgcaactggaattcctttgttttacctttaacgttcccccttaacactcacgcacaaattaaatgaaatgaatagtaaacattgcgatatcagacaagtctacgataaaggaatgaagaggaaccttagatgccaaatcatccactttttgttgaagatttaagagtatctttgactgttccgaaagcttggtttccagctcagatacatcatgcctgcaattgcaaacaaactttttttaaacagttgaacacaagaggtaaacaaccaggctgtgggcaaatattggggaaccttaattgatgttaccctgcataaaggactacaaaggcatacaagaaaataacatgaaacacaagctcatccaaaaattcacactggtaaatggaccacttcaagtcttcaaggaatgcacagagcatatccacctcattctctctaagaagccttaacatgtttgaatctctaatgttacatgttatgaccgaaactaatttggtaagtcactcctgcttaagcctctcttaaattaaatttaccaattagctaagtgtgaagtaatcaaaagggaagttattccaattaaaaaaggtaactcttacagtggatatatagattgaatctgaacatcagcagggaacaatttgcactcttctgagaatatctgagcttgtttttcagcaattgaatcaatcagctgtatatcctttgctacctgatcatcaacactgtagaagtcccatgcaaattagatgttcggcaaacacaattatcagcacctaaatgcaaaatacaaaggcacatttttatataagagtagactttacaaacttaaacgcagtaaaagtttcttcaacaaaaagaaactacactaggcaaa

SEQ ID NO: 187134 - DNA, 3185 bp, Cannabis indica
ccacggccatgattcgaaccagtattgaacctcctttgtcccccagcatttgaagaaccacttgagttaggcttttgggcgaagttagcagatgcatttcccaccagtttgctgcctgctgagagaacattaagcctctcgagtcgactgtcgaaactcagcagcatactttgtagctgctgccaagtggtattggcttgagactcaatcaatacaacaatagacaagtaatctgcatctaaaccagacaatatgttagaaatgagatgtctctctgggtaaggttcacctgcaagagccaaggaatcagcccacatccttttcatcttgagataatctgccatagattgtgatcccttgcgtgtagtttgaatcttcgttctcagatcgtccatattagctcgtgaatgtgcaccatacaactcttcaagtgcactccacaaagcaaaggccgattgacaacccatgacctccgaagctattgcctcagtcatcgacccatacagccagcccattaagagctggtcatgtacaagccacgtttcatattctgggttaacttccataccagatccaggagcttgttccaccataggaccagtccgaatgaactctgcaggtgcaagccgtgtgccattgatgaacccttccaatcgatgcccacgaatgatggtgtttaccatggttttccacaaaggaaaattgttgcggtcaagtttcaaagagaaaggttggctgagtgtattactgaagggagtagacacaggtgttgggtttgaggaagatggagtagtcgccattactgaaacagaaccagcagtctgcccagcaggagtctgatcaccttggttcactgcacttgtctgatcttgaggagtcgacatagcgttggcaaagttagctctgataccaagttaattttctaagaaatgcagtagagaaaatgatcagctcaaagaggctgatgcagggcaattgtatttataattaatcccagagtttacagaggtggtagagatgaaatccctgccttacacgtggaaaagagaaaacaatcattacaaaatgatagagaatcaaaaagattctattgtaacagaaataaaggctgctgcaatgattgcctagggattggaaatattccaacaaacttggatgacacctcatgacagtatgacgaaaataccatgcatagttttatcctgtaacactatgagttgaaaaatcttatactatcacaatataaagttttcataaattgttttaattccttattattataatttatatatgtgaaggatactaatattattttctcaagttgacaatattatttgatgtctcttgagacgaggcatttaagtgattaattgagtcaatcccaacgtgaggcctaattaatccataagaagatactatgaaagatgcaaattttctttagggaaatgagtcataacattttagaactcaaattcaatctttgttgatatactacgaattaagcaattttcaatttattttttgacaaaattgaacaaattatataaagtgaaacaagacaaagtatttcagttgttttgtatgatatatgtgcctatgcaaaaccttttttgtttagtttcaagtatttatttgagatgtatatgtattatgcatatctatgtaatggtacggcaaaaggcagacgagtacaaatttattattgtggaaaatgatttaaggacggtaattaacacatttattggaggtgattttagatgaaagattgagaattatactaatcattgtaatttcatggtctataacgtgaccaaaatgagcgtttactcgtaacccatatggttgttttgatgtttttctataccaataaacatctaatattttctaatctataacggctttaggtttttttattaaaaaaaagtatgtaatggtggtgagtgagagagagagagagaggtactagacagttggttttttcttgggattgggagaggtttattttgtcattggcaaggcaaaagaagcagcaggaggaactggggtggctaggcctagattccattcaatagaggcattagcagtcaaacaaggatgacgataagggtcccacttctgacatgagcaagacaatgagtgaggaagaggaggagtgagctgagctgagcttagctgaaagtcacagcaggcattttcttctgtttgttttcccacctaaagttgaaaataaaagttggaaaatgacttgtgtagtctccacctccatatgtttaataacctattaatctagtctaaaaaggctcaccccaaaaactccacaccccccccaaaaaaaaagtaaaacttcaccatatctcaatctaaccccagtaccactaccattcaatgaatttcacatatatatatatataacacattattcagtgcttctgaacaaaacttttattttgtgccaattttgatcttgtgtgctataatcactaccacctccaccaccactaccactatcatcatcacatgctttaaaactttgttaaagatcaacttgtttctatatctctctgtctctttttcgttttcttttgtgtatctgtgttaagaattaatgaaaaaaatgggcaacattgcttttagcaaggaaaaaagtgaaattttgtatttagactgaaaatactactgtaaaaaaaacttattcccaaacaacttgaagttgctacagcactatatattttgatatatattttttctgtgtaccttttcaccaaccacatggcctagtaggagcccatcacaaacacaaacagaaaaaagatggaaaagaatgggggccaacttggccctttgctttgtttgatcaagacttgtccaataaattaattaattctttttaaaataatatattaaaaaagaaagaaagaaattattaattaattaaccttgttctgggttgtgaaattatttattatttaaaatcttgaatgagagccataatattagtcaaaatcaaaacaaaacaaacaaaaccagtattttgattctcatgcaaacaagttaaatgaaacagagagtgattggaggttaccatgcatgaccatgcaaatgcaagcacaacttttttataattaacataataaaaaggggttgtatatttcatcatgatgtagagatcgatgctattacaatat

SEQ ID NO: 187135 - DNA, 3163 bp, Cannabis indica
gcttatgctaaagatggtttactagacaaggctttggagctgaaggagcgtgctcgctgaagagggtccaaacccaatgggagatctttcttgattattatttcaagaatgaagtttttaagtaggcagttgactgcgttggcaatgcaatttccactggccgaagcaatggtgagaagccgattccacctgtgctgaaattgttactactttaatgcagaatttcgagcaagagaaagattatgttaatggcatagaaggttttctggagcttatgaaaaaggttataagaaaagttattggaccttactcaccctaacaaatctggcttattaggggaggattgtctcactttattatggggatcaagtacatatcaccagccaatgtaagactctaatacggctcctcatgcatagcatgggccatgccaaaaaactacgaacaaatcaatattagaggcaccaaacattacaaaactcggcctgctctgatagcatattagaaaagttgttcagcttaacccaacaaaatcggtttgtgagataggtccaataaggacaagtggtgaatgggtaagcgtatgaagctagtaagaagttgtttgagtcaaatatgtgctgagtgatttttcttcaattatctctaagttttcttaagtagatattaaattcatgcattctgatggagaatgccccattcactagtaagctctttccattaaagtgaagatgtttcaccttccttcatcaaggataaagctgtttctgacaatcataacctaatcaaaagaacatagtcaaacgatttgttgcaactacaccagtccaacagttaatactaagttaaacacctctacttcttgggtgttgccaactctagattttctttttctttctaattcgtttatagtgacttttatgttgtgaagtggttagatttaattaataagactgtctggggaatgtttggtagaatctaatacttaaatcatcatgtcttgtaattatctgcatgtaattttttacttgtatttggtttggtgggggctgatgttgattgggcctccacaatgtttcttggaaacaattagttcaaccaaaattcaaaccattcattcaattcaatctaaaagtgaaaaaatccaataacaaaattagaagtcaagtaccctcatagtcatagacatgttgaaactgaatgtgacagaatagaatatggtgatgtcacatttaagattttatgataatgcaaagcagcacaaaatgacaataaactgatatcatcagtagcagggaacatggttattttttggtcttgtgctaaaagtgattgtcgagtctagtgtactcttagtctgttttgaggttaaaaaagaaagttgtcgaagtatgtcataagaaaatttgtccatgacttatatatctatgatttaaaacataagcatgcaaatttagtttttacccttaaattagccgaaagagagagctcgaaaaaatatatgaccaaccactgaagaagcaatacgagaagtcaaagactcaaagcaaagttagtattcattgttcaatattgtttttggtcttttttgacttcttgtgttttggagccaaatccaaaaacaaaaagaaaggattcaaaaaatttgtactatctaaaaccgaaggcaaataaaattaatatattgaaaagggttttgctcagttcctaaggttgtcgtcttgtcgtgaattttctctgatggaaatcatatcaacatagtgaccaatcactcaaaattggaccaaacaacccaacatcgaaagctaacatattactatgctctcttaagttcctcatcacaatgaactgtgagctagtttgtttgtttgtttatgccaagttaagctatgcatttgagttcaaaagggtccccacttcacgtaatactgtcagtcacagtcagtgatccaattgtgacaagattattaagccttcaatttaagagggtaccaataccaatcaagtgagagagagcatctaacaactactaccccaaatcgtgtgggactttcttttatttttatggtttgattttagtttagccagactgacatgtgttacaaaattcaacggtgagctgtaaaaatgattttccgcatatatatgtgtggtcggtccaagacaacttttttttgaccaaagccaagtcttttattatgtgttcttgtttaataacagagtattatggcatatattgaatcattacctcaaataatcttagcaaaaccataaaaaaaaagtatcctcttctcaaggttttaaaggccatgttatcataaaagacgtgctaataggaaatcttatcgtggagacgtggtcattaatgggagagttagttttttttttttaattatgattaattatatattttactataattttataatgaaaaagaatctaatatgatgattgaaagttaagtgtaggtaattttatataaaatggatattgaaatatatatgatgatagctagccattcctattgggcaacaaagtatactttaagaaaaagattgttgggaaaattaatcatatatatggccgatatagatagatatgtatataattaagatgcatatatatgaatatgatatctcaaagagagacaagttcatgtgggaacacaaaccaatgacctcaaaatgttatcattgctccaagtatattgagtagcacaaggcttggtactctcaattaattgccactgccaccatgaattcattcctttatattgctttacactttattattttttttattatttaacttacatattagtatattacattatttttttattttatttatgagaaaaaagaagctatttactacttctttcgtgcgtatattattatcactaattctctcttacatatataattactgaaattaatagtactagcttagctacctataacttgatttcatttttgtcttctaaggcacgtaagctctctctctctctgtctctctcttgattagtatgcatattataggtaattagttgggacccgtataataagttatgcaaataatcatcatttaaatctatatagctacgaaacgttaattatattgtccccaagtagtactcaacttttttgtttttctattttgttta

SEQ ID NO: 187136 - DNA, 1632 bp, Cannabis indica
actataacagattcccttaacaattggtcatgggagttggtgcggtttgacatcccacatttgagctttgcataataagcctctggatttctttgctcttttaagagttttcagaaactgaattaaaggagttgatgtagttctccaaccaagccagtttatagtggcttcaagatattttctgctaaaatggcaatcaaagaataagtgtaaattgctttcatccccttgaccacaaatcaagcacctctcataagtgacaatgttgaaatgaaataacttattctttttttgtagtcggttaagattagcaagtcaaataaagaatcgatgtttgagaatcaaaaatcttctccaaaccactccataccagctttgagattcatattccgaagcaagcaaggagtaatcttgttgaattgtatacctttgtagcataaattattgcatataaaacatataaaactgtatacttatcttcaatttgacctaattttaattttgtgttggctttcaaaagtgaataaattagaaatggtgaaaatgatgtatttatctcatataggtgtagtatcctaaattttacacataattattaggaatgggcctatatatccctaaatataaacatctgccagcaaaatacggcggcccaccatttttagaattaggacacgtgcgcatatccaatagtctaaacacataaatgataatagtacactcttcaattctcttctcttctggttggattggatttatcactcacaccatcaaactcaaacttttcttactcttttctcctatgctaaacttcttgtctcattctaactccccaaatttacatttatatctaactactagtactaggtgtgagctataaatatatatataaatatattatggccaagaaatttaatgggtcataaaaaaaatatttttattttatataaaaaatgatatttttcaaaaaatttgaaagaaaaaatgtacttttgaatccctaaataaagtaagaccttaaataccttaatccactctatataaatagagataattttacaaatatacaaaactaacaaaaagaaaatgcaaaaatacagtttcaccgaattttaaatatttttacgaattttttaattttatttatagaaaatacggtcttttatgttgtattcatgttaatttgttgttgattttttgttatatatatgttatttttttttattattgttttgatgttatttagatgctatttttatgtagttttcttgtcgttttcgtattatttttacgaaaaaaccgtaaaaatataaaaaaaaattcaataaacgtaaaaatataattttttttacaaaagatagtatcttatgtaattattccatctatatatccaattaactttctttaagagaatatactcattcttttaaaaaaaatatttgataaagagaaagaaaaatatgtactgattagaatttataaatttactttacaaattatggattatggaaacgttttgatgttgtgttttttccttgttagtgacaaaaagctatataataataaaattatttacaataacttgttattttttttaagcaatggttacttacactatataataaaaaatga

SEQ ID NO: 187137 - DNA, 2548 bp, Cannabis indica
tttttgtaatagtaataggggaatgaaaatgatattttgatatttggtttgtttttataatgaatataggaatacataaactggtacttttgtgataaagaaaaatggaatgagtactgttatttaaagtgtattcctttttattttactttataaaagaagggtgtagaagggttaagcttgttttgctttaattttttgtaaacatttgtaatagaaatgaaatttcattacataattagttgtaattatattcatgtatatatatgtattctatgatgtattatataatgtataatgtaaaatgtaaaggcattacaagattttgaagaacacaacaatggaattggaattttgatttcatgataaagttgattacagccaaccaaccaagctcattgactacttcactttcccattccacactctcctcttctagtttttcctcactttttcaaagtccttgttctccagctgatcttcgataattatagttataatgagtactaaaattgcttttgtcattaataaatgattattccatcacaatttgtcaatttatagctttcttataattatattcattgaaataaaagacaataaattgcaacttagtacttgagtgaaacagagttataatacacagaaatattgatgagacaaattttgtatattttataacaagacaaaaatttacatatgtacaatatgattatgaatctcctaactagttgttaaggatgttgagaaaggaaactctgattttgattaaacccctaaagagtctgtctagtctttcttcaaagttttggatgcaagactctagacattgcagctcagtttggacattctcaatgttcaatggacacttatcagactgaatgagaatttgcaatacagaatccacattttcaaactcattcacagctttttcttcttcctcacacccaatctttttgctttgcattaaaagctttgaaactaaggaccagctgtttagtttggaatactgtgactttggcccagaaacaaagcacaacaaggactcaaatactgcaagagtggctgtttctacctctcctaatgctccagccaatgccatggtttcgatgtctttgtttgaagcagataatattgcattctttgagtcattactctttagatttcttaaggccttttggattgctttctttacaactttccttgagactgagtatcttttgatctcgctttcgagacttcctcttcttcttctcatggtggattggatctcgcgtgcgcattccttggtgtgtagcacggcgtctttggctgcgctgcacatgtccaacagcctcagggaaccatctaccacttggtcaacccacttctcatggcggccatttacaagtgcttttcgagtgaggggcaactgaagcaacttctcagcacaattatgcaaatcctcaagaccactcaacttttgtgttattgaagctgaagaagttgcatttaaatcccctaatctgcacaagtgttcttcacattcttcaaaaagagggtgtggtttggtggataaaatgtttgagttagccattggattatttttactatctcaaagaagagatggaatggcctttcagagttgaatctgcaattgggtattgctacaatttgcctctgacttatttgttttcctaatgctcaattatatacactgagatatggagaagacatacagagcatctttgatcttattcttaagataatcaatattcagcacacaataatgtgtatatgattaataagtagatttgtatttaatagtaaccatgttcccttcccaccgttatatccaactcattttctcctaaattatttgcttgaagaaatctctaagtatctcctttcatatgaggccgttgtaatatacaatacattgcaccacgagtggttttgccaccaatttaattaatgattcaagacaattgccattatttgcttctaataaattcttatgcacgagtgatatatcatgagattaccaaatgaaggactggtttttgcaccgttgtgcaaacagctcaaagttgacgatgcccagctgtccagccaagactcctacctatctcccatgttcctggtatgtattgttcttatctttttttctaaggctggctgctatactagtaattaacttgtagtagctctatatagattattattaataaactgaaaataagattgactttcctataaccatctgctcaagatctaagttaagcttaatttgacctttagtactgtatatattaatcaagccctgcactattattattaccttattactaaaattttattgattgcaataattgcccttctttggatgttacttactttgtcatcttcctatgtgatgtacttttgtccttttcacaagagaaatgctattactttatattgttctgacatatataatatattagttttcatcacatattttaactttaattgaaaatatgacactggctaaattaaactggctactaaattactccaaatcacagta

SEQ ID NO: 187138 - DNA, 1035 bp, Cannabis indica
aaaattgattaaaaatgaagctaacaattgatgccggtttacaagaacaagtcaatcaagagaaaaaccattggaaataggttttagaaagaatcattgctattgttaaacgacttggaaaaagtaatttagcattccgcggagataatgaaaaactatatacaaatagcaatggaattttcttacaaatgatagagttacttgctgaatttgatccaacaatgcaagaacatgttcgtcgtatcctaaaaggtgagacacattatcattatttgagtcacaaaattcaaaatgaaatgatacaactattggcatatgaggtgaaaagcgcaatagttagtagagttaaagatgcaaaatatttttcagtcatactagattgtactccagatgcaagtaatgatgaacaaatgtctcttgttttaagatgtgtgaatgtttcagaaagtccaatttttgttgatgaatatttttaagatttcataagggttcatgacacatcaggacttggtttgcttaatgaacttctatattcattgaatactcttggacttgatgttgataacataagaggacaagggtatgacaatagatctaacatgaaaggaaaaaacaaaagtgtacaagctaggctacttgaaataaatcctaagcattttacactccttgtgcccgccattctctaaatcttgttctttttgatatggctcattgttgtcctaaggcagtgtctttttttggtgtgttacaatgaatatactcattattttcagcttctacaaagagatggaaaatttttacaggtcatgtaccaggtttcacaattaagccattatcagaaactcgttgggaaagtcgtgttgttagtgttaaaacggtaagacttcaagctccacaaatagaagaagcttttaattgcttggcaaaaggtaatgaagatgccaaaacaaggagcgatgtagagactttagcaacatataatattcataattttgagttattgttaggcattgttatttgatatgatttgttgtt

SEQ ID NO: 187139 - DNA, 3028 bp, Cannabis indica
gatgtgcatatatttgaatacttcttccatctgattggttctaagaactgatcactacattcgtaatcatcagagcctcgccaccggcatggcttgcttttgctgctgttaaccaatgcaatgttcattgtatttggaaggcttgagagatgctgcacatgaagtgctaactgattgcattttttcccttccaggtacaaacgcaagccgacaactggtttcttatcagtcgaaacctaaaatgacaaagtaagaatttatgagtttgccatagtaagaactgaattttccatgctatctgaagtagttacaaaactacagcaacaattacagaagaaaacaaggccttttaacttttaagagcatcaacaagcaagaaaaactaataagtagtctctcaagagataaaggcagggtgcagagtccagagagtcggagacctcctctggggtacaacaatctgagtacaagtagtgatctcaaagaactcaggatcttgtacccaacttaatggacataaggatgccaaatagcattcaactttttacttttcatctaaaatcaatgcaagtaatgagttagtgtctcagcagtgagcacttatatcaattttccgacggactcaatcgcaataatagcatatacattttttccaaactaaaagccccaagagaatagtttattttttatttttctttgatgggtatcacggaatgcacaaaacatttaatgaatatatgtgttaactgagtggagccacatagaaaagtagaaagcatagataatgagagaaagagatcaaaaaaaaaattgtattaaaagtgtgtagatatctgtcccacagtggctatggaacacatatatgtgtgtgtgagagagagagaaagcaacctgagtgcagctgacattgatttttggaccaaagaaactaaattgtaaggatgcacaaacaggtcttttttctttgatgtcggagaggcagctcgcaaaacataggtgcccattgccttggaacttgaaactccaagaagtactgtaaatcctcaagagcaggcttgtctgaaaagataataatgaataagtacaatttgataccaggcaaacagcatccaagaatatttgacagtataattttacaatttaagcacaattatacatgggcagaccaaggtggactcgtacactaaaagacactttatactctcaaagccaatagtcagagtattgttattaggatgtaaacacttacagcgtaagtacagattgatagcatgactaagatagccactgcctgagacgccagtaagaagagaaataataggtacaaacttaaaatgaatagcttcaggtttagcagccacagtttgcagccaactggagtgactgtgcaggaacacatcccctcctctttttgaacaaatgatagtgagaccctgatagaaaaaacaaagttagaacaatagttaaagtggaacataaatcttggttctttatatattgttcttaggtgttttgcttacatccttgcttgatgtttctgaaatagtggtcagctgcattgtgcttgactgcagtatgcgactgaacacctcagggacctacagaaatgaattcagctcatcaactagtgagtacatgtaaataaaataaaataaaaaacagaatgaaattaagtgttactttgtgtttgccatctcctgtttttctctgcattaaggaagggcttctgctgtctgagaaaagaatgtctcccagatcctccaagtgtcctcttaaatcagccggaggaataggtgatgaagacttctgtcgaacacatactaagtcttgacctccaacagccatccctactattatatgtgttccatatgacttgataaacctgcctaataaatttgattagtaccatagccacagcccccatcatgtatgaaaagttgaaaacaatgctagttaaagtacctaaaaattcttttccagcataaagaactatagaaataaaaacatgacgatctaatatacactgtccagattgcatctatttatctaatctttccatttttattggttatgtttatatgcagtcacatgacgacacttgattaaactactaaaggggaactaggaatatgtttacaggttgaaagtaatacatcaaggaagagctgccatactaacttctgttacaataatataaggccataacaaagactgatgattgaaaagttcaaatatctcaaaaattgcttatatagtagggttttgagttgagaaatgtgtggtgaaacttcttcagagtggcagaagttccttacagatttgccagggagagactgtattctattgtttccatcagcaatataaaagggctgtatgctagttgcaaaaagctgcctaagagtttatttaagaacaggcacatgccatgacaaggctgttaaataaataattagacagacatagtctacacatacaagtagattataagtaataaaatctcgtacaaggagaattactataataatctaatcattgcagatgctaaattgcataatacctggctcaaatattaccacaatgaaaagctcaatttttttgtcaagttgtcaacaacacatacctattacactagaaaatcaaagaaatcatgaagagccaattgaaccttccaacttcaaaaagattgacttattaattatgttatgagtgtaacaaaatggttgtcattgtcttaaaggacaaagaaaaatagtaaaaaatacctagacaatgcagcaggatcccaacgagtggaacagattttttacttcatcttgcagaactaatggagaagctgtaagatgcaagttgtacaatgagatgaagtagccatcaaaagcaagactcttggtgtctgcaacatcatgataccaatctccacttaattcaaatatagcattaagatagcctgaagggacttttccttgaactgaagatctctgattaagtaactcagacatctgcagagaaacaaaatcatatatacaca

SEQ ID NO: 187140 - DNA, 7984 bp, Cannabis indica
ggtttagtgtccgagatttccttcttgtgtattgcgcttgtttgctgtaattttggcgttatactttgactaacacaagttcattcttctccaaaagaaaaagaaaaaaaacacataaaattatattttcatacaatcagcaacatattttgataattaaagtacctactcattgtatcagcaacaatctgcaaggctggagactatcttattagcattacgagaaaagttcccagctcccataataaaggttgagaacttgagatgtaggtagtaatgtcatgtagctgcccctgcctaggccagttttaccaaagaagctgtatatggagtgtttggaaggtagacgaccttgtgggccatgttgataggatcatgttagcagccacagccaacctgcttcaccatgtaaatgtaatcaatacgatagttgcttccactgccactggggaagactaccagcagcaccgtgtagtgacatgggacatatagtgtgttagtgttcaagcttctttggtaaagttaagcttgtttgcattatgtgtgagtttaggtttataatgattaattgttgatcatgagtcatgacgattaatccattattatctgatctctcgttaaacatttgtagtccaactggtttgttaattggagttttcatatttggtttttcgtactaaagtaaaaaaaaataaaatatttttattgagggaaataaaacaaaaaagcttccgataagaaagttgaatgtaacacgtggcgacatacggttggaagaaaccatatccagcttatccgatttggaaaaatggcagataaggcattattgtccacaatgactctacatcacaaaaaactaagaaccaaaacaggagagcatcactggtaacacccaaaaatatatttccacatcactccctcagcctaatcactttagataccaataacacagagctaaagaaataaccaattataatcatcttgggaggttgagaaaatggcacacgctatggcttcaatggctggtttacatggctcctcccagactgtcttggaaggcagcattcacttagtggctccaaccgcttgacattgcagcacaaccgggctctgaacaaccgaactgggttcacagtcagggcccaacaggggtcaaccgagaccgaaaccagcagccgtcgggctgtgttgggcctcgtggccgctggtttggcttctgggtcttttgttcaggccgtgttcgctgaggccaggtccatcaaagttggcccacctcctcctccctccggtggattgcgtaagttatcgatccttaatagtatatattgtatctccatttggtgtttttaaggaatttgtgtaactaaagatggagaaattgtgttgtggcagctggaactctgaactcagatgaggcaagagaccttaatttacctcttaagaataggttcttcttgcagccactaactccttctgaggctgctcagagaactaaggagtcagccaaggagattgttaatgttaagggattgatagagaagaaggcttggccatatgtccagaacgatctccgactcagggctgagtatcttcgctatgatctcaacactattatctcttccaaatccaaagaagagaaaaagccccttaaggaactcgctggaaagctcttccaagacatcaacaatgtgagaagctcattcaaatcctcatttgtttatatttaaaagaatttgtataattaaggaaatactttgatggcaaaaatttaactttttttttcttttgttttggtgcaaaacagttggactatgcagccaagatcaagagctcaactgaagcagagaaatactacgccgagactgtatctacccttaactctgtccttgctaagcttggttaagaggaatttgtgtatcttaatgtaatgtacgctttttttgaatgtggaggaattagttttctatggtggtggtgggtttggttatggtagattctggagtgctaatcatgttttttcatgataattataatcaaatcgtaacttgttgatatttttggaaataaatatattacatttgataattaccaaaactcatcgtcaaaccaaaatctattaatggaaaattgaattccggaagaaacagagtgacaattcgtctagattgttgcactatataataatttagtaattacatttttattttaaaatttatggatgttttctagtctactatcatgttaggaaaatatcagtgtctattgtcaatttggttgtgtcgtttatataaatttgtccttataagaataatgtctccaaaattcttcactagtattttgagagtaaataactacatgtagagacaaacaaaatttgcactgtcataatcgaccaaggaaaaaaaattacctcgattaagtatagttgacagtgtaaaattttcatagcattttcactaactcattgtgcattttattagatttaaaaaataaaaacatgatcaattttgctcgattcaattacaaatttcattgacaactctttctcgtcacttacaagctttgtaaacacagtgtatatgtatatgtatatatgcacaatcaactaatcaaggcacgaaaaattattgaaacaataattatcctttatgtgaatctcaatcaggagaaaacacaaatcaaatccactctatcatgtacaaagatcggttatctgttgggactttatttccctagctagcaaatggcaacactctgttctttgtatttacattagaaataaagcaagaataggtatcagtttcacatacagcaattgataaaatcaacgaatttggtactcttcaaatttctcgagtatttctagtcaagttgctttcgtcgccctgcagcagtggaaagttcattttgagtaaattacaacccttcatatttttatttttaaagtccacttcttgaggttaagattttaagtaagctactttgtttatgttattgaaattaccttttcgaagagatattaactctactctttctgttgtcatcaaatttagctgatgcagcttctttctctctggctgcagcttctcttttcattctctttgactctacttccatggcttttgttaatgcatcaaccttcttcataagagtctgtaaagcaattttatcatctctcaatatatattgaataataacaagtgttgttttatacgtaaggaggaaatatgaagtttctgaatttacctttatttcttgatctttagagctcaaatcactctctttggcttcacaaaatttccttaaactgatcacctccttctgaagcctatcatacagaaaccctgagaccaaatcatcagagtttgtatgagcttgttgttggttaggtgattctccattatgctctccagaaactgctctatcacaattgttaacattgttatttgcctgcatttctgtgttttccttttcaccactgtcaacaactttacttctggatgcccataaacttttctttgtggtattttcgcctaaaccagtttttttcctcaagttcatttctcctttaagttctgcaacagccgtttccttttctgcatctgtatgtctaaaaggagagcctctaatgaaagtggatgctcttggctgagatgttgacctctttctaaggcctccagtgcttgttagaaaggctaagatgttgctagacttttcagttttgggagatccacaaaaaacattaggactgttggtgggtaatgatgaaacttgctttagcccatcttcaagtgtcttcagcctcagcttaagtttttcctatagccagagagcaccaattaataattggattcatgtgttatcataagaagcatttttaagtcaaatttttaccttcagttgtgcctcagctttagctgttctctctgatacagttagtttatctttcaaccgttgcatatctgcctacataataggattgaacattcacagaattaagtgaagagggaatgaaaagcagtaaaaaaagggaatgaagagtaataaaatagtgtggaaatttttggggtaatcaaactacacctgcataagccttctttcttcaagccactgcttaactggcataactttatcattttcatccttccactcattggccaccacagttgctatacggtttgctgaaacttttgctctggcaagttctcgctctaaagtcctcttttcctcctgaaaatttaactcaaacgagtttagcataccacacaattgtcaaaaataaacaagtatattcatacttgactcacattcaattcttcattctgtcgtttgtagtcacgaatagcattggctgcagctcctccagctaaaacaacctcctcaagttctttaatggtttggctaagcttttccacctctaaaaccttctggcggtttgttttctcaaggattctgttttcttcctgcaaatatattacatgtcaattaccttgacaattcatcttcactatatgtcttatacaaaatcaatgtgatatgaatatacacctggcaaatctcaatctgtctcctcaactcaaagttctgattttgaacctcttcaacaatcaaagctctttctaaagcacttcgcaaaatcctttctgcctcgagcagagctgattctttcgattttgtgaggcgttccaaagccttcttatcttcctggagggctgcaatctaatagtattaacatgaaaacaatactgattagtaagttctttcattctgagccataattgtcaaaataaaacttattttccctttcgtgcagtacctcactcttgtacattttgatttcagcctcaagtggagcaataacagaagccagaggaagagagtcatcgtccttttgatttgtatggacccttctaagagctgcttcagcagcaaactgtgcggccagcgcatcttttttgtcatttgttagtctcttgatttcaagattctgggaaatattgttttttacatgacaaactcctctattagatcatatttgaatttgaagtatacacgcatgtttgaatatatctcatggaaagaccataactcaccttgtgatcgagaagattttcagtgactgaaactttctcatccattttctgaacctcgtttttgagctggaaaagaaatgacaacacagaaaaagaaagaaaaaacataacttcagacacaatttaagtgttaaaatactgaatttattgtttgtgaaactcaagttaatattgaaaaaagttactttggtacctcttctactgccttatccttaagagcttcagttgctctcagcgacttgatttcaccttgagcaacccccaactctctttccttttctgcaaaatgagatggaagcaaaatatagtatcactataaatgtctctcgttttacttacaactctgtatgaacacatatagagatgaaactaaatactcataattaacttattaaaacagtcaaatacatgtatagatagtattctcattataaactactgatatagaaagataattatgtacatatattatcagagcataacaaagtattcataatcaacttaatttactcaagcagagtacttgaaaaaagtttttcattagaaaaggaatatacttaagtgagtacggagtcattctctttcggtgtttgaggtcataagtacagtgaaatacatgtttgcaactgcatagtgttctcacaataaattatatagatataaatatatatatatatatataaatatatttcaaatgttaagtagtgagagaactaaaactaaggagattattcgaaactacccaatcacaacaggaaaaaacatgttatcaccagtaatatgaaaggaaattttgtttactaaaccaaaccaaaaaaaaaagacatcaaataatactaaagcttttaaaaaatattcatgatattaaccaaaaaaatgtaaacatcataatcctaaaatatagatacaagtaaggagacagagagtcagagtcagaacctttgagaagatttttcaaacgattgagttctaagacaacagggtccgagtgaaaggactcctctgaactgtagtgttcttcatgacccaccatggttatggtcctttttggttttttttggtaatgaaatgaaacgcttagaccaattaatagaggaaggactgggaaaatggctgagtattagtgggtaatgaatggtttaatgattctgaatgaatggaatatggtgggttttaatgggtaattgtgtgtgaggtttaaggaaatgattataggaatttccttgctgtgaagcaaattttaagaattgccggcattatcgcaacttgattgtaacggtttctttattttctctatattaacatttatattctttatttaattcagaacttaattattagaaatctcttccgttatttctttccttaagttctaaatccacgtatgtaattgcatatctagataactataccaaataaatatgttctctcacctaattaattaatattcatatatttttttactctcaaattatcaaggttggacaggtacattgtcaagagtgttaaaaaagtgtattagttggtgccatttgttgcaaccttattatgtgatagataagagccacgaaaagtttgccaaaacaaaaattaagaaaattaattaattggggagttttgtcgtgacttgatgacaaaatgctgatctgtgccctttttaatattatatgatttatttaaaattttattttactgagattagcttagatagatagagataagagatataagtccgtaacaaatgattaaaacgacagactatattgtcaaaatctggctacgttgatggaaagctcctaaatatatattttagagtaaaccttgttgcttaagcgctaaattctccctaatacttgcattttttgtgctcttattagtggaagtcactcaaatgaattcttgaatttaaacttaaagataatgaggtattggtgattctgaccatgaaaatgaccaactaaagtggcttgaaagaatcaaattaaattaacaataatacattttaaagaaagagagagatagagagtttctcaactttgatgatctttgcttataagaataatttttttaaataaaaaaaaaaggagaaaattatttgaaactccagctatgttttattcacacttttccatatgtctaaagacaaagggtttaaagatcatacttagaattttgtttaagcgacaaagggaaagactccactaccacttaggcctaccaacaacacccaatattcccttttaatattagagaaaaggccgtgaccaaaatccttgtgtcactactggccaaaacagtcaaataaggatttgattagaaatctacaaggtttatttagagtttccattctaataatttcttaattgaattatttacaacttttcttcctttcgaaagtgatttcaaagtggaatcaagctaagcccttctccttgtacatgtaataaatatgtttatatattattatattatatatatattacattatataattgcgtgtcccagctagttttgagtaggtgaatatatactgtatcaataatattcgtaatagtaccatacttatattttaagctaataaatttagtgtttttgttcatttttctatgaagatgatgatgtcaaaggtttaagatagtgtagagacttctaatggctttgttgacataataaactcaatggaatggttgagatgtagaaccatggatcaattagatagtttcaagtaagtatgggttaaataatatataattaaataaaggataaataattattgatttggaccttattagcctggctattattagctaatgctttttcaattggtggagtccaaacaattgaatcattcatcgatgttctatttccagactcataaccttagtttggat

SEQ ID NO: 187141 - DNA, 5271 bp, Cannabis indica
gtgaagtatgtgtcagattcgactcccattttgagcattgaactttagactggtttgatataggaggaaccacctatccagatattagatagtaaggaagagatatacagagcaagatgattctgctgtttaaaatactgtggtgaaataataaagttaagaaagagatttgagttagagtcgcagatgtaggaactatatcccgagttgtgcagataaatttgtaggacaaataaaagtgtgaatggtataaatagtaaaaaattacattaccgcatataaataataaaatttagtaaagaactatgatatttgtgtaaaactttaattctaataatattaaataggtttagttttttttttttttttttttttgggctaaggattaaaatcgtttagttaatgttaggttataaaacataagtagtttgttgaaaaataaaatataagaagaaattgatatgaaatgaaacatacatggtaaataaatagaggtaggtaacatgttcattaatagtttttgaagaaagacacaatgtcatctttagtatacataagtaacagaatggaacagaggcgttgtatgatgcaaaacgccccaacaaagttaccagacgtgttccttcactctcaaaattttaaatacgtctttgttgctctctactccaacataatgtacactctcactcactctccactgtatatgctttctttctttcttctttttctactcctgcacttgatgattttgatgagaatgaaataataattttgaagtagaagaaaaaatgttaaaattagaaaccatgttggcaccaagtcgcttacaatgagcccttataatcatgctcatattttgaagcaaccagagcacttggaatacaacagttcaaagaaagcacagattttctgataaatgtctgcactctcgtttcgtttagtagggaatggagtgcctaaggaagaagctgcactggcaccgtacgcccctacatcactatgaatttgcaccatcgaagcttccttgtgcactctgtcttcttttttcacgccaattctcaccccacatcttagcctcagcaacagctcgttctctatctaaatccttgttgaccattaatcttgcagtttctctaggagaatcatccttctctgacccatctaaatcccatcttcgtccggaccctcccccttcctcgttctttagtatccttccaccatctctgtttcttctatcttccttttctccagagcctctgtggcctgaagctgtgctagggtcatatgcttggttggctagataagagagagcagtaactacgtctccaatgagaggacgagttgcagcctgttcttggatgcacatcgacgccacagctagagcctggtagagtcccctcattggataccgaccctgcagctgtggatcagccagttttgaaaattttctacgatcattgaacaacggccgtgcctgcatagaataacaataaccaccataattttgttatgtcatgatcacaaaaggctgcaaaactagaagataattgccagtcaaaactggttcaaagcgtatggacttacccatgtgacaaggttctgctcaccatggggtcgagtactatcgatggctttacgtccagtaattagctctaagaacactaccccgaaactgtatacgtcagacttcactgtcaactgtccagtcattgcatattctggagcacagtaaccataagtgcccataaccctggttgagacatgtgacttgtctccagtagggcctagcttcgcaagtccaaaatcagaaagctttgggtgaaatccttcgtccaacaatatgttggatgatttaaaatctctataaatgactggtgggtttgctttgtcatgcaggtattccaatccttttgctgcaccagcagcaattttcatccttgtattccaatctaatggctccttatcaggtggaagatctacataacaagtcagagtactatagttattattttaaatggttactgttcacacacataaatgcaagtcagacaattattgcagacatgttaccctataataataacagcatgtaggtattatgttttacccgtaaatgaatgtataggaatataaaaaagccacactggcaatggcaaatgaacagacaaaacctcttccttttaaaataattttaatgagtttaacagccatttgtcttctcaacatttatggtgaaagctacttcatctttggccaaaaccaatcaaagtcttgacctaaaagcttcaagaacaaagtgcttctcaactattttgcctccagaccacagttgttaaggtttgtcttacacaagtgaggctatacatagaaatttcaacaacccatccattaggaaactaagcttgtctagtttcaccatgaatgtcaaatttgatttttcttgagcgacatcggtacaaatcttacacttgaataaaagcatgatcactatcaatgaaagagactaataaatgatgtatttcttaacaaagtgaaacagaaaaatgtgtatcgaacttttaccaagtaggtgatcttctaatgatccaaagggcataaattcatatacaagaagccgttggtctccgtcagcacaatacccaattaaactcactaaattagggtgatgtagaaggctgagcattagcacttccaccaaaaactctctgtttccttgaagaccatttctgtccaattgtttaacagccactacctgtaaaggacaaacatactttaaacacttcaaatctcctcagtcatgtctttatcactgctctagaagccatccaagattccatattaccaataatagacaatttttgaaataatcagaagccataatggaacaatctagtatcattatcatccaattatttcattgtcaaactatttgaaactatatagattttcaaactccttgtgtgtgttgtgggtgggtgtggccagatttcccaattaaacattgcaaaacatcttttaccattatgtgactaagattataataagatacatagtacttcccaatgaataaactcaaccattgattctctagtgttcttgaaccctcagcacacaaaaaaagcatacacacattatatattgacattacaacaccactacaccagcatatataagtcacttcaatctttagagacagttaaggcataaaatctatttttccttgaggggaaggaagttattggaatccagttataaaagtctaacttctagttctcagcccgatcgtcagtaactagagataggtcactagaattctacacatcttataatccttcaaagggaatggttaaacagcaatagtttatgtcactgataagtctatcacccactcaaattatatacatgttaactgattacttgattgatcttgcaataatatctcaaactaacatacaacaatagctaatactgactgttctgtgatttcaaaagttgtatttgactggaattttataaccaaaagccaatcaataatgaaggaatttacctgaccagtgctttcgagtcgccctttgtatacacgtccaaatcccccttcccctaagaagcactcaggcctgaaattctttgttgcagcagccagctcgcgaaaggtgaatgtttgtgcggcaataggaaccccaggcccatccttgggcacaggaaattctcttttggacgctccattgctccttgatctgagtctatcaactcctgcagaaaccaccattacaacaaagtgtagatccataagttatggtatgacatccaaaactaaactctcaagatcaatatgagaacttgaatttgataggattcaaaagaagaaaaccacccttgaattcttcagataataaattcaatcaagatacaatccccaatcacataacaaattactacaattaactttgactttttaaggcttccgaagcaataggattaacagatttatcagtcttcataaattgtaactatgaaaatcaagcaagccaaatcaccatgggccttcaaaacttcaagttacaccttattcatttatattattttgtaatctcaacgatgtcaaaatccagtggggtctaccaaaaatcacctcaaaatctaaaactcaaagccttgataccagtcaatcagaaatagcaatcaaacaaagtaagaaccgagtatcataaacataaaggaaaaacccagatcagatcaaacaacaaaacctgataatccccaaaaaaccaaaaccaaaaccaaaagttcctaaagtaaaaacatatgcatatatgaatatagaggaagactaaccagaaggcaaactttcaagattagagatgggcgttgattgagcttgcttttgatcatcactgtgtttctctggattaagggtctcctcctctttcgaatcgaaacaagaaaagcaacccatttccccaaatcaaataagtaaattagtaaacccctccaagataaaaatcgttctttttcctttaactccgaagaagaatattgaaaactcaatcaaaactaatatatataatccaatccaatccaatccaaatattacaacagtccaatcagatgcgtatccaaattcctgggcatctctctcttatttttcttctatgaagaagacaaagcaaacgaacccaacttcccaaaaatcaaataaaattataaagaaaaaatggcagtgaaacagagatgtaaacaccaaataaaagagccggctttgtcttcggcttcgtttacactactgtacacgcacacacgcacacgccttatagcacaccaccaccactaccactactaccaccaccaacaacaaaactatctttctttctctctccgctttgaccccaggaaaaataattaaataaccaaaaataaaaataaataaaaaatgaaaactttatatttgggattaaaatatcaaagaaattaaaaagtggatttttaacagtgatggtgtttagtaattttggtaaggaaggagatgagaaagaaggagatgattccaattggcacaaacaaacaaaacaaaatggcaattttgggataaaaccggtaaacaacggaaacgtgtcaaatggcggggactacacaaactacactgtctcttaattatttaattgattaacaacaaattattacttttattattctaatctttgttttaaaccattgtaaatattaaataatattgaattatcttttaggacaaactagattaaaaaaatggaa

SEQ ID NO: 187142 - DNA, 1402 bp, Cannabis indica
aaaaaaccaaattacacctctctaaatttacatgaacacatgcaccacaccacaccatccttttgcttatacattgcaagacgaaatatacagggaaaatagtgacgaaactacctctccagctttgactgtgataacatgtggtgtaaatccgaaccctgctgaccctgcacaaaacaacacttacattaatcaaatgaaaagaataataatagattaaaggacaaaattcatttggttcagaaccatattaaataataaacaacgggatgtgtacccaaacaggacaaaattcatttccataaaataagtcgacccctaataaacatggtaagtatcttattagactcattgagaaagaaatttaaaaggccaaaacaaagtgatcctttgatacttaaatggacatcaaaaatcaaatgtacaaacttcaaactcatgaacctaattaagattataatggtttaatttcatacataaacaaagctaataaaagtaagatcttgcatgtggttgattcctacaaggtccatttcaagtattttagtattattattgtgtctccaccaaatattataaataaaaaagtgagaatttttatttacccatgccatccaattgttgcttcttggaagaaccaggtggtctacctctagctttcttggtggatgatggagaaccgggaccgccggctaagccaccgtccgagggaggaggagctacccccgtatgaggagaagagaatccaccaccaccggagtgactcaccggcacagaaggggaaagagccaatgccatagtgccatctgggccatattttctgggtctccctcttttccttttcattggctcattaccactacccatactcatgttgttcatgtttaacccaccaccaggagacactatagcgccaccggtggaaccatcacccgccaccgcagctccggcggaggattggtaagaaggtgaggtagctgcaatgggtttgtacacaccactcccatctgcagcaaaaggcattctcatgttctgtaacatcggttgtgacgccaccggcttttctgtagaccaacactgaagggctctctacttgctaaaagtcctgtttcagatcctgacatcttccctctgttaaagtttttcttttttactcaaattccatacaatcttacctgaaagattctcaagatcagaactttgctctctactatacattactattactcactcacacatcattttacagacccagatagaaatatatatatatatatatatatatattaacttcactaaccaaattattaaaccctaataactactggggaagcataaaaaccagttacagcttaaagttatcagtaaagatggaattttttatctgattcaagatgaatta

SEQ ID NO: 187143 - DNA, 2344 bp, Cannabis indica
ttttaagtgctatatatcataaacacgtgtgccatcataaagggtgtgtttggatttggatcatattgtcaggggtatattggtctcacttacaaaaaaaaaagaaaaaagaatgggattgttgttctttcttttcccaagtccggcagtagcatgtgctttgtttatggtggacctctttccctagtcagtgtcaatgctctgttaaccgacaattcaagtcatttcctctgtttcaaattattattttttatttatatacgtatatataataattgtgaaacatctcatttgtaacattgactatgctaatagttattgtatttcataattataattttttttttgtagtgaactctgatgagtgcttgatgacaagaatgcaagaaatgtcactggattaccatttcactgtggagcaagaagtgggctcctccacctatgccttctttggattcaatggtcagcttaaccaaaatcccttttatttgttttatttatatatgttagaaatattaagttgtccaaaaataaaaacaaaggaaaatactttccttacacttcaataaatgttgttggttatattgtcagataataataaatctttgagtttaaactagtggaatgatgttaaagggtttgtgaagagttactttcttgactgtgatgttatgagctacaaacattgtatatagtttttctttttaagggttgatacaaacaaacttaggtaacaacagtaaaaaattacattgtaacatataatgtgacatgggtttgtttagtatttaatgattgagcttggttggtgtgtgtggatagtaataatggtaggagcaattcaattatatgagctaacttctctctttatgtaattgatgaaacaggcacagctggtgtttggagaattgctgcactgaatgaagcaggaggttggaaagaccggaccacagtggaagacatggatttagctgttagagctagtcttaaagggtggaaatttgtctaccttagtaatcttaaggtgcttaaatgtattaataataacaaatttagacaccctttgggaagaaatgttagatgaactaatcttttttatgtatatatttatatatttactcaggttaaaaatgaattgcctagtacattaaaggcctaccgttatcaacaacatcgttggtcttgtggtccagccaatcttttcaggaaaatggttatggagattataaagaacaaggtgagagagattgtattgatgatgtatgtagtgtggatattaatgactcttcttctttttaactgatccattgttttgattgcagaaagttacaacttggaagaaggtgcatgttatttacagcttcttctttgtcaggaagatcgtggcgcatatcattacgttcatcttttactgcattgttttgcctgcaactgttattgtaccagaagttcaggttcctaaatggggagctgtatatattccttcaatcattacccttcttaatgctgttggaactccaaggtcaactctccattagagctcttattattcatcttcatattagattagtacaagtatctaaagttttgagataaacccttctcagtatgattattattcactcttaagtgatacttacagagattgtgtctctgttcttgctgttcaatgattatttctgaaaaattcaaggcttgcttgtctccataactatatgcaggtcactccatttaatagttttctggattctttttgagaatgtcatgtccttacaccgaactaaggctactatcatcggtcttctagagacgagcagagtgaatgaatgggttgtgactgaaaaactaggagacgccctcaaaggaaaagcatcaaaaacaccgaaaaaacctcggtttaagattggagaaaggtagaaatttgtttttctttctaaccacgtaatgcattttagtaatagagctatgattatgtagtttacatttgcaaacttgattgcattgtgtgcaggcttcatttgctggagcttggggtgggagtttaccttttcttctgcggctgttatgatgttctctttggcaagaaccacttcttcatttaccttttcgtacaagcaatagcctttttcatcatggggtttggatatgttggcacctttgtcccaaactcttaatagggaacccaataataagatcaatgatcaagtatcctctgatctctctcttagccatgtgccttcataaacatacttatcttcaccaacataatatctgcttttttaaaaattgtgagttgtctcctatagcttgtaaaaaagaaggggaaaaaagaaaaaagaaaaag

SEQ ID NO: 187144 - DNA, 3617 bp, Cannabis indica
ctctctctctctctctctctctctctctctctctctctctctctctctctctctctctctctgttgcgcaaatgacaaatctatctatcggcctaaatcaaaaaatcctagcttctaaatctactcagatgtctctgttggctcttctggttttttctatcacaagctaaccggagaagagaatttctgtttaaatgtggggttgtcgaactcaagttcattacaattgacactcagtgggtctcttgctaatgcggaacatagtaggcctctgacttgtaatcttttttggtttctaattgtttttgtttttgaatatataattttatttttcatctatttatccagagattttttcctccgttttgataattttctggtttatctccgatatttttttctatagttatgcgtcagagagaatatgaaaacttatctctacaaaacagattgtcaatgcttagaaatatatccaaccagatccattcatcctctttttagttccatttttggataacaaggataactattcaaaccatggtagccatattgtaaatcccaatatttgtctcagaccatctttgaacttggtagtaaagaaaaaaagaattcggtgccattaatttgtttgatttaatgaaagaggacacttgcaaattgtgtattttttactagatacgttgtgttggttttgataacagacttaactgtgaagaatgtgtgcctattttgtaaatgtatgcaactgtaaatgggtgcctattctgtaatgtatgcaactgtttagtaatataaatttctgtcaaaattaacttttaactgggtatatcctgttaaaacaagaatctgttaaaagccacaacaaaataagttagatagacatttatataatatgtaagatatacatagccaagtttatgcagtaatttgaaacccgaacattgttgtcaaactttggtattgtatgtttttttttttgctaaacgtatgttttagttttttcatgtggtgctgttttagtttttttttttacaactgagagagagttatgatgctatcttgatctcggtctcagtatggtcttgatctttgtctctgttttattatgattaatttttgttgagcaacaaatattaatatgattgaattatataaattcatattcaactgaaaatgagctccccaaactagtcttctagttatacttactgagaaaattgttttggttgcaggaaaaatattttgacaggttgaagactggagacttgagcttattcctcattgtggaaattttggtaaacccagaatttgcagtgtataaagtttacaaccaaataattttacattgagttgctgtaaccccgaccaaaatggcgccgagatcattgattcttcatcacttgaagtcttatttctcagctcaaatccgaaggaaccatagacttctcagctctgcttcttcttctgcccttcacgtagccccttcttcatcatctccatctacatccacgtcttcgtctccagatgccgttcacatgactgaaaattgtgttcaagtactttctcccctaatttactttttttttttaaatttacttaactgctttcttgttttaccaatttgagatatatattggactttttatccctatattaaaaaatatctggggagatatggattcatcactttgaaattttgaatgcttttttaagtttcacttggagattagtgaagcatcagtgtctattgagatcgtgtagttcattgactttggctactacaaatgaattaaggagaatttttactattgaaatcaattaactatagtctattagtttgattgtgatgagaaaagtgggttctttctatgctatttttaactccaatacaaagcatttgtgttagatggcggcattaaattgttcgttattaattagcaaaaaaaataatggtcgtaattctcttaattaaaatagatttcctaaaatggaaaaatgttttttggttgtgactattaccttttgtttttctgttgcagcgaatgaaagaactgtattctagtgaaccatcatcgggagagaaaatgcttcgcttgagtgtagaaaatggaggttgttctggcttccaatacgtttttgatctcgatgagaaaaccaacccagatgacaggtttttttctttaaggaattttttttccctagtaaaggcattcaatttgcatattcattctgactttgcttttcctgttctttaactgttgtttaagggtctttgagaaggaaggagtcaaattgatcgtggacagtatttcatatgattttgtaaaaggagcaaccgttgattacgttgaggagcttattcgttctgcttttgtggtaagtcactttactttgctttctgtatgagctctagttctggtttctgatgcttgaacatagatgtgttttgtaacctgttcggttaactacttgctcagttaaaagtatctcctgctagtgctaactaaccactgctttaacattttaagatcattcaatctcatcaaaactttaggcatatcatgcccaactcgacaccactgcctaaaatttttactcaatggccaaactaagactaggcagtacctgatagaatagacattgcgagaaatggccataggtgaaattgtgtgtaaatagttttataattttgtccatgtacttgattgctttagttcgaagaaagtgataaagtaggtgcaaaaactcatattcatctcctaaagttttggtttgtctaaaaaatcccctatgaaatgttcctctcgattaaacaattgcctttagatttctatttttcttgccccttaatattctggatcagtcctgtgcagataatccataaaccttgaataaccaattatttcaatagtttgttattaaaatggaacaatattacaaaaaccattatagagtattttgattggaatattgttagaggattctccctcccaaaggttacatatcattgcttattgttgtggtttatgtttatgattcatttgcaatgggcttggaagttagaaccttggataaaatttaatggttttcaccggcaggtctctacaaatccgagtgcagtaggcggctgcagttgtaaaagctcatttatggtgaaacaatagttctgcaagtactgactataatctctctctctctctctctatcaaggcaactagattcagtttggaatggataattacacccatttatttgacatgattttttcaaataaaaattaccgttaacacaagggccatgcctattatgttatacaataatattcttctgttattaatgttaccagcggcttgtaattgtaccacattcataggttattgagttagtttcattgttttttttttctgtgttatagttgggcgttcgaaaggttgtactagaagttggattaaaattggatcttgggttggggtatttactttgtaataaacactgcccacattttactacatgggctgaattttaatggcatgtatgatacgaaataaaataaagttaacttatcgattacaatattagcattaaggatcacatctgtttcaattttgattaatatt

SEQ ID NO: 187145 - DNA, 1345 bp, Cannabis indica
atacctatctgggtagttcttattacattgtgattcttcttgggtttatgttaatttgatcatacatggatagtgtggctgtaatcagtctattgcaacagctacgattatactagattcacacatacttcatgacacaatggaacttcttgagttagctgaaaatgaattttcacttcacaactccaaaactatactacaggtcaacaaggtggttaaacagacatcaatattggattggtctttcgacaaaaagttgactcgctgtttacatcacaaagagaagatactgtaatcttgacattatccagcagcccggataattcaatgtatttgatttgtgtgttctcatcactttgtttattcaatgacaaattcctgatcagcctagttatttctattgcctttctactttaattttttcttggtggattatagttgagagagattgagattaaggaaatttcaaactcaagtatttaaagaggttgagattaccctaaaaataatcttaaaagtaggacccacttaataataaacccttcactaaaattataccaaacagaaatttagttctacgttctcattcccaagaacccgaactcccataccaaacacctcaatatatttgcctattacctttgctattgttttgaggaccctagttgagtagttggtgtgtatcataatcagctaacgaccaccttactaatttggaatacaaagcttaaggtaactgaaaacatatgtcgagtcgaccaatcaaataaaataagatgtgcttaataaaataatagcaaagataacatgagaaaaagaaagaaaaaaagaaatactacctgccccttccttgatatgacacaacgagaatcacccgcatttgcaacaacaagttggttgtttcgaataattgcaacacaggctgtgctcccagaagttggaccgctaaaatcagaatgaggcccctacaacggaattatgtataagataatgaacttcaaaagagaaaataaggttcaagaaaaagtgcttcagatgagacagttttcatattagataaactagcccaggatagggttgaaccccagacctctgattcacaatacacccagacaaccacttgagctataccaatgagatataaatcaaatgtgaccacatgtgttaaataagtaaataatttattatcatcttagctgtaggaatgaatcagtaaatgatcttatcacccaaagaaccgttaattccagcgagaaaaatgctttaacagaaagctaatagaaattgcaagtaaatatatttctcctctcaataaaccaagggaccaagtttttttttttttttt

SEQ ID NO: 187146 - DNA, 3088 bp, Cannabis indica
agctgtttaaaagtaaagcaaatgattatcttgttacctttggtacgtgtgtatgtgtgtgtgtgtcttggggggattatattatcttaaagagactacaaagtcaatacccttaaagctggtgaaccatcctcatctgatgcaacaacaagctgagtagcaacatcaggattccattgtaaaacagaggagcggcgtctaactgaatcggagaagctgccagttgacagagttttcagattacagaaggcactcaattacataaaagagaaaaaataatatgtaaacaaatccacagaatagaagaagagttacctaatcacaggtttttgcttctttaggtcccaaaccactgaaaaaacagaagacgtgagattccagatttaaacagaaaagtattagttcacaatcagttgaagtaagtaagaattccctacctgttgttccattatatgaagtagatgctaatatgtgttgaaccttgctattccaagataagaatgaaatctcatcctgagcagcagaaccattaccctgtttgacaatagaacacaattagatgtctaaataaatataaccgcattttagaagctccttagcagctgaaactcaaagagcagttgctttaaacttccatctatccatccaactagaaagatggagcgagggagcccttgttggtacactggtgttccacattgcttctagtgtgtgtgttcaactgtttaaaaggttccttaactactctaaatgttacaactcagggtagataagattggatcaagtatccaatcacagccacaaagaacgtataggtatttacagatttcactaattaatgttaagaaaaataaaaggcgtggagagagcaaaatcttttacaatattaactactttaacacatgacataacaaggacacaattttgtaataatattcttgttattaataatataagttccttatcaaaatatcaaaatgcccacaaaacgaatatggctcaaaatgaataaatgtatcatctttgttttgttctcttaaattctatttgagactttcatacgctttcagatagaagttatcatgactataagttaaactgctatggtaaaaatgacacaagacacaattatagggtgataaagatctactagctgatgaaaaccatatatcgtctgaatcatatatttcaataaatttgtcctcacaggcgtgcatatttgaagaaagcagaatgatttttttatacgctgtcataactactaaccttaagaggtggaaattgagaaggttctgcagggttggccaaatcccagattacaatctcgccatcatcagcaccagatgcaagcaagtttggtgccattgcattaaattcaagaccacgaacctgatgatcatatcacaataaaaaatgtgactgacatatcctaccttcaagctctaagtttcaaaaatactaccataaacaaagggcatgtgtataattgtaaacagaaaaacttacaggccccttatgccttgagagatgtccaacaagagcactttcactaggctcggacctaaaaggtgtaagaacaaataagaaatccaataagcaaataggtttaacgtcacattattaagcatacaaaactacacccaaataaccaaacaggagaacaaagcacattactttctatagataaaaagattaacttaaaacaagctacgaggaattcgatcacctaagagaaattcaaccacattacagacacgcaagctaagaggaattcgatcagcttaccactatttccctactgctaaacatttaaaaagaaagccaaagtaaacaaagcatcactcccacaaatgaaattatcaaccaattatccccacgtccctcaacttagccagatgcgaatcaacagaaggaagcgactcagaaatatagcaagattacagaaaaagtccagataaaactaaactcgcgtgaattcccacacactcatttcatttccattacgttacattacaatcatcatatcatcaattctcagcctaaataataaagttaccaaatacaaaatgtgcccacaaatgtcaaattacgcccaatttcaatcacaatcaatcaacaaagatccattcaattccaacatttccactaaacacgcaaacaaaacctcaaaatctccaaattcaacagaatcagaatcaaaccaaaagaaattcaagtcaattacccgatcaacgacagtgggttatagatatcaatgctcccatccacaagtccaccggcaataagcccaagcccaaacttctcactcccagaatcagtaggcttcgaccacgataaccgattgaatctctcagaactcggtgtttcaccaacaacaggaatatcacgatcatcggtctgaaaatcgagcttaaagatctcaagattagcggttgagctaaacgatagatccacagccccagccatggtcccagccgccatgtaaggcgcatccggcgccagcgccaccgacgccgatctattcaccccttttatacacgccattgccgttacaatttgtcaccactgtatataaatatatctatatgtatatataaagattcaattcaactgtaagaagacgaagaagaaggtccgaattgggatctgaaagagagagagaattagggatttgagtgaaatggaagattttgggggctaagatctgaattgggatctaaatgaaaattatgaacatttcttctctttcttttttctaaggtttcagaatttgtgctgttaagggttgtacgttggggggtaattaaggtattacaatataaagcgcggtggtcggaaagggttggggtattgtgtgtagacgattatagctctgtgtacaacaaaatttggccaattagatcgtgacaactgtgttttttgcctgagcttttttgttttaattaagatatttaattcgctattttgttatttttattttaattaaaaatttctgattcattttgtttgtgcatagcaattagaattacttgaacttgtttaattgaaggacatgtttcatgaaacaaaactttaaaaatataaaaaa

SEQ ID NO: 187147 - DNA, 1754 bp, Cannabis indica
tgtcgacacaggagttccaccataatagttcagtaataataacttaacatgaaacaagacttttaattaattaaagtaaacgaggactttattttattaattaatttctagagagatgacacaatatttgacattactatcaataattggagaatcatgtatactttaaaaccctttatttatatagtgacttaaataaacattatatatttctataactaattaattttaccaataaatatcataattaaagatgcatatagccaaagcaaatctcaatgtcctgatctccctatgtaacatatttatatccataataattaattaatgaactcgtattttgtcttcattcagtccaaaattatttgattatatatattatatagtgatttatagtagtgatgttagaagattattataaaaatttgaatatatatgcatttaaataatcaaatttaatttatttattagtgtatagatatacctggttagccaaagaaaggccttagtggagctaggcccttttcttgcaagtccttgggtgacctcttttttgaccatctcaaccacatttgcatacaatgttggatcacattcatgaactttttcaagtctctacaataattaacaacataattatatatataatcaattaattaatatatatgtatagattataaataatagaattagttatatatatttttgttattacctgaatattttggtggacatcttgtcttagaactgccatagttggtccaatcttatctgcaaattaaaaggagatcatagatatataattagatttagaaaataataataagtaataattaacaataataaataaatatgtagttattattaccaagtacttgaagaaccaaaatattgcatagtgaaagaaaaggcttggtgggtatataatgatgatgatgtacaggagaattaggaggaagaggtactgctaattcatcagtatcatcatcatgagctggtttactattaacttctttgaccatcatggacactctttcaatggcagatctaatctctgatgaacaacagtaccccttttcttcatcatcatcaccacatccacatgatgactttgtaataataatttccttattattattattctccattttcagatgatcatgtatatatataaaccacttcttgatgattaattatatctaaatatgtatagatagatagaagagagcttagctaattagcttgatcgagtttgtgtatttaatttctaagtaatttagaatgagtaattcatagagatagatagctaattttgcctttatttatattggctctggatgatccatatgtactgtctggcccccataatatataatatttgtttttgtaatttttcttggtaatgagaattgacaatgacattaactttgacttaatcacaacaaaggaaatggttactttgagtttgggagcttaaattaatttcctcttttagggattttttgagttttaataatattataaaaatatttttaattggccaaataaataaatatacagcttaaataaaaaaatttacacaaatactatacttacacacactttcaactcaggattcatgcttcttgggccaccatgcatcaacccaacgcaaccgaaacaaaaatttaaccagataagagaaccgcaattaattttggcaactttacctgaaaagacgatcagaaccacaattttaatgtttcataacagtt

SEQ ID NO: 187148 - DNA, 3355 bp, Cannabis indica
ctaaaggaaatttagaaagattagcaggctttgtgggagatgtaattgaagttcaaaagctggatattcccaagattgtctccaaaggctattttactttcaaagtctggtttgatatctctaaaccaatctgtccaggctttctattcccttctgcaggtcaaaaaatttggctaaaattcaggtatgatcgcttaccatatatgtgttttaattgtggttttttggggcatgatactcgggtttgtgcagaaccaatggcatatattgaagatggattgggtaatcaacaaccagcatacggttcctggttaaaaatcgatgacaggaaggaggaaatcaacaattcaactcagaaaaactctggtgtctcacggccaatgatccctcctcctgggttcactgagaaaattcacagtccctatgcaacaacgcctacggatggggggaagatcagtggtcattcctttgctcccattaatggactggggaaggaaatcttggtaacttctcctgggttctcttgcaattctgagattggtatgctgaacaagggtaaacagaaaatttcaaatggaaatcttgggcttgactttgatatggaaaagcctatagcagaaggggagtgttctggcaagggaattaatttgatcatggtacaggagggacatggaagatcgaaaagaaatggctctttgagagaagagggcacgattaatttattgaatgatccgaaaattacttcaaatttggctccttcatatggccaaaggaatccaactgaaaccatatcgacaatatctatgaacctcacggaagttcccattaactatgattgtaacttggagatcttaaagaaaacagagggaccctccaagagaaggaaggtgattcctaaaaggactaagaatattggcaatggtggaaataaaaggaagcatacagagcagattcaacaggcaggacaaagtggtgattcaaaggaaattttcgatggtaaccgagtttgaccgtttgagatgattccgaaagcggcgaactcagttgaggctggggtacgccgaacacaatgatagccctattttggaatgtccaagggcttgggaacccttggacattaaattctttgaaatcacatgttaaagattatcatcccgggatgattttcttatctgaaactcgcctgaatagcgctcggatggaatttattcgtgtttagttaggatttgaggggtgttttgtggtggatgctaaggggaaaagtggaggccttgcccttctttggtcgaatgaatattcgattcacataaagtcctttacggaagctcacattgatgcacttgtggaaaataatctgggttttttatggcgatttacaggcttttatggcagtcccgatccaggaggaagagtcgatagttggaaacttttgaagagacttcaaccaatgtttaatggtgcttgggtttgcggaggcgatttcaatgagattgttaatcaaaaggaaaagaagggagggggtccaaagccagaatatttaatgaggaactttcgtcgtgccatttcagattgccaattacgcaaaattcactctgttgatgatggatttacttggtgtaacggtagagtggcaaatctgatttttgaaaaacttgatagaatcctgtgtaattccttttggaaagacaaattcaagaagaataaagtatcccttctcaactggtggaactcggatcatagaccactattacttcagtctcaatcggtagatagtgggaattctttcaatcgacattggggaactcggtttcactttgaacaagcgtgggcggataatgaagattgtcgaagaattattgaggaagtttggcaaaaaaagcatcagggagacccggttctacaactttccaaattgcttacgtcctgtggctccaatcttcatacttggaatatgaaacagaaaaaagaaatgcacgacagaacaaaggaattaaaaggaaaaattgaaagtcttgccaattcaacagagaaagaggattggatgactactcaacgattggagcatgaccttaattgtgtggaggagaaaaaagaaatgtattggaaacaacggagtagagcgctttggctgaaacatggggacaaaaatacaaaatttttccattacaaagcctcccaaagacgcaagaaaaatacaataatggggttgtatgatgaccggcaacagtggaaaacagctgagaaagatttagaaaggattgctattgattattttcaaaaactcttcaccaaatccaacagaggagttaatttacacaatattcttcatcaatgtgttccttttcgtctcagcaatgcagaaaatgaagcactgctggagccttttacaatagattaagtgaaaagagctatgtttcagatcaaccctctcaaagctccaggcaaggatggtctttctgccatattctttcaaaaaaattgggacgtggtaggggctgaaatcactgcagcttgtttggaagtattaaataaggatgctgactgtagtactttgaatgaaactctcatctgcttaatcccaaaggttactcaacccacaaaaataacagaattccgtccaataagtttgtgtactgtcatatataaagtaatatcaaaatgccttgcgaaccgtatgaaacaaagcatgacctaaggtgatttcagcaaatcaaagtgcttttattggagagaattatccaagacaatgccattatcggttttgaaagtctccattgcatgagaaaaggtcgcttcgggaacggaagaaaaatggctgtcaagttagatatgtccaaggcgtatgatcgtgttgagtggaatttcctagaagctatgatgatgtctttgggtttcgacaacaagtggattttaaagattatgaactgtgttcgatcggtgtccttctccatcctcatcaacggttcaatcaaaggcttctttattccggagcgaggtcttcgccaaggtgaccctctatccccttttctttttctattatgctctgaaggcctatcttgtatgatttttgaagctgaaagagctggaaaaattcatgggttgcggtttggtagcttggatcaaaggttgtcacatctcctttttgccgacgatagccttatattccttgatgcaaccatggaagaaggaactagcttaaaagaagtcttgacatcttatgagaagctctcgggccaatgtatcaatttggacaaaaccgaaatgtgtgtgggaggaaaggttaatgattcaatggccattgctttagcatcaaatatgggagtctccttagtaaaaaatcataccaagtacttag

SEQ ID NO: 187149 - DNA, 3102 bp, Cannabis indica
ttttattacaatttaagttactttattagttgctatgtaaattactatgcgaattttctgtaaaaaaaaactagtttaaagtataaaaattactcgtagactctcatctatttatttgtttattttttttttaaagttagactattgtatattgaaagtctttattacaattttctgaaaaaaggaagtttttattacaaaaccaagtttaatgattctattttttgttttctacatataggcataaattagcaaattcttggttattggacttaaaagtaccaaatttctttcttgttggttaaactaaaatgattaatcagttgatgacgactacaatgtattatttagattaatgctaaacaacaacacaaccgaaggtcaacaaaagacttttccattatgaaatttttcttttttctttttttcttttcgtacaataattctttaataaaataaatgaaaaaaaattgaataaaggtacaaaacaaaagatatggtgaatgtaagtgaatcatgatgtaattgtgtgctgaacttgagtagctaagagaatctctttctccactaaggaaaatatttctttgaatcgttttctgaacgtatctgtaatgttttgagtaatcctttgctgaaactttgtgctctttagccatgttattcccatgtcaacatcacatttgcttacattttgggcaatcacagatttctcaatctggtacctgaagtgaacctgcataagcaccaaacataaaaagaaagaagttataaccgaaatcatgcgattttcgacgagtgttgagagtatcatacactaatgtagacgacgagataatgctttttattagtgttttgaattgtaaataaattgatacatacacgatagtgatcacagaaaggaacattgtgaaaggtcatgacttcattcaaaatccagccttggctatttcggatagggaatttttgttgtgtgcaagtgatttctccaccaaagactgagatataacgattgaatctgtatgaaagttttctttcaagaatgtcatccttaaagggttcccatggagttgttgagtagtaaagacaaccagacttttccattacttttagctccaactttcctccatcaaacatttccatcagcaagcttagctgtgccatttcccaacaaggtttaagatttttaatccattgcaaagttgatgaaaatggcaattttctatgacatgttagttcaaaaatgctcaaaggtgatctagtctcacacttacatttatgggaagctcggaagcatagatttttgacatggtgacattttcagcttccaacacaaaatcagattcttcaaccatgatgggcttttcttcttgatcctcctgctcctcagcaatatgagctctctgatctggtgttagaattctacttctcctcattgccattattgtcctgaaaatgaattgatttaccttatctattaatacaaatggaagaagatttttgtccattagtgaagcatatttgttctaagactatatagcacctgctagccacattgaatgacacaaatgattgaaaacaaaatctaagtctgccttcttcgtcttgagactttgctccgtgcttggcatcaagacctcgatctttcttcaagattatgactagtataggactaccgacagatgatatagatgggggaagtacctggatatcttcgatatcctcccaaagaaagaaaaacttggttttagtaaccgaacaaattggaatagaaccccacaattctcgcagataggaaaagccgaccctgcaacaaagaatcatattgagaaacttgtaagctttcaatcctgttataaagagtaggaaaattatgtctagtattggactagaaattatagctagaacctgtaatggcatttttcttttcaactggcatgtaaaatcactaataagaaactcttctgggggcaaattgaacagtttttggaaggttgaattcttgtgaggtgatcgaagattcaactgtcaaatcaacaaacaggaagttagatcaaaatatctacataaaaaatgtggaaaaggtagcttcatacgccttgggaacattgccaaaattataccaagtccccactcctaacctttttcccaacttccttttccattttgttcaaatagtctctaattgtttcctctccattgttattatccagaaagattctcaagtgcaattttgattgagatgattgagcaagctttccttcgagagagatccatatgtctgcaagttcagaagatgaatgtttcaagaaattgatctcagcatgcccaagtgaggtggcttgatcaaaagggccatcaaaatcatacacttccacatccaatactgatggcggttcttccatagcatcaaactcgagtatctctgcataatgtttccaagaatcattgagccaagatataggaagaatacagatataatctatgagcactttaatagatccttaccgttccattggggattactagtttgaagcttcaccgaacttgttcttgttttggcattgcaggtaaaaaccacataggggtcagataaatttgatgaacctaaggatgtcaagttaaccccttcaaccaaagccacagtaagaacccatccatcaccttgtgctttgactccatgatcacatcctgttcaaaaagatgcttaaaaaaaggcgagaatgccaagatatattttcacaaatgacaatcatgtgagtggtgctaacctctttgcaaccgagcttgtacaaaacgtgaggccatgtgataaacatgctctaaataaaggactaaaattccactagttatgagctccccaaaactgtcaggcaaatcaattccaaaaaattccaagccctgtctttgacttggttcactgaggaatatatgcaccacaatatacacaaccatacaaatagtagtaagtactgtgatattccagaagtattcactggccaattccaaatctgattggtgttctgttgccagagttgcaagaatatggtcttttccagctgagactttagaatccactgtcttaaaattctgagccagcaaatt

SEQ ID NO: 187150 - DNA, 4544 bp, Cannabis indica
tttttattagtttgaaaggccttcaattaattttctgcctgaggcctctaaatttgttgagacaaccctgggtggaatgaatacttaataatacaaatttacgggatgatgggaaagggccatcttatatggctatgttagtgatttaatgattggggagagggtttacgacattgacaaaaatgtggtttacgacataagaaaagagaaatggaaactgggatagtctaaacaaaggcctccttctctttttcaaaaaaagaaactatcggtaggaagatatgcatgcgtttcagtatacccccttgaatgtatttctcttgtcaatcctaaagattaagctgcttgaaccattgcccaatttgattccaacattaaagatcttattttacataaatttctcaactgcagattgacttgaggtgtggagcaaagaggtctctagctgatcctccaagacaaaattttgctctaaagtcttgcgatattagtgccaccaggcctcatttgctcctagttggtgggaggtacatttttgtttatttgagttaaataatgttctcgtacttttacgatgaattttcttttcttttcatcttatatcttattcttgaatgtttgtagtgatgcgtttgcacggttgtacgacagaaggatgctgccaccgttctcttcaagtcagaaaaagatgccacctcctccttgtgttgactatttttgtcccatgcatctttctgaccatgtcagttttgaaccttgtaattgttttaatgacttcaattttacaacctcgaaatgttattttggttattttcgtaatgctgttttctatgatctgagacgtacagtcaaaagtattgggggtttaaaactacctttcttctttatattttttccaggcacattcaagcttgcatttaactcatgttgcgtttagtccagatggagaagaggttctacttagttacagtggagagcatgtctatttgatggatataaatcacggtatgtatatctaccttgggtatatgcacctgaatgcctcgtacatgctgttctttctttttgacagactggattaaggatttacatgtaaaagacattaataattctatgatttcatggcaatatacttttatcacatatttgatttgaattgagcaagacatgggtcttatctttggaaagggttgaatggatggtcaacttactcttattggtggatagggttgtggttatcgtcttgtgtttgtgtcgccacgataatgacactacacaattaaagtaaagacgaatacatctcgatcatgaaacgtgtcgaaaacaaacacaattattttagcatgtcacacagcataataacacgattatgatacgtttaatatggcacaacacgtaattgacacaattaaacataactatatacaaaattatgaaacctatagtttaatttgtgttgttgtgtcaacacaattatgacacgagacgattattaaacgtttcaagatgatcaggacatgacatgagtaagataaatagtaacatttttttttttcattattacaactggtgcttaattgaaacaaagtcaacgcgacaagacacaattattaaatgtgttgaaaactcagatacgagtatgaaacaatattaaacgtgtcacacaaactcatttgttttgtatcgtttttgagttattttatcgtatggcgtaaaaattgtcagccctactgtatagccattttgcatgtatgtgtgaactctactagggacttagttcaattggttgcggcttcataccttgcagcttgaactgtattggttgttgttgatgctcaatggttttctggtgaagtattttttggtgtgagaaatttggcccagtaacttttcttgttattggtatctttaccttcctgtatcagtaggatgttcaggacaataagatgggtacttgcaaatttgcagcaggtgatagttctatgcagtatagccctgcagatgtttctcagctgacaagcttcacaactaggcttgacagaggtgaactgacatctgaagttggcctaaagggtcattctaaggagagaagtgctgctgtaagggtgcccatatttttgtctttatgtatattttcctatatattttgttgatttgttctataagatgatctttcctatcttaacattgttatttcagcttgacatgtgtaagaagctactccaaattgctgaaagatccttggagggggacatgaattactatttcggcattgaggcttgcgatgacgtgttaaatggatatggtcaatttattggaccagcattgaagcatgattgtctctgtatgcgtgctgcgttgttgctgaaggttcttgatattttatatgaagtgattcaaagattctttttattttttattattatttttaaatgaggttttgattcttgcaactatatttttcagcgaaattggaaaaatgatggtcacatggcgattagagattgtcataatgctcgaaagattgatggctcctcatttagggcacattactacatgtctgaagctctgtcacaggtgattattttttacccatagtaagttagttgaccctttaacacttgggctttggaaagccttctggcattctttaacccacacaaattggatgttgtttgcccctcaatcattttataattttgctggctcagtacagccaacttatgagaaagagaaatctgagaagataaacacagacagtagaaaagagctcctttacacaatatgtatagcagattggctactaaactgaggacacttttggaagtttattcaagttgagtggaatcgattgtgagcgattaggtttaaagtacaacctgtcttttctctctttctccaaagaaaaaaaaaacactcctaaatatggagtcctccaggttaagggacagaggtccagtaatcttccaatttgctgtggggtcaagatattatttgaagttatatgagtgtgagggctctgttttttctgtttttttttttctttttcatattgtttatcacacaattgtgcgatatgtgatgacctttccttgactcttgtcgcctttagtgaatttatgtttttgtgataaaaactggaagtatacggtctttttttttagaaatgatatttatagaacttccttggttagaaattttctatcatagaaatcaaagacaaacaatgaaatcccgcaaagaaaatactttatggataaaagtggcaaggaattcagctagcatattcgagaggtaagattctccaaaataaacctttggagagggttgttctctatttagaccaagtctattctatttccaagctacctgaaatgaatctcttatccttatattttttagggttcggtcatagtacaaaacgacaatgcaacccctcaacttaaaacaaccacaaatacaaaaatagggaaaaattactaaaataccttaatacaaaataacccctggccaaagctattctcttagtctcctagagtaaacaaagtgtattgaggcttgtcaatatcccaaaaaaaaccttcaccttgttctcaaggtgaaaacttgctattgaacttggtgatgaaccaagtttcagtttgtattttcctttaatattggttttccctctatttccattgaatgtagaagacccccggtgtattgtgctccctatccgtacaagtttctttgtcaacgaatatcatcaaactctaaaatcccatcagttgttgtagcatgaccagtggcgtcttcttctcttcaggcggtggctgtccattgtgtaggtgttgctgtggcagagcacaaatgtgcctttcttgcaatgaacaagtgcttttcttataacataccctctcaaaatcgactccttccaaaaagcctgagtgctcttctatattcatctattgttgtttatccttgcaaactgccctgatcagttgggttttcctcaacagctgcaccatctgcgcgggtagaataatgttctttttgtgttaccaacggtattatccacaccatgtgaatatttccagtcaaatgttggcaaatttagttccctgcaatgggttccctgttcaaaggatcttttgtagaaaaatcaatatctatgaattaggtggcactttggcagccctatggttgtgttccaactgtatgtcacttgtacttgcctcaattgatgctatcgagttccctccatatcttagtgttggatgtctttaacacctcttctcatggttcttgaatggttcttgactattctagggaaatttctatcgcttcatccgcatttcttggatgttgtacccttaattcagcctttactggtgactaatccattaaaaaatgtgcccaactgaacttttggcgctatgttttctaatggagctaagaggtggacaaaattttgattatattcagccacgaaaccctttggcttgactgccagaaatgaagccacaaaacatataccgtaacaaacaaacgaaattaagcga

SEQ ID NO: 187151 - DNA, 6251 bp, Cannabis indica
tggatgaaaaatgtttatggaatttacaataaaaagtttgaatggatgttcgtattggcaggaatagctatgtcagagctaaagatacaagaagcaggttgctctcaaaaagaacgtgtgtattggtagggcatcagcataaattaaaatagtttatttattattttggtttctcaaattcagttctttttggcagcaacaactgcagaacttcaatagttgattttcacagaagctgtcctagatgctcatatgacctttgcctcatttgctgccgcgagatacgagatggacacctgcgcgggggtggggaggatgctgtctttcagtttattaatagaggcttggaatacttacacggtggtaagcctaataaacctcaagtcactatcttttcggacagtgtaaggccaacctctgagtggaaagcaaatgatgatggaggaattccatgtcctccaaaggatatgcatggttgcagtgatggtctcctggaactgagatgcattttttctgaaaattttgtctctgatttggtaaagaaaggagaagaaatggcagaaacttacaatctaattgacatgcctgaaattcctggacaacaatgtttgtgctccagttcaagggatgtgagtcaattgaacaatggaacagtaaggaaggctgcttctcgagaggattcggatgacaattatttgtactgtccaacagccatagaaatccaacaagaggatctaaaacatttcaggttgcattggagtagaggtgaacctgtaattgttagtaatgtgcttgaaactacttcaggtttaagctgggaaccgttggtcatgtggcgagcatgtcgccaaatgaatcataccaagcatagtaaacatttggaagtcaaggcaattgattgtttggattggtgtgaggttagttttgtagccaaatttttgttaaataccaatagtgttaccaatgaattggttttgcttctatttgcttattgttttctcttaactgcttgcttacttttgcttgtaatgagttcttaagtaatttttcttttatggttataatttataggatcaaatggtttagaaaggcgcatttgaggtggaggaaagcctcctcaaggcttaaacattaaagtgtagggaggtgtaagcttccctgatttgaggtactgcctcatagggtgagggaggtgcaaacctcccttaatcttttaaaatagggtaagaacccagaaaatgagcccattatgaattgaactttaatactaagacttcagccttggtatgttaagaattctaattatttataaagcccaacaaatgtatagttattttagaaacctaatcaacacttgagtagtgttcacctaattattttcccttttctcaaaaataaatagcaaagcttgggagaaagtcagtcaaagacatgcttcctttgtctctttttctaatataaataacaaagccattactaatcaaatttgttctattatagtagaatctaagagaattatagaaaattaatgggcattctatgctatgttggtgatagaataatcttagagtaaaaatatgtcccaaaataaatactagtaatgaattcctcaagtgatcttttttttgaaaaacaatgacaaaggtacaatattgagttttcaagaagctcgtttctccgaattcccaatcttttgagaagattggtcttcccacaaataatctactcctttttaattccaagctaatttaaatgaggttgctccctttctatttataagcattgattttaaaaagacttaggccacatgattacaattggatcaatagaattaaaatactaagacaactcatgctatgcacttaagagactaagtatttcctttaatcattttgtgatacaaaagataagtcttaggcttatcagttggagtttaattgacagtaaatgtcatgtgtaatggtgatttatttgacatcttactcttaatttcaaacaatttcttttattttatgttttattattcattctttatatactttggtatttataaatattttttaattaagtatttgaggctcatgcctcattacaccctgaggtttacaccattgcctcgtagagacaaaatgcctggaggcttaaaatgctttcttaaacaagacgcgaacaatattgggatcataagacttgcatatttttgtccaggtttatgaattctgtattttcatcttctatataatgtttttaaaatttgttgtttcctgtactgtctgttctgtatatatgttaacccttcttttctcttctaatattataatagctttttatgtttgtgtcttttctttccatatatttttgtcatcatgattgttgttatgcttattgctttcatttaaatgcatgcatatgttttttgcaatgctgatttgacttgttgaaatgcaggcagacattaatatccatcaattctttactgggtatttagaaggtcggtttgattttaaaaactggcctcaaatactgaagctgaaagattggcctccaactaatttatttgaagagcgtctgccccgtcataatatggagtttttatgttgcttgccatttaaggaatacacacaccctcataatggttttctaaacctggctgtcaaactgcccaagaaggctataaaaccagacatgggacccaagacatacattgcatatggtattcagcaagagcttggacggggagattctgtaaccaagcttcattgtgacatgtctgatgcagtatgttggctatccttaaaatacatattctatctaagtcttggaatttgcatggagtatatgtaactcctatttcttaatatacttttaaaatggtggtaactttttaattcagaatgaaaggacaaaagtgaatgggtgaatcttgacctgtgtttcaattattctctcctctgagttggtaccaaagtagttttatgagtcttcttgaataccttgtccctgctagacaaatttatcatattatactgtagagatcaaaaaatgtctcaaggtttgtttgtgtttcatagtttctaactttctaggtaggctattgtatcttctagggtttaatatacttttaatgcatgcagttggtctaaaatgttgattctgactatgtgatagttagagctctaccttgttatacataatctgacatttttggaattttcatcatatatatatgtatgtatattttcattgagaagacaatttgcctcaccggactatgtgtagttgtctttttatacacactcacacaattatttattgactattagagttgggatgtactatatgtacttcatgaggtgtatttactctaatttcttctttgtcccacctctatgctcttgtccagcacttgttggacaaaatttatgattctttacacacattcatatcacaactaaccttctatgaatgacttcatcaataaggtgattagctccaatttgaacctttattctaattgcagattatatagaatacttatgattctactttttttgtattcatacaagctccttgctatatcttattgttacaagataatagtttactcttttgaaagaaaatcataagtacaattttagattgtagaagttatctggatcattattaatagcatttaccctgtttctcttcttaatatgtaagttattcgtatttcaggtgaatgttctgatgcacactgctgatgttagcttcacacctgagcaacttactgttatagaaaacctgaaagagaagcacaataagcaagaccaaagagaaatttttggaaatgatcagactgtggataacgaggttgatgataaaaaatctgtaaagaagaaagaggcaaagttagggcaagataaaagaggtcatagtattgatcactcgctaaattttgaaaataaactgcaaaacttggaaatggccgagggtggtgctctttgggacattttcaggagagaggatgttcccaagctgcaggaatatctgaaacagcacttcagagaattcaggcatgttcactgctctccattagaacaggtaattgcaccgtaaatagttttattaaatgtgttttttttaacttaattgttgcttgatggtttaaaagataatgtaatcccagtttgtattttcagtgtttaaagttattcagaattactaattacttttctagtaatgtctctatgtgaaatgagattgttattctgtgaccttaccattcaagactttctgaatttgtttaagttgactcattattcctgtcaaatgtccattgttattgctcatttacactgcctttttatagtatgtaaatggaagggttttaacatgcttaaaggcttttaattctttattcttattgctagtggtgaaaacagatatatatatatatatatttaataactaaatgaatttatagtgcttaattggattttgtaggcttgttagcttttaggttttgtactgtgtcaaactggaatttggcctggctggttgattgaggctaggctaattcaatgaaagtattcttaaatattagtgtttaaagtaggtcatgcaactagcttagtatgtcaatttgcttggatggctctaatgaccatttcccttaagacatcttatttatgtagagaggactgggctggactcatagtattgcgttatagaccatcacaaattttaaccatgtcaaatgtgcttggttaaggtgcattgagttgagggaattctttaaaaatctaaatcttcaaaatcaaaaaacatagttggagctttagtgctagtatattatttgattttacttgcataatcacatgcccttcttcattccctggagattcatttggagctttagtgctagtttttatttgtttctacttgcataatcacatgcccttcattccctggaggattatttatttatatatttgggttgcctagtatttttattatttattgcttctttttggtgccataggttattcatcccatacatgaccagaccatttatttgactatggagcacaaaaggaaactcaaggaggaatatggttagttcattatagatgtgtgtggaatggttctattcataaatcaccccttttacatgcttgcatgctatttaataggaattgaaccatggtcttttgttcaaaaacttggagatgctgtcttcatacctgctggttgtccccatcaagttagaaatttgaaggtaaaaaaatcacatgcttattatactgaagctgttatatttgttgatgaaacagatgatatacatatctctattccattactttggacaatcttactttgtaaagatgaaggccttgtaggcttgctttggcctgcttgtttttggcaacagatatttgctactttttcccattatctttttgaatgcatattccatgagtataagtaggtggctgtctatgtgtttttctttttccctacagttgcatgcttgcttctagtcatgcttattagatttaagtttgattgcctctttcaaatgttcattttgtgcttgcataaaaatttcaatgcatgttcatttgctataagtgggctgtattgttttttgtttcttaaaacttttatgcaatagagatagtttgatggttgatacgaattgttagctatttagaattaagagtctagtatattgtatatgttggaaaacattaatttgaccccagttactttaggagattaaatgttacatcttaagggatcttgtagttattgtattccttgattctatactctagagagttggtttgaccaaggagtttattgatctttaatactttagtaggtttcatagttttaatttggcctaatgtattgcatcgatgatgttttcttttgtgatggtattacatttttgagctcttgggcttcattatttttagcttctttgctgattttcttcaatttaaagaactcagttcttcattgttctttgatacctttaacaaggtattttctttgccttcatagctgattttcctaacttctaaagaactatggtctgccatgttctttgatacccatatcatagtatttattcttttgattgccatttttcttcctgtcttcaattcatgttggagatatctaaaatcacaaacacttctgcttggcaagcaatcaaaactaggtcaaaaattgacaggggtgatttagaggctgtttgactg

SEQ ID NO: 187152 - DNA, 3619 bp, Cannabis indica
ttttattttcggtactgtaaacaatcaagaatttcttaaaaaatttacaagtggtcacgatcataaaagaaaattggactggaaagttctcctgaattctgaattagacaggggtctactgaaatactctcttgttgaagcatatacaaaaaaggaaaggtttgaaatctcactcaccatgtagggctgctcacattttgctttaatcatcacacagcataaagccttacaacttggtcaatctttgctcgacagactggacatccccatttcttggcttttatttcattcaaacaagacatgcatccagccatgtgaccacaagggatgcaagctccttcaacaggagaatccaaacaaacaacacaggatgacgattcgccatcttctttactatcaccgagtttagcaggtacattattctcaacaactggggaggatatatcaataggacttgaatcaattgatggatagtgaatgggaccatctggaatcggtggtgctgatgcaatcgattctggggtttgatttgttgggacaactgattcatggtggatcttgtcatcatgctcggttgagcatgaatggctactttcggaagttccttgctctggccactcaggcgcttttgatgcactctgattagaactgctcgggttctgagtgccagatgaactggctccagagctcagattggcattataagggttttcctccgaagcagactgaatagaggcactcaatgccatagctaattccaaatcctcagctggtggtgaagaggcttgttgaactgtgacttgatcagtatgcaaaaatgcaggatgtgcctgaaatagtcaataaatttttaataaaagaaatagcactccaatattgcatcgataactttcaactacgagacaacgaactaaagtcatggtaggattaagccaccacattcagtccatagtatggaccacagagatcttcaagtttgaaatctaaggaagttaagcaactactttagaataaaagtattcaccaacagattctaataatgcgcttctgagtcaatataatcacacttggttcgagaagtttttcacgtaataatgtgtagcatacatagagtagaaagagaatcgacaagaatatcatccatataggaagtttgaagagtacctgaggaattcctttgcaagcattgcagaactgttgaagctgttgccagtcaccttccttttcgggggcaagtttaatgcgagtttctggaaagaaagcaaacttaagtaaactacacataaggaaaaaacaaaagaagaagaatctgactaatcccaagagaaactatgtcaggttgaaacacacacatatataacatttctgtatcccttgattggaggctggagagtgatatgggtaaatctactaccctgcaatcccttgattgcaataccaacttaatagatcactagtttcttgtgttattctatcatgatattctacaggagaatttcacagttattgaatttgtacttacgactaagcattcgaggcctacaccttcttctccgcctcctgcctctcggtactataaattgataccagacaccagacatattaaagacacaccaagaaatgaaatcccacataactcctaaaattgttattaaacaaaaaagaaatacagaacaaattttatagaatcaagaaattactagtgacattctcgagaattgacacgaacgaatcagcctgaagtgacttcggttcttccaaattggctttccacaatgcaattacagcacgcggtttggcatcctgacattaatcaaaagattaaacacatgttacacgaggaaccaaggtccagaaattcgccaatgatgtcatgaatctgacaataatagactaccatgaaaaagaaaaacactttatgtggccacttcaatcagaatttagaatacttttccgaacagtatcgcccaatatcgataccaaatagcaaagatgaagacaactatattcagcatttagtcacatcaataggcaaggcaagcattaggataacaactatcataaaatatggtcagaggccataaatggtcccaaaagcatgcaagcacacagtaacctagttgctgaaagttataccgagtaacaggaaaaaagaatacagttaactacagagcaggcacaatatgaatctgttctgttcaatgaaattcaaataggatcatcaatctcgacagctgactcgatcacaactttcaaaattacaaatataatacatagaataattgagataaaataaaaaatgcaaattatactcttcaatacctgcacactaggatatagggcaagctccaacttataaggcttggttggatttcgggatccagacggtagaataacaacccaactacaaaaaccaaatagtagacattaatacacagtaattttcgataataaaatcactgatgaaagtttaatattcatttgtacagttaacagaagtgaataaaagatatttcaactaagatcataggtatgaatactcacacttttcttgaaagcaattgaggagcaaatacatcaagaaatccaggcccataaaactctcgcatccaacccgagaataagcgaatatggtgctacacacattaaaattacaataaatatccttgcaatataacataaaggcatgagttaatatcaaagcaaagcgccaagacatatttgtagtagaagagaatcgaaatataaacttctaatatacctcaattgcgcggacaacattaccgtgccctttctccctagcaacatcaagaggagtttgacaatcatcattcatgactaaagcgttggctgaaatattagaagtgaattactaattagcacactcaacaaagtatatctacaagaaaactcaacaaaagaacagagcatacattacctccattagttagaagcaacttaacagtattttcaaggccccttttagctgcatggtgcaaaggagtcccagcatgacgacctaaaaaaacagaggagaaattgaattaagcaaattggtgatacatattcaatggtgcatatgggtcaaaatcccaacacaatagcatcattaatccatacaagacaccccttcattgtccattctgcataagaattagctagagaatctttgaaacaaattaaaattcacccttatagtcagagttatgaaaccaaggtataggaaacttgtctaatttagttcaattttattattgtggagagtgtctatatactaaattgtactcctaaactttgataaaatcatacctcctgaactttaacatgtactaaattatgctttcgaaatttttatccacgtcagactttctttaataaaattggacaaaagttcttaaaagaacaatttcaatactctaaagggaaattttaacgacctgaaaagttttggaggcatggtttggtttatgttaaagttcaaacaggtaaaaatccaaattagcctatataatactatgtattataatagggtgtactaaatcaaccctcaataaacaagcctgcctgccacaacattcattaatctcataaaacaatctcttttcaataaccattaatt

SEQ ID NO: 187153 - DNA, 10442 bp, Cannabis indica
gacaagtatagtgagcaagccaaacagacctgcggagagtgatgaatgccagatgtaaattaaaaaattaacattttcattgataatacaaatatttaatcacccaaatatatgagctacattcagaggcctatcaaggggccctctttgatttagttcaacgtacaaaaggtaaagtttccattgctaagaacaccttcccatatatttgagcttcacttagaggaaaaacttggatatttaatttttatgggatgtagagcggaggcttttacttgaatgtatcaaattatgagtgctaggagtatcgtctaatacaccctgtagggatatgatgagcttcccgtacactcacttgtatctgtttccaaaactctattaccctccttaatacaaatgtacttctctgctctctcacagaagtcttctataccatcaaattcacttttcagcatattcttccatagtctacttctgacaaacatgagttcatcgtcagatatcctccctacttaggaaactttggagttaaagcgatggatgtatcttcacatgctttcttattcttcttgcttcataatggtcatacttgttataggcataacgtaatcactggctgcctgatgttgttgaaggaattcttccaaaaattgtttccagtatgtgactaatcttggcccaagccttttgaaccacttatatgcagctcctttaagtgcgaccacaaagcattgggaccttacctagcatgacattttttcatcttcattagctcgttaaatgtttgtaaatggtactttggataagttttaccatcatatggtgtcatggaaggctccttgaaattgggtggaagttgttcaatttgaatttcccttgagaaaggggatccttcatcgaacacatcatcctccggatttccctttgatgtggtagccatcttttgatgtagatctcacatctctccttctagctccttcattcttttgttcatcatttcttgatagttggtacgtggaattttagtattccttacagtttgcatgggacctatgagtagtaatcctcttgtcccatcatcatgaaacttcccacgatgattgagggataatgcctttctcttgctttgctcttaaaaggaggtgcaggcacggttccctccatatgatcactggatgtttctatcattacggtcttactatagtgggtagactcacattgccttgaatgacctataaggtccttgtcttgcaatgggccatttttgctctcatcctttagggtactatctataaatgacacggagttccctccaccaacatgtgcagttgggatctcatgttctttctagtggttaatgagcagaaagtataaggcttgggttttttctttgagtatgccgctcaacaccttttgcatgctagtcactataatttctagcattttgctcttctagtggagatcatttatttcatcttcatagtggtaagtttgagattttgagctcaatgagtacgcttacttttcttttctgggatgatgtcacaaggtatcgggatctctcagtgttattggtggacggcgctttactagaattgttttggccatgacaggctattcacaccaacatgtgtgatggatgtagctactccataatcttgatgccttgaagacggttggagtatcttggagtcttgtagttgtggtaagtaaggaaactacatgacttgagcttgttgctgccacaaatggcgacaaactattgactttgaaaactcatcaaccaaattatagtcgcaaaatcaaaacatagatgcaacacctaggattaagatgaagatataaatatgaaaacttttaaagcaaaagtgctaaatatctatggagaaatataaacatgtatatttctctaagtcaagtgttacaatgattttccaatcccttctaatatttgtgaaaggggtaattattttataatggtctagggtacactagtgatcccaagggacatggtgacatccatggcatgcaagctgcaggttgcaggtggtggtcttccaccttgtacctttgtctagtgtgaggtggtcctgggttgcaagagtcgtggttgtaatgcacccttggtcaggttgtgaggcctgtggtgtgtccactacttgtacctccttgcctttagaacatgcaaaagacgtagttgtacacacctttcgtgcacgccttgcccttgtgatcgtactcatgtttccttgttcttcaacacttaagaaaatttcactaagtatagctatgctgttgtaggagggcatgtcaagtgtggatgtcgagcgactctggagcatgccagcctaatgactccatgaagagcatgaccgagtgactttctctaatgcatggtcgagtgacattgtgagaaacatgactgaatgacttctctaatggatggttgagtgacattgtaagaagcatggtgaagagtgacattatgagaagcatgatcgagttacttctcgaattcatggctgagtgaccttggtcttaacatggccgagtgaccttaatgctcacatggatgagtgaattcaagccatgctcggtcaaatgtcctcttcaacggtcatggccgagtgacttcaagacatgcttggttgagttatcatcaaccctactcgaccgagttgctctcaagctagggtttggttgagtggccccagtatacatgtgttgacctggtccttccttagctaattcttcaagtcagtttctttcatttctcaagactaatcgtttactaatctcaaaaaattaaacttgttaatttttagggttaataagctcgtacttagaagacgacataagtaaataatgttcatgatccgcaagaagcttggcgagcttctaatttaccaaagccgaaagaatttaacaaggggccatgttctgaaaaagatatggatgaccatgatcctacttccaagattgttgatcattacagagacctatcatgaataattccattagagcagtaggatggacttacacctgaccgggttgttaacattggatgcgaagtgttgaattgggtagaccttgtttttttcccttggtagattacttttctcatggaacatatagcactattttcatgggtgtaaagattatggctatccaagcagcttttaatcctgggccctaatcttttttgggacacctttcatgctatgacattctttttcttttctatggagctatgcgactcttttcctatattctaccatgtgctaacttatgtggcatgtaccacactatgcataaatatttatttatttatttatttttatacttgatgatgtattgcatacatgtcgctcaagacattgagcaatgcacaagcactttaaaactcaacatttttaaaatccatttaagtgagtgtgcaatgttatccttattagtctatgtatgagtgtggttccccctaagtgactaagaaggtttgcattttggtcacttgctaaataaccagaatttttatgtaagaactgccatcatcccttgggttagccactatgatttcatactatttacccaaaaactgaccctggtgacgtggacatcaatgtttgacaagtggaaagaaagaaaacatccaagatttgagtagtcctgagtcatagtagttgacctgggaggggtccttagccctgcacctaggttgactttgggaactccaaaatgagtgtttagaactcactaagttgtttcaaactcacaatccttaagttttttaaataaagaagataaggagaatcatgtccaacgtcaagaaacaaaaacgagatgagaaaacaccccgaaagtcaatccaggcgcctagggtttcacctagcacccaagtttgacatcccaactagggttttagtttttgggtccatttttgtgcaaatgactcaacctttatactttgacatgaataagacatatgacgaacatatttaaggcatcagaattagaattggagcacttttaattttgagcaccaggcacctcagccacctagttcacccagcgcccaggttaacatattgttaacctagggcgcttccaatcacaatatcaaagaagtatcccgagcattttgttagtttccatctaaaacaaagaataaagtgcttttaggaaagaaacaaatcgacctagaggcaaaaagggggaccaaatgctaaggttaacctaggcattaggcccagcgcccaagttgacactttatcaacctgggccatttctagaaacaaattagaagaattcttcagggaatattctccatttttgccaataattaatatttgggtgcttttggtaaacaaacagattcatttgggagccaaaactaggatctagcgcccatgttgacctaggtgatgggcctagcgcccatattgacattttttcaacctcgtccattttcaataagttttttaagtagtcttccaggcatattctccattttcacaaataactaagatacaagtatttttgggaatcaaacagaaccatcctgtggcaaaaagctagacccaatgtgtaggttgacattgacattttatcaacctcggttatttctagtcatttttctcgaaaatttttgtgggcatgttttttattttcataaataccaaagatacaagtgttctcggggggccaaaattggacccaagcccccaagttgacatgggcactaggccttgcgcctaggttgatgtgcaacttaatttgcatgttttcgctcctcaaacacaaattctactcccaacattcttcttctttttgtcagaaatgaggtaggagacctcatttgcaatttcaaattccttaaaagtatcaaaatgagcctccggaagtcacccaagaagcacctggcgcccaggctaatagatagccttgtgctttgggttctgcatataagaattggaatttgtcttagaccatccgactattttttttgtattaaatgagagctaatacttgtgaaaggtcaaattcacacttcgatatttcacccttattaaggtggaataggggagttttgagtctacacaatttcaccaaaaagtctctgagaactggtaaacaacttcaccaaagtgaagaaaatgattaagtgatgtcaacataccacttaagcatcaaaaaatacaagtctctgaaatttttccacttactcagcatcctgattaacgacaaaatgtcaactttggtgctggatgttcacctgggtgctgggtgctaaataactttcagtaaaattgccataattccctcaatattgatacaattgatgcgatccaacatgcattttaaatctcattcaagtcatgtgtcacactcatattgcaattcaaaatattttaagtccaaaatttgtgcccaatattttgatagatttcccaaaaataatccaacagacgagattcaaactcagaaaattgatgattttatcaaaatttgattttcaccatttgataatcatcaatggtcaagattagcccaaagagaattttcacatttttgtcttatttttattaatattttaataggacctccttcctataaaaggagagctcttctagctcatttttcacattcttttaagtcctcataaggttagagaatctctctctagcaattagagatcttgccttggccagtttcttgtaattctcgtgagaaataaaaactaaaagtagacgtagctctattatcatcgcgacacgaagagagaactactataaatttcttgtttctctctatttattacttaaaattatttttcctctcgccaatctagcgagcgaataatggccaaatttctacgtcgacacatgcactcttaaaattatgtgactaaatcactaaagttagcaagataaacaagtatttcaggttcataaatagattcaataataatcatatgagctctgtcataacttgaaattttttttttgatgaatagaatgggaaaatgtgcctaatgacatcaagttgggtgcacatgccttataaaaagaaaacaaacttcgttggtggggttgtcttatagcttaagcagttgctgaaaagaaactttactgatagtaccatcagaggtgtactttgttccaatagcgaggccctggtaccaagttcatgttggaattgtaccgtgcaaacttatatgttccaggatgaatgacctctaccgctttgtaaggtccttccaaattaagagcaaactcaagatggtgtgacttatgcccaccatgtcttcatgtcaccaggaaaagatgtcttggttcgagaggtacttaatggggacaaggttggccttcttgaccttggtaatgcttgttagcctagccaaagcattcacaatcgtataatcttcccttgctagttttaaaccagcgatcagttcttcatcttttgctttattattggaagcggtgaatcttaagtggatagcagcatgaatgtactacacttcaggagtggtcaaggtaagacaagctccttacaattagtcaacagaagagccaccaatgtgaagcttccaagtatcctttggatgcttttgctcttgcttcttatctaaccctaatatatgtggttcaagtaagctactcaagtcagtactttgggtgataccttgtggtcatgggttttggccttacttgcttaatactattctctagtcacttgttatcattagtgttactaacatcgttcttattgttgacactcttcccatttttttagccattattattattgttccttgaccttgggaaccttggccgctaaaacttgctccattcacaaactttttggcgtgatcaaggcctttgatgttctgttcagcctcttccgacttaataaatttctctgctctatcaaggaaggctttcttggagtgggttagcttcctccctatgtctatccagagtcgacttcccacattgatgcccctatgaccatggccagcttgccattgtcacttagactttttacttttgttgcttcttacatgtaggatgaatatagtacttgagtggcttgcttggcctttgtttattagcactaagtaacccaagtttgcgagtatttatttatcataagagaatttatagaatattccaacaagctcgtcctacgaagtatcctccccagggctaacatggagattcattattgtgtcatgtctattaaggccgcgaagaagacacaacatatgaggtcgtcatttattccttgaagatccatctggatcttgaagttctcaacatgggtgaagggatcttctttacccatgtacatcttgtaggtcgacatctcgaacttggttgggattgggaggtcattgattctttgtgagaaggaagactctcttctactgtccaactttaagtgtgttagtttttgtgcggtaaggtccctaacacaccgggttagcacgtctaactatggttggatcaccgtatctatgatgacttatggttggacgacactgaagcctttgttgacctgatcttcttaaatcgtctcatgcgaagctatatgatttaagcctccattgtccctattttcctaatttccctaatttctaataatggtattctgaaggtcctcaaccccttaggctcccatttggttaaagactaatcttagcctttggggcatactgtcaacattttcgttgtttgctcttccagatactatgggcagtatttaatgattctcacctctttgaggtgggttgttggtgggtttatgctgccttaaatggacatacagtcctacaagctaatagcctatcctaccatttttattttggttgttagcattactctcagctttatcttctccatgaccatcagggtaggtgggacgttattaactagtgatttcgaggtcttcccttctagttcttagtcaattattccttggttgaccattctcctgttgaggttggtcattgcagcggggttgccaaactcgttgttgggctagccttcttttgttcccatgttggctaacactgttgttcctagagtttcctcctccgttcttcctcatcagaacattatgattgttttcccttcccataaggtgttttgaaaggacttggtcatccacagggagtggacagtcgttgttattgttgttagggtctctattagaatgatgactcttgacatgatccctatccctaagacggtggtatggttcgtagaccaccctttattgttggtccctaggggtacgtaggtcctcgctattggtctgttggtcaatcgacacttgttggttgatggcatccgtgcctaaacctttgatgttttgctgcacataactccaaatcaagttagccacttcccaagtacgtcaattcatagtttcttgacacctttccatctcctgagcgtgttcatccaaccaagatcgaagttctctccttttttgtcaagactctcaagaacagtcgtttgagcttaggctttttcttggtgcacgctctgaacatggtcttacacttagccaattgcatccctcaactgatcaatatcaggattgatcccttctatattcacatggggctcattacgtcttgccctaaaagcgccaatacccctaaggcattagaatggcttgtgccttcatcagtctgaatgaaaaaatcttgtagtgtccctaccgattgcactgccagttgcacctctgcccatggtgggagctatggttgtacgacaagcgatagtttgtccatcaactttagtttgggcgatggtatgcctagtggtggtgtttcctcgactaccaggatgtggcagtcgctcgccacagtttcaggaaggttctcaccaataggacttggtgggcattgtcaacaccctcctcagttcattctttagatgatcttttggtaaacaccattattttcggtaaaagcttcgagattttggcttaagctctcaatgaaagtactaaaataaaatgttgattagttttttagtcaatcgacacggggtcttaattaatgagaataaaacaaaaaacatgtaataaatgctaataaagaacacaagaatttaaaggttcagcaagtgttggcaatagcctactccccttgtatcttattaatctgggttgtaagtcaagaacaagctcctcagtgcaagaagtaaaaatgatagagtttttccttgtgaatgaattttcgatccccctctctaggtcgtaagtatgttgccttatatagggaaatggatcatgcacttcgcttaaggaggcatgtcctaaggttcggttgaatcccaactacatgagagaatatctcaactatccctgtgattctcagaatgtgttaagactcgattcttttggtgacatacaactttttttgtggatttgtaacaacttttgagctttcagtgggattggacatcgtgagtgtgtctccttatcaagtgctgggaaaaataatcaattgggcgattgtccgtatgggacttgaccaagtcagccttagggggacgctcagccttggtcaacccctaaagggacacttgaccttgtgtcgttaccctcaggacatacacctttgcttcttactttgatccaattttgggactctacggtctttgtcatgtgttactttgacacttgtagttatatggagattaaaccatacgaataaacagatgttgagtacacgggatgaaccatgggactttgaggaaataggccatcacccttgtccaagcagggatagggtttggtaccaaagttataggaggacgggtccaacaccaccttgatgacggaggactcgacttaagctgacccctaaggggtactcgtcttgagccgacccctaaggggtactcaacaaagactgacccttaatggggtgaatgtggaccttgagcaagtaaatcagcaaccatgtcgaagtggagatagggtatggtattacagttgtacgaggataagatgggagccaacaccccttgttgagggtggactcggccttggccgactctcagtgggggactcggcctaagttgttccctaagggggtactcgacctaggctgatccctaaaggggtgactatgtcctagtctatatttttcaaggacccttcatactaaaagttcacctatggtctataaggattgtaccctttgccctttaataattattccttatataaggtgattttacattttcctcaggaatttatctcttctaaccttatgtcatatatcattatttttactgcatcacccttaccaaaataagagaaaataatttattttagagtttatgctactacaaagtaataaacttttaattaaatatatcaaaaaattaaaatgatctgaaaaaaaaaacaaaaaaact

SEQ ID NO: 187154 - DNA, 1194 bp, Cannabis indica
aaaaaaaaaaaaaacaaataataggttaagagtttccagttaatcctatggcgtccaaaataaaaccccacttctttccaataatcttaattttggcccttctccacaagctcaacttctcaaacgcccaaacgacaataaaatctgcgtattggttcccagagagcggattcccagcctcaagcatagactcatcactattcacagttctctactgtgctttcgcttcactcgacccccaaaactatcaactcttcattccttcccaaaatgcccaacacttctcaacttcacctccaccgtccaacgccgcaacccctccctcaaaacccttatctccatcggcggtggaaatgccaatgcccaagattacgccgccatggtttccgactggaaccgccgccaagccttcataaaatcgtccataagcctggccaggtccaacaacttccatggcctcgacctcgattgggagcaccctgaaactcctgaccaaatgacccaattcggctacctcgtcgacgagtggcgcactgccatcgccgacgaggctagcacctcaggaaacccgcctctgctcctcgcggcggcggtttctttctcttccacacatcaaagtgaaagtgggtcagccgaatacgtcgtcccagccctggcgagaagcttggattggataaacgttatgggttatgacttctacgcgccggattggtctactgtgactggacctccgggagctctgtacaatccggggaggtctgtcagcgctgactccggtgtccgagcttggatccaggcgaagtttccggcgaataagatagtgttgggatttcctttcattggatatgcttggaccctttctaatcccggtaacaatggatacttttctccgacgaacggagctgctttcccggacaatggagctttaacttacaaaaggattaaagagttaatggttgataacaagtcaagtttgactgcggtgtttaactcgtctgtggtcaacgactactgttactttgggtccacgtggatcgggtttgacgatacgcaaagtattgagactaaagttaggtatattaaagaaaaaatggggttacgtggctattttgcatggcatattggaggtgatgacaatatgctactctctcaaacaggtattattgattaatttcttttgttttgtattattac

SEQ ID NO: 187155 - DNA, 1574 bp, Cannabis indica
gcctagcgcctaggttgacattcaacatagtgctcacattggcgtcactcagatgcaatgtatgctatgggtattctgcttatcttggttcaaaataggggaggagcccttgtttcttgacagaattatcatttaagtgccaaaatgactaccaaaaagcccaaaaatagacacccgacccccaagttgacactcatactagtatactgggtttttgatatccgattctagtttcatctcgagtgtttagatatttttccatcataagggagacctacaacttgtggcaaatcaaattcacactttgatatttctccattttgacaaagtgaaatatcaaaaaactagtcataaatcgattagttttgattctcccaattctacaaaaatacaaaacctttgagaacaagtgaacaacttcatcaaaaccaagaaactagctaagttatgcaacaatatcaccttgtcttatccaagaatctgaaaggaagacacctgacattcccaatagaaaatgaatggattcaagcctactagccttacgaaataatgggccagagctgcacggagagatgggcctcaagcccatcaaaggggcaaaatatctacatcaagggttggatgtctctggatccagaagtgtcccttgtaaaaataaagagaggtagccaaagccatctgggtgaatatctgggatacatctggaaggattttccaagagatgcccagaagccaggctgagcctaacttggcgatccttggacacaaaatcccaccgatttggggagttgttcccaatgtcaaaccctgagagtgtgtgtagcaccaaaaggaacatcccttttatccaacaaccattatactgacactaaaatactcaaaggtggtgctcgtacgacacatgttgacctcatgtggtcccctgctgatggaacataatagccccattgactaggcttcagtccacgggcccaaagttagtgtatttatgtatttacaaaattatttggtaatgttcaatgcaatccatagcaggtcacgagtatatccatacccgaattctagcctataaaataatacttaaataccataatgcagaaggtttgggaaattcattactcaaacactacaggaaaaagctagggttcttaagcttgtgaagaatcccattgcaatacttcaaggcttttaagaccaatacagctgactcattgactcgggttcattaatacccaaaccacataaatatctctatctcctttctcatctatttgatttcatttttcttagttgttatttgatatattgagtttcaaaaaatcacagtaaatattttggtgctttcattgaaagctgaggaaagactttaaagccaaatagtatcaataaaaatagtttatacctagaaagactttacattaggcccattaaccctgatcaggatgtcaatcatggatgatgttaacctaccctctagagtgcacgctcgtcaaacgcactgcgagagatgcagaaacattcaaaactagcagcaatccaatcgagaaagccaatcctcaggaaaaactttatcg

SEQ ID NO: 187156 - DNA, 2341 bp, Cannabis indica
ctctaaagggttgaagtggggagtagggctaggatggtcatatagagagagaaacgtacaggtaacggtgagggccggtgacctgagtcataagagtccagtgtctattttgcataaatatatagtccaaattatttttggtttaaattaagaaaacgtttaaaattctgaaaagggggatggaacgggaacgggaccgggaggcaaattttattattaattaattggcgcacaatcgtatactgatttcctggcaacctatatatacttcacttctactttttacaattttgaaaacacacttgtaaatttctttggctgatatgcatattgatatttatatttatatatgcactatttaagtataaaatatatagtgctattcttttttttacgtgaaaatagtatataaactcgtatatttgcttcaaaatgaagttttctatcaaacaaaatgtcaaaagcttaacacgtgcagcactgcatgcaagttttaaatcaccatccaaatctcttaccattctatgacacacgtgcgcgcagcgcataccatgaccccaaatgcaacgatatataattattattattattattattattattatttgaacgttgtaaaggagagattagagaacacaacatttgaaatagggggaaaaaaaaagttcatatttaacacataaattttctcttacaaaaggacgaaacagactccacaacacaaaaagacaagtaaaaaaagaaaaaagtcttaaccataaacagaaaataaattaacaaaaagtaacctctcccctccatccacattaacattcacatgagctagctttacttattattcttgacataaaactcttacaatcgacgcacccaaaagggccacgtcatcgatcagaacccagtaaagtagtagtggtgaagaatcttaagactgctgctgcccagaggtgagatgctgctgcccgaactgctcagccttgtccttcatctccctagccttgctggctagcttgtgtcgagcttggtcaagctggtcagctcctagtgggtgcttacctgtcacgtacctgtatatccacgataaaacggtgatcgctgccacaccgaatcctcccgaggcaagaaaccctgttatgatcaaacccacggtgattaaagctggcaccagaacaggactgaatatcacaaacagtggggtcgcgattgtcagagcgatgactgttgccgccaggaccagacccgagaggatcaggagggaacctccggcggtcaccgccgttgcagccttcaccacttggtgggacctgggctgtgtctgtggttggccgtagtgctgttgagattgctgatgaagctccgccattggatcggaatgatcgaacggctcttgtaataagtgttttgattgtggaaaaacaagaaaactaaaatgaggagacgaatgtttggaagtgagtaattataatggttatttgagagtgatatgtgttgggagtttatgtaggaaaggaagtctgggaaggttgatgattgtggcgtggcacgtgtacagtaggagtgtgccacgtgttgagtccttctcatgcaagggcttgcatgtcactcaccgcttttgtcttgcgacacattgtttttggtttttcttttgtatcatcacatatttctcaaaataatagacgtttttcaaaaagtgtggtctcaaactagcttcctaaccaaaataatattacatgttttctaatatataattttttactgtattaaaataattgattttttttttaaagaattacctcatactattttttacattttttttaatttatggtttgatcaattgttataggtagtttttacgtgagttgttgagtagatgttagttgagattagattgctcaattagttgctataaaaatttttttgtgtaaaattctgtataaatgcaaaaaaaaaaaaaaaaaaaaaaaactgttttaaaatgtaaaaataaaaaaactttaaatttttactgtattaaacaatttgaaaataaaataataatctgttgctataaaatattattaatggatgtctaaattattaaattaattattattataaatatttaattgtattctcttttattatggtggcgtttagtaatatttttttaatcaaatctgtttttaaaattaaaaaagtaaaaatatttttcaaaaatatttctataaaactcttttcacttttcattttttaattaaaaatcaaaattttgaaaataaaaaaaaacaatcactttcaatatttttttaaatagttttttttttcttaattcaatatttttggactctgaccagacccg

SEQ ID NO: 187157 - DNA, 4295 bp, Cannabis indica
ataacaccatgcatggtgaatgatctataacgcatagatacaaagaggaaaagttgttcaaggtagagctacccatcagtgaacatgttgatcttgtgtacttaaatcacatctaagtcaaatttacacaatctaataaactaatttcagttctggtttatacacaataaaaacaggatactctgaggcaagaattcttgttcattatatgatttttctatcatatagttggctaaatggaattagcctattttattttaataccgcaacaataattctaaaaacataaccatgatttcagaaatacaaatatacatctatgttttcactgatttatggatacaaggagatgaattcatgcaatgttgtcttatttctagtattctttgacatgcaaatgtgtaatcattgagaaagtatgaatagtttactgaaaatttacaatgtggaagcctattttggtggctaaaatttacatttctatgaagattaataattcagatgctaagaggaacaaaacaaaaccttagaagccattgccaactagagatgaagacaatacctaataacaattataagggtgccacattcttgtaccactacacggaccaagcttgtctgaagtaaaaaacaattatttatagccataacaatcacaaaaaatgaactcgaatagcacaacccgaatgtacaacactagttggtactgctcaagtaactaaaagaacctcaactaaacaacttatttaattattattcaagatgtaagattaaatgtcataattaatcagatccacacatacacatatagtaatatatttagccttataacttgttttcttaaaccatgaaagttctttctttagtgcaacatccctttacctgaatgcagttccattttcctgtttgggacaacttgaaggacacctggttgctctgccaaaaggaaaatataaccaaattataattacctaccaattttcactatcttcattattattactcataaataaaattcttctcctgctatttttaatatgaacacaactaaatttatcaaaaagtaaaaagaaaaagactgaatcatcttgataaattattaattgaatactattataaggttctacatcccaccaataacattactgagataaattcaaagctggtaaaaactgaagtaaataccttacgctaacaaaaaatcctatagttatatatatagtttttttaaatttcaatacgacattatgttgtagtcttacatcctagataccataatttctgtaacttaatctcaattatagtcggccattaaattattacgtataagagacatgatttgctattaaagggtcatagttcaaaatatcacaactcatcccttattcagagcaaattgttactatgtgctttcagtatctatagcatttcacttttaaacaattatacaagtagtacatttatgttttacatgaaaaatatatgagaaatataaagtaacttaatttatcaccacttagttttagagtgaaaccccaatcctaatatttctttaaattggagcagagtcatgtctattgttctgtttttcaagaacaaaacttgatttcttgtccatagttctaccaccctcaatggatggagccatgtacaacacttggatcggcagtaataatattgtattttcttgaatcatgcaatcaatttctctttaaaatctttgtgttatttttttttcttagggaggtgaaatattgattatcatgctgcaaaagaaaacatgtattcaaaacacaccaaaatgaaaccacgatggtaattacaaacctcaaccaaaaaataccaattatcaacagaacccctcacatgtacttctaaagattgtcttgcctgccatctattaatggaaagggatgaacacacgtagtcaatattatactgagcaggaaagcatgagttaaaagagtataaatagcataccaagaaataataaacaccaatagctgcatattggtaaatataatttccaaggaatgaagaaaagaaggcataatatgccacatatagcaagaagaaaactgttatagccacaacctgaacacaacaaaaagaagagtgaaaattaacatgtcattgtcaaccattaaaaccagagaaccctacagaaattctcaatccctgagcttgttgattcaaatgccactatgcccacatcttttttcccccttttacacgttatgcttattattaaaaaaacacatttgttactctcttcgtattcaaaatgccaacaaaaaaaattacaatgtatgagtttatctcaaaaatataaagaaaacttctttttcccttcagatttccatataaattaaccaaactggagtgcattttcgctaaatgaaatcacaaattcaaaaaagcaagtatatagatcagaacccaactagacgcaacctaaagggattgcctcaaaaaaataaaccctacaggaacttcttctaccaaactaaggtagcacaggaagattaagaaagaacagttcaaaaacccaaccgcctatatacaacagcccaaaaacaagaagaaccttgatgctctattcaaacgagagagaaagatagtttcacaagagagaaagataatttttaaaattttcacctttttcctcggttcttcttttagcgtcggggaacgagttgatgctaattcttttttttttttttaacttcagttatactctaaagcataaaacctccctctattttttgcctcggtcaaccattatagtgtgacgcgttgaccgacgcaaatagggtcttttgtattagtgtaatgaggataatggcgatactacttccgatcccattccaaatcctgaaatcacctctgctccgattcaacaagcttcaatggaaaacagggatcgacttgctcatgaggacttatccagtccatattttctgagcacaggagatcatcctgggcttgtgcttgtatctgctcctctcacaggacctaatttccagtcctggcgtcgagctatttctatggcttttgctgccaaaaacaagactgcctttcttgatggcagtcttccaaaaccaataccttctgatcatgctttctgttcttggaccaggtgcaataacatggtaatttcctgacttcttcactctgtttcgctagaaatttcccaacgtatagttttcttcaatcttgcatctaaaatgtggaatgacttgatcgatcggttcaacgaagggaatggtcctcgcatctttcaattaaaggccgaactccatagcatttagcaaggagatcaatccatcagctcttacttcaccaagcttcaatccctatgggacgaactgaaggaattccaacccatagccaactgtacttgtggtgctcttcaacgccttcaagatttctacaacatggatcaagtactccaattcctcactggcctcaacgaatcctacaattcggtaagagcgcaaatcttgcttattgaacctttgccttccatttccaaagttttttcaatggttgttcaagaagaacgcctaaggactctcggatcaggtcgtcctcccatggctgctgctactcagccttcaaaccctccaagaagcaagaaaccaagaccttcttgctctcattgtcacaagcctggccatcttgttgataaatgttattttgttcatggatttccccctggttatggtgataaatccaaatcagacaaatctaaatccaatcctcaggcacaccagacaagcacttctcaaggttcaatttctgcaccttctctgtgcactgaacctaatccagccttgtctacacaaccacctgatcttactactcattatcaacaactgatttctttcttgagtcaacaaatccaccaacaaaactccaaatctaacactacctcggttgttgctgctactaacctcactggtaatgtccctccatcttctcttttttggattgtttacagtggtgctactcaccacatttgttttgattctaagcatttttttcatttcaataataatcatcatcctaaacatgttgtgttacctaatggttgcttaattcctattgttaattcgggtaccgtttatataaaccagcacctaaaactcaccaatgtgctttatgtaccctccttcaagtgcaatctgttctctgttacttcctaccttgaggatcacaataatttagtcctctttactaacactcactattttattcagggacacctaatgacttcgaaggttgggatggct

SEQ ID NO: 187158 - DNA, 3947 bp, Cannabis indica
ctctctgttcttttttttttttcaagtgagactgggcttggggtagtggtggtggtggctagtagaatgagtttggggttggattgttggggtggtagagtctcagttggggttgttaggcatggctgggttgggtttggggtggtatagagtggtcttgtaggtggaggtcgaggagtttcaaatctgtgttttttttaattattattattattattattattattattattttatagtttgcatcggttcttaacagctgcaaatgacaaaaaattatctctcgtgttttgcatcaattatcaactgacaataatgttaatttgtgtttgcatcgattaactaacgtaaatttttaggggaattaccccatatactatgtttttaacattttttttcaaatttacggtttggatttctaaagtggttgcagcgctagttgcaataggggtttctgtacgattttttgttgcaatttaggttgcagcgctagttgcaataggagtttctatgtagaatttcgtaaaaaatgcaaaaaaaaaaaaaaaaaactattttgaagtgtaaaaatgaaaaaaccaatttttttatgtcacttcaaaactgaagggaaaaaccctttttgttgtgttgccatcaatgcttgaaataatttccatatatattgtgctattttttgtcttcctttctttctttcaattaaagcacgaagccaattattaatagaggaatagttcattcaaagaaaattgtgggtaaaaatgacaccctaagaaaaagttatcgatcttcttaattttcttatgaagccctgcctattacttcaacaacaattcttatttgacaaaaaaatatgcaattgaatatattagctagtaaatatattaagtgatcatcacaatgaaacaaacattcaaagaagacaattacaaataacatgaaactatagaaagaggattatagtcctgcacaaagcaacaacacatacatgtaatgaaaaagatttataccttttgcctttataatcttccaatttttaccttaaaaaaaaaaaaaaaagaaaaacaaaacaaagctaactaactaaagcaattaagcttttaatagtccataatttcattccagaaaattaaataatcaattattttattcagtacacaagacctcttttagcaacggcgtagcttctgcttctcgggtacatcaattcgggcttagcaccatctccctcttccccaaactgatcaacagctttttcttcgtcgattttacccatgccgacgctgctacacttgggcaaacccctagctcccccagtagtactagaagaaagtgtagtttttgctgcctcttctctcaactgttgtcgtagaatcgtatccacgtcaattctgccgccataactcctggcggaagctgctctaacgagctcggcgtagtcgtcgtctttggtgtctgttgacctcgacgatctgacgctgaaactcttaggcaggccgtcgaactggcctgctgggccacccatggtgctggcatagctcaatttctcagctgaattcatgctccgtacgtataagtctcttgctttccccaaagctctaaagggtgttgtgataattttcatgaatttgcttttgttatgtgttttcgtcttcatctttaaattttattcccttccaagtgttcgattgaaatactgaaacggagttagagaatgaaagagatatactagtggtgaaaaagagtagaacgatatatattccgattacccccaatgaataaaattagaactgggtattaattaattattcatttgtggacataaataaattaattaatgaagagaattaattaatttctaattgggttttgtgataaaatcgagaggagttgtggaggttttttggttggtggcgaattaatatggttttgtagagtgttcgttcaagaaattaataagcatttgactgtactctggtacgtgtagaaggtaagaacgatcgagagagacgtagctttcggactttttcgaagcacaccggtttggaaaaataccagagataagaaggaataggttgctggactagtttgcacaaaatatagtaaatagtattaatttaataaagttggccaaaattgaaggcggataatgttgactttcaagagtagtttttcaagatttgactttctatactcctctcctactcatcatttatatttttatatcagatatgatattaagttgttgttgccacatcaccacatttaaccactaaccagtcatctcttgggtttgttggtttggtttgccacaattcaaatatcaaaccaaacctttacctaagctagctacacctttctatatacagtactttccaatctgaaacctgttcttgttggaatgaaagaaaacaatcatcatctttaatacataaactcatcaacaatattgtcatcattgcctttgtgaaaaggttgagttacctaactcagtgtcacttgtttgttttacaaaattggcagaagggactccacatggtccataatataacaatttagtggagcccgtcttggcatttatatctatccacgtatgtgatcataggatgaaatttatggctaaagattgccctatacctttcttcttacattcttttaagtgcctctaatcatataaaaaagactcatgcatatttgtgttattattaatttgagaatttgagcgtgtgtgttcagcagaattataatatttttcatgatcgtcaattggattataaattttatagctctagatcacattcattgagtaacttgaattgaaagtaacattcaaaatccactagtattaaactctttataattacctcatcacttctatcattgcctatgtatattttttatgaaaataaaataaataaattatcaatattttgacaaatggcggtcccttgagtgtcggtgtttataataataatgcttatgagaggaaaaaaatgctccaatcatcgcagaactatgaaaacgtgtttggactattgaagagaaacctactgcatgagtaactttttaaagaagaagaagaaaaaagaacaaggttgcggagatgtatatatattgagaaattatattgaatgtgtcggcttctttccctaatgaacaatgattttgggtgtaagttgtatttgaaaacatgtaatatactaaattaacaaaaaaatgttcctttttcaaatacttaattcatataaagattatttaaggtgaagtaagtttttcatggagagtataataatgtctacatctacaagaccgccttcgaagaaatgataataatatgaatataaaaattgatcgagtgtgttcatcaagactttattaattagtttattatatttatacttgtaataggaaatagattttgataatttcttaaaattatagattaaaaaattaatttattaattaagaatgaaatttcaaacttaatactttttaatttcttcttataatataaatttatataatatatttatataaagtgtctcttttatatgtcattattaacacaaatattaatcataatataataaaaataaaaatacatcttttataataattaaaaattattaataatataaattctttttaaataagcagacaataataatgatataaaattttatttattatcattcttttattttttttattcatagcaaaacttaattttttaatagtaaaatatacatctcttttttttttttaagaaaaataattaaaaagttatatatatttaatgtaatatcctaatcttctaaggatgtcacgtatgtagttttataaattagtttataataataaagtaacagtttaagtaaaaatgtaatttaataaaaattttactaaaactgaaatataaaagtcatggcataatcacttttacaatt

SEQ ID NO: 187159 - DNA, 2905 bp, Cannabis indica
caagctacccaactttgtgtgatgtgaaatcacttaaaaataataataaacagctttcaacgaaactggtgaagtgaaaaaataaaatcttatgagcactctcaaatagtaaagcccaaaactccactttctttaaattttaatatattttattattttcaaattataatattaatatatttatggagtgttaaaaggtatatatattgacgcaacttttacctgtttcgacatttaattttttttttttatctatttattttatggagtgttaagatattttactaatttttgagaaattcaaacagtctatttcacacgcgtatagaataaaatagtcacgggtgcaatacattgtttgaattatatttttggtctgttatttttttttttgaatctcttaaaatttggaggatgtcttaaataactataatgtacattgactatgagaaaaaaattaacatgtgaagttttcccaggaagcgtgcaagtgaggataaagtacgctggaaacactcgtgttggtttgtagggtcagtcttcaatccatgaagcagtcagagtgacgaactcatgtataagagacataattccgtgggtgtaaaggtccagtagaagcttgaagcaggaacgttacaaaatgcgcgggagctaataattacaaaaaaatgaagaaatatgatattgaattgtatcaatagtgtttctctttcaaaaaatacttagtctaaattattatttaacagactataaaaaaactcgctagtttttgtacaacataaagacaaaaatggtatttaccccaccatttttcttcatataaggaaattatatttctacccaataaaataataagtacaccctaatatttaaataaaataagcttaacataatttttaaaaattgctcttaatatttttaatttttttctcatattatattgtgttaatttcaatagttattttatttattttcataattttttttttctaataaaatttcatataatttttttctttataatatttaatatgtatttttttttaagaatataaattggaaaaaaaaaataaaattaaacacactaatataattaaagatatatgtattgaactgaaaatatcattcaactataccaactcgaccttaataatgacaacaatatcagaagggagattagactccgaaaaacacacaatcaacatgtaaccaagacactctagccacaaggtgagcgtttacaatcttcaacgacaccaccaaaagtggattgcaatacattaaaatttcgaacgacttgcaccaacaccaaacagtcagattcgataacactaacacccgagaaatcacacttcaaccatgagaacacttctttgagagccacaacttcattaataaaataaaagttattaaaaggggtgcaaataaaactctggatacttctacaatgcacccttaaaatgggtcaatcgatgcaccccttatttattttgatatatgagagaatttttaatttaattttttttcatggtcgtctacgttgtagttatttaagacatactgtaaaaaattaagagattcagaaaaatttaataccctgaaaataagtttaaatagtctattgtacacaagactcttttattttatatacgtgtgaaataagttttttgaaccttattttcagcgtgttatttttttttcgaatttcttaaaattttataaaatatactaaataactacaacataaataaccatataaaaattagattaaatttttttcacagatgccgaaacaaataggggtgtatctaaaacctccttcatctattctctcaaaacttttctttattccaattttgccctcaaacatagggcgagagacagacctcttcctcttcttccactcacgcagcctttgcttccttctctctactctcttttctcgccgtctctacctccggcgacggcaaacggcaacggaagtgactcctctaacaacaggtttctctacgctctcttctttcattctattcaaactgtttctctttcattattattgaatgaattgattagagacttaaaagagtgaagattttgagaaaaatatcttagaagtttcagtggatgatttgattaagcttaaactagggttagaaggatgtatttgaaaggtttgatctttggtaaagtagccatgaataaggtttcaagaatcaatggaaggagatttctttgtagtttcgccatttctgcacctttgaattattcatcggttgctcactcttcaaggcctttaagaaactttaataaagagtttgagagttggaattggagaggcattcactcttctccgtcgactgagctgatgagctatcaatcagctaatgatttgatacttgcttctgaagatcaggctgaggaagaggaagatggcgtaattaacgagttcttgtctcgattcgtttggataatgcggggtaagctcactgattcttaccctgattttaataaggagactatagatggtatgcttttggttattgttgagaaggttgttttggagatcgaaaagggtggtgttgagcagatgcttggttcttcagcggaatctactactgcttcgcaggagtttagtgaagatttgtggataacagtttgggaggtgagtaatatggttatggatgatatgaaaaaggcggttaagaaggagaaaatgaagggttttttgcaatgtgaagaggttaaggagttgtgtaggtttgctggtgagattggtattagaggggatatgttgagggagcttaggtttaagtgggctcgcgagaaaatggaagagagtgagttttatcaaggtttggagcgtcttagagacgaagctaaagctcaagatgaacaaggtgaagaa

SEQ ID NO: 187160 - DNA, 2540 bp, Cannabis indica
aaagtaggattagatttacacgcataaaatacaatacaaactacttgcataaaggttaaaagggtaatgaaaagcaagttgttttatttttcttacttactaaatgaatgttgtcacaggaaaggcggctttcattattactattataataagtaatgtgcttaggtgatcttgctccctcaacatgcatacgggtttgattgcaccctttgtttatttttgtaacaattatgtaatcaaaaaagaagaatttatagaaaaaaaactaaagcacataaattccaatgaaggtctgtataatttctgcaagatgattataattgacattattcttctgtaatgtatgactaatttaaactaattaatgattgatgaagattgaattaagaagactaaggaaagaagaagaagaaatttaattaagaatgtacacaaagggcaaaaggttattaggagctcattttgtgcacatacgtacatagaaacataactagttataatatataataaaataaaagagaatcggagaatgggagggactagtgtgggtcatttcaccctggaagtgcatggtgagtttacataaaccccagtaagaggatgaaacttgagccgacaattcaagtgacaccagaatttgacggagcccaaaagaccaaccttccatctggccctggaactgcctttcaaatcgaatgtaatcttgtcctgtttgagggccaagccacttgcagcatctcctccgggtttagcggaatggaagatgactccaccctgtaaggaaactccaccgacccatttttcgccacgtcaaaggggtcggccaccagccgggctatggcgatgccctcaaagctaagaacgaagctggtgtcggagaagctggcgtgtgccttggcattgtcgttctcggccttcacgtagatggtaagctgcgtctcgaacagcccagccagtcgttttgaagcttgtcgaggtgggctgtgacgacgctgatgacgggcacgctggggtggattaccaggtagcccacgaacacaacgagcccaacgatgatgactgctatggctactacggtgcagagtatggcaatgcaccagacaagaggatgggtgcgtctctccggaccctgtatgagttttcttggcattggaggctatttgttgtaatagacaacatccgccgcaggatcactcttttcttctacaattttaatgttaaaagaaaagaaaagaaaaaaaaattaaaaaaaggactttgagagatagactgaggaaaagaaaaactagagaggggaggaagaggtgcggtgggggcggatgcagctggtatatttgggctttaagcatcgaattattaagttggcttctttggctctcattggtggtggaagtttggtatcttcgtttcctaatcataaagcatatgtctatgtcttcactctctctctctctctcgatgcttatttccctgactacttatgttaataaataattgtacatgtctttccttgtacaaaatcttaacataccctgtaaccctcctcattaaggaatctctttcgccattacttttgtccattacccattttatacacttatatataggaaaaagctaaatataccaatcttgatcactaaacgcacactaaattgctttttctctctcctttacccctgtttctgtgtcaaaaacttgagaagtgcgtaaaccaagtctcaattaattattgaatttcattttcttcaatcggtagatcaccactactcttatgtgattgtgctaactctatttttgtttgtacaaggcaaacataaaacaaagctatttcataggaaacataaaatgtagagttaaattcacgaaagaatatcgaaacaagatgtcaaagaagatacacatatgtataaaatattattgtaaatgttaaatagttgtaacttggaaccttaaggggaaaaaactaaactaaatcagagacgtctattctagtaagggtaaaatgattgggtggttaaaaatatctctctccatatatatgttaaaaataataaatgagaaagaaaattaaaaaattgaattgatattttgatgacattcatatcatatcatcacactagtcgcataaagatacgtacatgtgggtggctgagctgaagttagaaagtgcagctcccatttcccagttgggttctttgtatatgagagtgagacatctgagtttaaaagggaaaaattactgtaaaattcatatgttttcagaaccgccggacaccaataatgatgatgagcctcagcctgagtcgactcccaaatccacggcctttattattgccatcatccatggctagggtttctcactcccattctctcagaaattccaatttctgctccagacctttgtgccggccccgggtcctacttcctcctgcatccgcccgcactacctctccagctctttatacccaaccggattctaaagcccaggtctttgaggaaaacatagagaaggttagcattgtaaaaatgaaaaaaaaaaa

SEQ ID NO: 187161 - DNA, 1461 bp, Cannabis indica
gatctgtcataccagactaggtctagctcgtgaacacaacaatcctcttctactgtctaattatgcacaatttctctatctcgtttaccatgacaataacaggtgagcttccttatcttctttttgcttttatgttgctttcaatttaaatctttatattaagtgtttaaatcttctggtataaacagtatatctaaaacattaccttagtgtttaaatcctcttttgcaatgaatgattaattcaatcattgccatatttttcattttccaacttcactaactacggttggttgtgatgtttctgaagagctgaggagtgcttccggcgtgctgtggaggcggagccacccgatgcagaggctttgagccggtatgcagacttcttgtggattgtaaagaaagacctttggggagctgaagaacggtatcaacaggctatggcaatggaatcaaataactcttaccatgcctctaaatacgccaatttcctatggagcactggtggtgatgagacttgctttcctctggattcttcccatgaaaactgccataaagttttgtaatttagttttgtagctctgcttctactcttctttgttttacgtataatctctcaaaggtggtcacttggggaaagaaattttcctggtcataatttgatccagctgtgtattcccaagtgtggttaaggaaattaaattagtacaatacgagatgtaaaaaaaaaacactatgagaatttatgatcggcttaacaataattttatgtaggcaaacgaataacggctagtaatattgccgctgcttctcttgtggttgtaataagttaatattgctttgagtcaaattaatagatcacacttcttaactttcacttgttgagattgcttgcttatttaatcttcaaaaatttacatatgaatgtgtttgtataagtgaagtaatattgattaacactaacttgtgctaatcgacgaagaagttgtttgtttttttttttttggtggggatttgaaacgatattagatatttgaattgtaaagttcaacactggagatggggtctgctcccactaatcagaaaaagaaagtggtcatgctaaaatttaatgtgtaaacaagagcctagactctagaataatgagttaggcaagaaagttggattaactaacaagaaaatattgaagggtgttagttcagtcaaatatggaacctttcaacaaacagatttgctaaatgggattagagagtaggaagataagctttgaaacaggggtgtttatcagataaaaaactcttaagaataaggtcaatcaccaataaaaaaaattagttttaataaaacaaaacagaaacgtaaaaggtaaaagctcgtgtcttttttcctgaagagtagatattgaataatctcctttttaataactgattgaataatctcttaaagtctacggggcattaat

SEQ ID NO: 187162 - DNA, 1280 bp, Cannabis indica
gaaagaaagaaagaaaacagattaattgacttcaaagacaaggtaaaatcatttaaaaggaaacccaaaaaggacctggccaggaccccctctctctatctacctgtctctccctctagctaccttgctacatggatatttttttcttttcttaattatccaaacaatactgagtttactttggcataatgggaaaatgttgaagcttttgtgtgatcttgtctttcgtttggaaacttgctagattcctgttgtcgtttttcgtttgtagacgaatatattaaaattgtttgtttatataattgagagttgagttgaggaggacttggactgcaggcagctatgggggctagctcgttgcatctctttttggctttcttttgtgtactaattcacttgatttcttcgtttactgatcccaacgatggtaagggcttaagaattaatctttgcagttgatttttcttgtcttttgatggaatgttgggtgtggattaagtgaaaaatctgttaacgtaagttggaatgcatcttatgtgtttttggtggatttggagttggaacatagtttttagcttaatttctttactcataacttttgttttgatcttttaaaagaaagtgtttcaatttccttggttgcatgtaagattgaatatttgaaaaagaaataatatatgatggaaatattaagaagagtgataagcacatgaagcaatgcatatatttctgttttcttaagctctgttctttgatatgaaaaaaaatgttaatttccattttagcttttaaaaaagtccatctatttgttattaataatagtttggtgttatgaagttgttgttctatttttgttaaatttgagagtggatacattctgtggaatatgtatatacgtttgacaaaatcaataagggtccttttgtacagacatttgttagacagtttagatagacatttttgctaattcaaattgtgccattccagtcgcagttctccattcattgaaggaagcttgggaacatttacctccaagctggggagaatctgaagatccttgtggagtaccatgggaaggagtgagctgtaaagagtcaagggtgacttcattgtgagtgttatttctagttcccttaggttatgaattttggtggggaaaggaaaaagtttagaaaatgttggcaaaaaaaagtgttgaaaataataaaaaaaaatcaacttttcttgtttggtatgaaaattttgttgaatcaattattcttttcatacaatttttcatt

SEQ ID NO: 187163 - DNA, 2815 bp, Cannabis indica
gttagttgagttagttgaatgtagttagttgcttagttttacaactcggggataagactatatatccctattcttgtaactagaatgttaatgtctccaattgtaaattcagattagattctattcaataaataagtataattcatttcaattgtgttctttaaagtgtgttcaattggcattggagtttctttgagctttgaggattgttcttagatgttctttgaactctcctggtgtgtgagatcgtagctgcaatctccaacaagtggtatcagagctggaattgatcgaagctggatcttggagcttcaaaggagaatcttgatcgtataagaagaaaggtcttgatcagagaagacaactccaagactaggtgatcaattgagtaagaagatgggaaatgacaagttcgatctagagaaatttacagggaagaacgatgtcggattatggtgagtcaagatgagaatcctcctagttcaacatggtttgcaagatgctcttttaggagatgagaacatgcctgaaggtttaagagaagacatagcttcttaacaaggcacatagtgccataacttaaagccaaggtgacaaggttcttagagaagtatcaaaagaggaatctgcagctggggtttggaagaaattggagagcttgtatatgacaaagtcgctgacaaataagttatttctcaaacagaaactgtactcttttaaaataaatccaggaaaaaaaattgaagatcatttagatgatttcaataaggtgatcttagatctagaaaacattgaaatcaaggtggaggatgaagaccaagccattattgtggtgaattctcttccaatagagagctatgagcactttgttgataccatgatgtatagtagtagagagtctctaacattaaaggaagttcaaagtgcattaatgtcaaaagagataaagagaaaggcagacaagcaagaagatagtgttggtgaaaggctctttgttcgagaaaagggttcaaaaaaggagagaagatgtttctttgtaacaaatcaagccatttgagaagagattgcccaatcttgaaagactacgtctccaagaaaggtggaaatgcagatgtggtgtttgatggagatgatagtgctagtgtgttggtaatttcaaaagctagatcagaaactggttggatcatcaaagtgggtgctctttccaaatctgccctgacaaaaagcaactctccaactatagaactattaatagtggcactatcaaattaggggacaattattcttgtccaattgtgggaatcagatcagttaagttacagatggctggaggtggagttacaatgctagaacatgtgagacatgttctagaaataaagaaaatcttgatctcaatggcaatgttggatcgggatggatacttagtgaaagttgagaatgactcattgaaagtgacaaaaggatcaatggttgtaatgaaagcaattgtgatgaatgccatctataggttgcaaggcagtactttcaaaaatcaagtgaatatagttggtcttagaagtgaggaataaacattggtttggcacaagagattgggccatattagttatggtggtctgaaaattatgagcaaaattggtgtatttggcaaggatcaaatacaacaaatgggataatgtgagcagtgcatacttggaaaagctacaaaagtgaagtatggcactgggaagcacactaccaaggacattgtggattatctacactcagatttgtgagggccatctagaaccaacttaagaggtgaagcaaggtatttttagattttcattgatgatttttcaagatatgcttggatttttattttgaaaaataaaaatgaatcatggagcaagttcaaggaactgagagtcgtgttggaaagtcaaactggtaaaaaggtgataatgggctcgagttttgtgtagatgaattcaagtaatattgaaaacaagtcgggattggcaagcatctaatagtgcccaaaaactctcaggaaaatggacttgctgagaaaatgaacagaacaattctagaaagggttaggtgcatactaatctatgttggactaccaaagattttttgggcagaagtagttgttacaacatgctacttgatcatcatatatccttcatctacaattgaattcaaaacaatagtggaggtatggaatgggaagcctataaggtatgatcatctaaggatctttggctgcttagtatatgctcatattaaagaaggtaaactagatcctagagcaaggaagtgtatcttcctgggatatccaaagggagtggagggttacaaggtatggagcatagaggaaggcaatcaccaaaagaactttgtgagtagagatgtagtttttgatgagaagataatgtacaaagacctttcgttggcacaaaaaagcttgacataccagagaaagactcaagtgatacagtacagtttgaggtggagtttaacaacagggaacttggtgtagataaagcaattgaataagaaaaagagtaataagtggaagaaaggttggaacctgaagaaaaacaggtgcagaagatgccactcaagattactaattgtttagagataggaagagaagagcaatcaagccaccagagaggtttggttttgcagatgttatcaactatgctctgagtattgatgcaatgggaaatgaggaacttgcaacttatgaggaagccatgcaatcagatgataagcttgagtgggacaatgcaatggatgatgagatgacttcactgttgggttttatgcc

SEQ ID NO: 187164 - DNA, 2521 bp, Cannabis indica
cggatacaaaaagcaggctccaatgacaacatagcatagcaaaagaacaaggcccttcaagtagtgagaagttccatcctataatataaaaagtaatattaatatatattattagtaacactaatattatatatacatgactgagaaaaaaagagaaatataattaattaattaattacttgtagagtaaaagctgtgacaattatagctatggcaagagaactggtttcaaggagattaaagttgagatccatcttaattcccataatccaagaaacaacaacacacaatgggacctgaaagagaaagagagtaattcatacatatatatatttatataagaaaatgaaaataatttatttaattaataaactacaaatatagtactataataattatgagatatatgttcataccacaaatagggcaatttgagtagctgatcctaatgcaacacccaatgtaatatcctgcatttttttaatataataataataataattagtattaatatagataaacattgatattatgataattaagtaaagtatatatactgaccaacttgtttttgaaagcaaagataacagcaccagcatgttcagctgcgtttccaacaattggtagcaaaattatgcttagaaagcttactgacagaccccaagtgtccgatgcatcctataattaatattaattaattaataattagtaaatgtgatgccataaatagaatattagtgatgaaaacgacgtagttttattattaattaattaattaattacctcaattgtttgtactacatactcggacaacaaagcaatgactagagtcattccagctagccaaacaaatccacttgcaaatccaatcactgcctcttcttccgatgaattctcaccctccctttcatcctgatcatcataactttcattaactattcgggaaatttgacaatctcaatagtttaattaggagaatttttaacggcgaaaaagtaaaaaatacataatttgttatttgagggagaaaaattataccctcacgctgtacttgtcacgtcaaataatctaatttaattattcatcatcatcatcatcatcacaaaaatgagatgtacagaaaagtaagtcctaataattttcttcatttttactgttgtggaccacaaaatgtactagctagctagcagttaagctataaattgactatatatttatattttgttaaaaattcatagtcataaaaattagtactggcggaaccaaatgggtacaaagttgaaaaataagagcttttaattaattttggctgtgatgaaagtgaaatttttagttttattatgtaaatacatatagatatatattattatatatatatacctcttcagcttcgaacaactggcgatgagtccagagctgaaagacaaggtaagccacataagccatgagcatgacaatgctgctggctcgcgaaagctgcagcgtcgactcaagtgtgactgcagccgatgaagtcgaggcgtagctgaacaacatcggcagcaagtggcacaacaacgccaacaggagtagtaccgagttcacatccgcctgtctctgttatacaataaaatttcaacatttttagtgaaaagggtttcacttaaaaatcaattggtgatgattggagtagtccatgttcttatatatgactcaatactctattatttattccatgtggtacaaagtctagaccaatacttttttaaaatgatgaaatatagataatagagagaaatgggtatttagggttattacttactctgtcatatttttgttgagtaccaaggttggcaattccaccacataaaagagaggtaccaagaacaaggagtaggtttgagagtatggagcctaagagagagtatttgaccacctcaattttgccttgggctaatgcaaatattgctattatcatctcagttgcattgccacatgttgcatttagaagccctcccactgcaaaattattacattcacaattataattattaatatattcaataaaacagtagcacatatataccttattgattcaaacaaaaccatcaatgtacgtgtttttgtcttaaaatcaattaattaattatggtcccccatggccaaggatatatatacatatatagatataagagatttgttttgttttgtttattaaaaacaaagaaaaaataataatgaatattaatatggtcaaaagtgttgtgtcagtgtttataaccacataggtaaatactttatattttttcatttttccatttttaacatcattgttgtgctaaattcaagaaattattgcttttccaacctagctagctaagcacatatatatacgttactgatgaaaaaacgtcttaataattacatgaaactcttaagaatacacttgacatgtggttgtgggtcttagtataattatttcggttttacaatttgaaatagaataaaatttaatcccaaatttatctcaaaaaaaaaaaaa

SEQ ID NO: 187165 - DNA, 3807 bp, Cannabis indica
attattatttttggaaaaaaaaaccctccatacggaaactatttccaaacatcggcgagacagataggaattttgtttctttcatttgcgagtctttgcttctcttccacttcagctagaaaccgctgtctctcctctttaatgtaaagagagaacgacaaccaacccaatgtcgtcgcaagagcaagccctattgtccttactctcccacctcgccttctccggcgacggtgccgttttgggcctagccttagcctacgccgccgtccgttctatcctcaaatacagaactacctcctctgctctcaaaaagctccgcaaagcaccttcggtcaaagtatccgaccttcgctccgtcatggccatcgacaattccgatacttccaacgaatcgcaatcatctgatggaaaaatcttgatcgtccgcggtactgtagaggcaaaatcggtcatagacggaagctggaagagtctgagaccaagcgtcttggtttcacaagaatctggagaaaaagccgttatcattcagagaactcaaactgtaagtggctgaatttgtcttgaattacactttcgctgaacttattttcctttttcatatctatgtaatttctttgctgagaatggaactagcacatatattaggatttttcttttataccttaaggaagtagaacaggataagagtaggagtgccaagttaactttgactattcttcaatgcttattgacaagtcaactaggacatttactgattcttgttgaatagagaagtatttgaatagtttctgaaacgtagcaagaatgacgagcagttttcctgagtttcataatatcataaaagaggaataacattctatttgaactggtggttttaatcgtgtactgcaaaatgggttgccctgaatatgtttgtcaaattgacaaagtgaaattagcaatattatttttccgtttttacactaagccacccgcccattttgttgcgctgtgaaagtaacgcttatgcaaactgttcagctttaatgctagaatttactggatttaaatgcatatcaatcacatatacaaaattagaaggacaaagttatcccataattgctgttatgtactattttctagcactttttttgttttaattattccaaaacaaggcttaacaagtttattttgagtttacaaaggaggaaatgatcattatcccccactctctcgatgttctttggcattatgattcgatcaatgagctaaagattttcaactctatgttgtatactaaaattatgttttttatgctgtgcagtgcatatacaatgaatggaaaggtttctttggatggacttcagatttgcgttccatatttgcgagatcctggagggaacaagaatccaccttattacgaacggtttgtcaatatgttttacttctagattttatctaggttgttacccaagccggggaagttttatagttgttgatatatttaatctagtttgttcattgaatttagcagcataaaatcttgtttatgaactgttaggagttttatctgtttttaattttatccctgcaggttcctttcgttcttgttgaaggtggaaaatggccagcttcagacttcatagtagtgaacattgataaattaaagcatcccttacctctcacaacagtttatcatcaattgcagcctgttaatgcatctccttacacattcctacaggcactttttggtcatgaattccctgtgagtttgttgctaaacataaattttgcttgtaaattctcaagtctccccttatatttttattttttgttttgaaatttcttgatatatcttgttaatttctcattagagttatttgtatatttattgaaggtcgggctacttgatgaagagaaaattcttccattgggaaaagatatcactgctgttggagtgtgcagtattaaagatggaactccagaaatcaattcgtgcaaggatcttccctattttctgtaagaggatttgcttcagtttgaagatcctttgtaacattcactaactcacttattctcttcatttctagcaaactgctactccttgctgtaaaaggattggaatttgatttttctaatcggcctcaatatacgatttgtttcgacttgagatgcatcctgtatttagtggaataagtgttgttgtttcttttccaggactgaaatgaccaaggatgagatggttgtggatcttgctttccgttccaaaattctgttgttgagtggtgctgtccttggttctctatcagttggaattcttggctatgctgttgtgaggtaataccttccacttgataagcattgcctcttcttactctttttaaacttggtagatttcacaatttctttatttgtttcacttacacacctttttctaatttttcttcaattacaaactaacacgaggtttacctttcccttctgattaactccttccccttttttacttcctaatttgtaagttatttgctagcttggtctgttaaaaaggtttgaaatgaaatatcaagggtcttgatgatctcggtaactatatttgagctagaatatgtaatcctacatgttggccatcactaacaggaactggaataaattgaaagagtggagacagcgaaggcggcatcagcaatcaaaccctcctgccaatgatgaaaatgaatttcacatctcagaagaggacgatacaacagatgttccagatggacagttgtgtgtcatctgcctgactaggagaaggcgatcagcatttgttccttgtgggcatctagtatgttgccaaagttgtgccatatcagttgaacatgcagccacaccaaaatgtcccctttgtcgtcaggaaatccgctcttcagtgcgtatctatgattcttagaaagaaatcgacatggcaatggatgcctcagcaggctgtaaataagaagagtgagctgccatgtcatttgcccttcagcttttgtgaatggtacctatttagtcaatagaaatacttgaagccaattgttgccattgatttcagtaatttttgtaaaaaatagaaactacatgtcattgctcatactgtatagcatcctttctcacatttcaaacaaaactttgccaactattatacttatgacatcttaagtcaggtaaggccatctccaaccatataccccaaatttggtgatgtactactactaacactaaatatagtgttacaatctctttcatttctaccacaaacaaaaaaaattactctattattatattattttttaaataatattatttttattattatattaatttactaaagcaacttttattgtttcagtatctataataattttttaatctattttttttatggtggtatatgttgtagttatttaagacattttatgaaattttaattattttagaagaatttacaatatagaaattagtatttaagtggtaaaattcggttggttacaatatagtaacattttagttccttttaatcattgagtaaactattgtgaagcttaaacaatataaaaaaaattaacagtaatttatgatatatggttgatatgttgaatattattaagtttaaaattttattatttttaattaaaaaaaaaaaaaacaaaaaacaaaaaagttaacttttaatattagttgtcttttttctttagacagaaaatatatgtttttttattattaaataattatttattatttatgtgtgtaaattctgaaataatttttaattagaaagtaaccaattgatatcttattcatatc

SEQ ID NO: 187166 - DNA, 1882 bp, Cannabis indica
tccctccaacctgatcaccataatcaataagagcattgaaatctcttagaataatccaaggtttaaccgggaacctaagattaactaggttcttccaaagctccttacgatcctccaaaccattcatcccatacacaaatgtagcacagaaagcttgagtatgactagctaactttacatagcaatgaacaaattgatttgattcttcaatcactatcaccctagcaaaagtctttttccaaaagagcagaagccaaccttcaattcttcggcttgtataactatcccaaccaataaacttattagacatcatttccttcaccttctctcctttcaacttagtttccaccaaagctccaacaccaatctcctttattctacaaaccttcaacactgcctcttgtgttttctctttattaaggcccctaacattccaacacattatattgcaacaattcatgatgacactaagctaacaagttctccatgtgtcccactccccttattttgtaatatatcaaaagagttccttcctttgtcatttctccttggatccgaaaccatcttcttaggcttaatcaaatgagtctttttaggtgtctcccaattcccttcaactccttccttcctaatttttacagcttcattaggcctattttcaccctgaactgaatgacatatggcctccccaacttcactatctccttttatccccacaacatcatcttccttctcaatccgctttccttcatctttcttatccaagtcaccaccttcctgaacatcatccaccttcttcttagcttctaactctacttccttacccttattcttctccactcctcctcctttctcctcttttttaacccattgtttagtctcaccctttctacaatctgccatgatatgcccgaatcccccacaactcgtgcatttaattggtaaccattcataatctacccctgctcaacaagccttcctttttcattaataaaatgaataactctcggaggattatccgtaatatcaacttccaccaaaactctagcaaatttgaccatagatctctccttagtgaccttatctaccatgatagggtttccaatagtactaactaaagcactcaaacacatctttccccaatattgcacccaagttatgtagccaaatccataaaggtactgatttaaccaatttaacagaatctaaatcagtagtccaaggtctagtaattactggtttccgatcgaattgaatgactccatgctctagcacatgatctctagtagcttcatcattgaatttgacaatggtgtatccaccattcatacgcacgatttgagctattcccagtttcccccacattcttttcaggaatccttcaaaaactgcaaacggtggtttttttgcccccaacaccatacaaatgactgtagcattccaacaagcagcctgaacttctacctcctctgcatcaatttgagcgattcgaacaccttccttgatcagaggttcttcaaatttcaatctcgattcctgatcttggatcttgctcactggaaacttcctccaaatactctaagattgagcttgaaggtcctcattatccacaatatctgcccacgtttgttctccgaccagtttgtccccttcgcctaaaccatagccatctttctccagaattaggtcatcaatcccctccttcaatccttcgtcaatcgctgcctcctagattataactgcctcctctccagtttcttgaacattccgaccattcccctcacccttagcatttgattccacactagcctctcgtaaaataggctttcggaccaccctgcgcttcttcgccatggacaaagctcagagagaaactcgcacg

SEQ ID NO: 187167 - DNA, 5233 bp, Cannabis indica
tggaacaaaaataaaggaagccatagctgattttgagtttgagatttttcaagatatggataatgatactctaaattttgaaaaattcaggtttaatttataattcaacaaaacagaaagtcaatcaataacatttgtagaacatagagtctaaaatgatatttatccatttctaattcatattttagtggggtttaataggtatgtattgtagggttggtttttgaccagtattgaactagaattttactagggtaacttgttaaggcaaaatcatagataaaaatagaacaggaatgataattgatcctttctttagagaatgttatggtgtggtggccaagaagaactccctattatttttaagtttatagctctttgatacatacacatctgccatttaatgacattttttttaagaacaaatatcacagtataaattaaaggagagacaaatcagccattacagcttcaaatgccataggaggaacactcccttcccattctgcagaatccttatgcaacaaggcatatttttttttaattggtagacattttgaaattagtaggtgaataatgattattatgtttgatatataatgtattttatattattttgtttggcatattactataattataattaattaatgaatctcaaaaaaaaaaagtataagtaaagatttttatactgaactcgttattgccagtggcactgcattgcaagttgttgtatagttttacttctaaaaaaagtaggaataataataatttgaatttgaaaaatcaagtactatctagtatagaaaatcgttaatccatttaatggccccttcccataaacttagccaggcaatgaagtgtacatggtaaaagaaaaaacaaaaaattacaacaagaagaataacaggctgtcgtaggaccattaacgggaaaaaaaaacatataacatcccaacaacagccatttgagtacaaccttttcttccaccagggaccaaagaacaaactgaggaagaacactagttcaaaagttacatattctaacatgaaatcgaagttgaataaggagtaaccaaaacagcatttccagctattggctgaggtctggctgctttctctagccgctcccatgcttctttccgcttctcagatgccaagcttagttttgcttcttcctccttaaattgagaatagcaggatgcaaacagctcgtcgtccatctcgattaacatctttctcaggtttagagttaaatggagcactcctgggttccaatggttctgggcattcctttcaaggactggtaaaataatgggcaatatttcttgacggttatgcgcaactaagttgacaatatgatcgttgttccaaaagaaaagagccctttcagccacctaacagaaaaaattgacaagttgagccatttcttctaagaaattataaccttaagaaaagcccaacaaaacagttatcaaagagactatttaatcagctcatgattatacaatatctgtagttttcaaattggatgaagcaatgtaaaaatgctaacacttttccatcttaaatgaaggcaatatgcactagttcccagtatgaaaggctgcaatgtgttaagaatattaacaatgaagaagacaaaccaaaaggatactgacacagtaaaaaactgtgcagccaagaaaacagttttccttcagatagatccatctttttcttttaaatgagaaaacaacacaagagtatccacctaacgagaaatttaggtttgtggatagtgatgaaaggcaaaattgtggggaaaagtacctggaagtggaaactgttaatgcagcatccaatccgccagaacaaagggaccatgatcttttgaaattccatcatactaacagcttccaaaatctcttccaacaaacccaagaacattacctctttctgactatttgtgaccggccaacaattcaacagaccctgtataacgatggtcgccaactttggctccttctctataaattgtgtaacacagtaggagagttgttggaagtaaacccccaaagactttggcctatgcagaggaatcaaaaccctccgcaagaatatcttatgctcctcctttaaaggtaatgcaaatccactaatgatactcccatagatctccaatacctcagcaatcccattatgtttctcagtctcaaacacaaatcggtaaaatacattgtttatagacttccttataaatggcctatgaaccataaatttcccataggtcctatgaagaatagtctttaagcagtctctttctctaggatcctcggaatcaagcaaatctagcaatctcaaaatgaacgaatgatctatgtactttttcgctatcttggcatcaagacacgaagaagtaacaaatttaagcaataactcatacacaagttgcaaatgtggccacgccggatcaaacattggctcgtcgtcatcattttcaccaccggcactcgaattaaatcgacagttagggggaaaatctctaaatagattaacagcacacattctacacattgcaaggattgcaggctcactaaatttcatcgacctagatgctacaaaatccacaagctcaagtaatgtctgtctcttaacatctttctctacagtattcttactagggtcagtgaaatcgaatgtgacacaacaaaggctaaccttgctgacaaagaggttcatcttctccgcattgggcacgtccttgaatggcaataagggctcaattccagccaccatgctcgccggaaacacggccgacgatgtgcgcttcgctgagtttgatcgagcagagctcgaattcccgccattgggtttcgaagcgtcgagcccagaccccgaagagccagccctagagttggactgcgaacgcggtgagcatgatcgaggcgactcctgcttagcagccgagtcagatttcgccgacttcctgggaagtttactcagaaattgcttcaacatgatgacgaagacgacggaaccaggaattcaatcaaacccaaagtagcctagatcaatcccatgagagtaaacagaaaaccctaatctagatcttggccatggatctgggttagtgtacgaaattcgaggaaaaggatcctgatagagatggcgtatctctggaattgcataggatatttatgaaaaccatattggctacgcaggtaagaaccgattttcgacgaatctgaaagaacagatcaaaccccagatcctaactctactttgaatcccctcccattatgctataatacgaaaagctacgaaattttgccccttgatctcaactcaagggtttccaatatcaccgttacccaacaaatacttcgaaaaaaaaaactatatacaacacagatacacagatttgtacatacaccgaagagaaatataataggttgaagatggaacctgaaagatagaaattagattgaagtgtccaaagatatgtagatcaaaggagttcgttctttgagaaagaacctaactctgtgtgaggccactacttcgacgttaaggtaaaaaaaaaatgtctggcgtcttgggcgatctccgtgaaaagaatgtgtgcgtacaaacaagaacgaacctttggggttttttttttaccactttttcttttttgggttgctttcctcggtcgatgagaaaattttggcattttctcggaaaatgcaggcggttctttggactcacccacactagattaattttttaataatttgttttgaaattttggtaattacttaaaaatatatctagtaagaacctaccattaccatattctttttcattaatcaaattaaaatgtcattaattattttttaaaacattcttattaaagttgctttaaataattgttttggtgcactttttatttaagaaatttttaatctattttatgatcgcgtttgttatagttttaatattatgtattttttttttaattttttcaaacttattgccgtgttagttatagcttaattaaatttgatgcgataatttgtaatgtaaaagttgagatttttttttctttctttgtatgaagcacgtttaaagtggtttttttttttttggacaaaattaaagtggcacttgtttgagtgaatgaaatgaatttggcaatttatgtatttgtgtcgtattttggatcaacataattttaatacgacacgattatattttaacatgagcacgatacaattaaataacatgttataaaatgtaaacacaaagacgatacaattataaataggttaactaatgacacaacacaattaacaccatatttaaacatgttatatttagatcatattaatcttaattaatacgtcacattttttatctatttattacttattttacccacataaataaaaaataaacaaatatgtttaaatttattactttaacatgtataatctattagaataatttttatacggtaacaaattgatttgatttataaaatatgattaattaaaatattttaattgtggatagatttaattaccaaatattttagttatacaatttaatttaatgaattaattgttaaaatattctgacaattaatgtagtttagactttgatggaaggtttcacctatataaatatagggtctcgctctccgagctcactactcattttgtaaaaatacagtaaattcatctaaaaagagtagagagagcttggaatctcgattatccacactaatcgatttccttttcttttgcagatttaaggctcgtatgagattgaagctcaaataatcaaaagctagaggtatttcgatcttttagttatattgtatatatgtttgattaattctatatttcatatacatatacacatgcttcatatcattcatataaatttctaacagttagtatcaaagcagttttgtctttgtcttgattattttgagttttggtatttacgggtatatatatgcatgaaatttttttcttcgttatttatgagatttttatgttttcatttctaatcctagatgcattacaacattcatataatatttttattcgattttatgcatgagaaagatttgaaaaaccattgaaatactggaaaaaaaaaaaagaaaaaaaaatacttaagaacatggtcgaacaaaaactttacttgaaattaaagtcaaatgttttacgtgtttttgatgctaaaaaacttcataaatc

SEQ ID NO: 187168 - DNA, 6266 bp, Cannabis indica
aaaattgagaggagagagaaagagaggttgttgcttgggtgggtgaaggtataccataacaaaaaaagaacttattagaaacctctcttcttcttcttcttcttcttcaactagttgttgtggctcagaaagccgtacaatcctatacccaccgccattgttatggcctcaacaactctccgatggaatcctctacttcccccaaaactaaaaacccacttcctcctcccccgcaccactcccaaccacttcaactactcctcaaactcaccttctaacttcctcgtcgtccaagccttccgtcgcaacgatttcgatggcttcgctaaacgcatggcctccggagaagcctggagagacgcctggcgtactgccaatgatggctttgagcgattcctcttcgagactaagaagaccgccgaacgcctcgaccgtcggtacgatgtctctcgccgcctgagctccgtcgctcaatctgcgtattcacgagcccgggaaattgatagagaactcgagattggatcgcgttggcgagctttttcagtggattttagcagaaacttgcctagggtttgtgaatttgtgaattttttttaagagtgattaatttcgtaaagttttaatttttaattcgttgattggtttgcttttgtccgtacagtacaggaagcagttgtctgatttttttggatactccattaggaaggggttgtgctgactgccatgaatgattattgtgctgattttttagtattggggcttattatagcaacatctaatcactgaattgtgtttataagagtaagataatgtaattataatttagtgacacaaagctcaaaaaaattatgctttttttggtcttgggatgattgaaattcagtggagtaattggacttctctatagtcaaaaaaatctatgttctggttgtgtatatatgacaattattgcaaattatagcaacattttgatcactgaattgtgtgtatgataagtttccattaaaaactttacaaccgctgtgaattgtctttataagataagataatcatcaatttggtgattcaaagtacaaaaattttatgcttttggtgttgggatgatagaaatttagtaattggacttctctatagtcaaaattctatgttctggctgttagttatggcatatgaacttgatgattattgcaaattatagcaacatttaatcactatataaattgtgtatgtgataagattttacaatttagtaatgtaatgatcataacttttctgggttttgttttgggattgtagaaatttagtgtcaggagctatatgtaaatgtatgtatataattgaaccatttatagtcaaaaatcaatgctttggtttttagttatgccaaatgaatattgtagagttacaaagtgataaacttttctggttttggaaattttgtgccaagagctgtgtatgacaaatgattattgtgttgaattttttttgtatcgtaaactttacactgccatgaatgattattgtgctgattttttttttaagtattggggattatcatagcaacattttatcataatttagtgatacaaagctcaaaaagtttatgcttttggtcttggcatgattgaaatttagtggagtaattggacttctctaagtcaaaaatacatacacagtgtcaagagctgtgcatgtataatttgaacattttatagtataaaaataaatggtggggttttcagttatggcaaatgaaatatgaattgatggcctttttgatgattttgcagacaattttcttcatttggttcgcattatcaggatggctcttccggtttttgatatttgcaacatgggtattaccatttgctggtcctcttctcattggaacatttgccaatagtcttgttataaaggtaatcatatcaatatgtatccattcttaaactttggatttcttctcttgattctttagtttcattttagtttgaattgttactaagcaaattggcttcataaagtgtagttgtacaaatttggcagtaaaatattgctttacttgttggacagggatcttgcccagcttgtaagagacaatttgctggttacaagaatcaagtgatacgttgcactagctgcggaaacacagtgtggcagcccaaaagtggcggcggcggcggcgggggcagtggtggcggcggtattggggacttcttttcgggaaatagcagaggcaacaacacatcatcaaaatcaggacctgagatcatcgatgtagagtttgaagagaaatgaatatcaacagagtttactttgtagttggaaaaaagtagtagtaactaattcattttccctatatttttgctcacatttttagttcgatggtgtaaattaggtcttatatttttataataaatattttgaagaaaagttaatgttataaattttgtacacaagtaaaaaaataaaaattgatctttggctatgaaattcaaaaatcttttgatcatttaaatattcaagtactttccaaaaaattctaaattaaataaactatttataaatccacaagaaatacctatcaacaaacaaacaaaacattgtctagtccaacttttgcaatgaaatgcaaactcatatattgcatttttcttcaacccaaactataagtaaagagagtttggggatgtggtttgaaactaactatacaagagattagaatggccatgacttcacttttctatataaccctcaatttttaaacctttaagccgctttacaggtgcatcaatcaacaacaagcactcacagcgaaatgccttacggttctctaaattcaaaaataggtggtgtttggtaataaaattccatcactttttacagtgaaactcctatgcaacagccaagggaaagggggctcggggagtgtctgtttgccgtctcattcatttcggattgaattgtacttttcggaaagggttggtgacttggttatttcatttgttaggtttttgaacctaaggctgcagtctccaccactgcagaataacatgaatttacatcatcagaagggttattggcatttgatggcatagtaataaattagcggtgaatgctttttagactaatttcggttcggggcaaaccttattcgattcaaggaagcaatagctctaagggcgctgcgaatcatgtcttcattacggtctacttcttgcttgacagcatcttgttttggcttgaaattaatggttttttgaagagggtccaccaaagagtcgagaactgaaattgcaatgaatagtatacgagtcataaatttgcaggatgctgaatcgaagaattaacatgatcatctaattaccaacctgccagaaccgctgatgggcatttttctgaaagctttgaaagaatcagatggcaaggcattttaacatcatagtgatctgcacagaatgccagaaatttgaatcaattcaagatcgtagtaatacgaagactaataaaaacatatcttttatattaagtactcaccatcaagaccagatctaaggtaaggaacaatgaaagatgatggattcacttgatctagacagctgtccaacaatgtgtccacacattcaaaagcagcctttcttaactcaaggccatcatccacaatgtgcttaaatggaccaagatcaactgtccttatcaattcttgctgcacagagtttttaagaacaataatatcagagtcgaacaatgtctagtagacatgccacaaattacagaactttaatttaccttaacaactgtttgatcatagagaagtggcagcaactcagggagaagccccttgataaggtttggcttattgtgagcaaatgtactcaaagccaaaacagctgcacgcctaacatgctgccaaagaattcatatcaaatcagtcaaatctaaaaccaactatccacagatgaggagaggaggaatgtttaattaaaaatgcaagacttacccgatcatcatctttaataagcatcaagaacgatgagatctcagggtatataatgtcgtctatcttctctgggcgctcaactactgaatatttcaccgcaatgacaactgtagccctagtgaatgcagctggactagttgttcggatcttcagaaatatagatggtgactgaatattagcaaccggtctaataattttatcatgcattaattaaacattaatgtacaaaagtctgttgataccttgagtgcaggaaccagttttgcaggttcaataagagcaattttacccagacactcagctacaacgttacgaacaccctcttcatcactttcacagtgattaaatagtaacttaagaatcttctcaacactagaatcttggaattctgatttatctacagattgcctaactatgacctgcaataatagtaaactagaaattaaatccaagagagttctcagaaaataacaacaggaccttccctagacgtatggtgcaagatatcatacctcctttaaggaatgaagcaatagatactgtttcttctgctgattgtcaatctgatccaaaataaaaggtaagtacttggatagattaccaacagcaatattgccaagagcatacgaagctgcagactttatctcttcaaaaggtgattgaaatgactcgatactatgttttctatatgtggatgagagcttagatctttccttctgccaatctcccccagacacaataaagaaaggtgctgcttcgcctgaaatatgatatcgaaagcaaactcaaatttatttctttgtttataaaagtgaaatgtacagtgaagatatcctaaggatgcttacggagttggaactgctgtcatctttgagaatttctgtaagcatttttactgtagatgaatattttttgtcacctgcagcaaggcaaagaacagccacgcattgggcaattgaatacaaagcttgctttgcaacaccaccagcttggggggatggtttagcacttgaaagaagggattcaagcaaggcatcaaaacttgtgttcgcagaatagaccaaagcagcaaagaagttttgcagagcctgcagtatttaaaaaataagtctttaaacatgcaaaatatctagatcgagatttaacagcaaagtgcacatgcaaagtaccagcagggcatgtccttgaagcaatgagcttttgatcaatgttaatgcttgaggaagaactttatgtctaacagccgtaccaataaccaaacttgatctcttgtcagacattaaggtgcagcagagttccaaagcaagagccgtcatatgcaagtctgaatcactgagaaatcaatgaaatattagagccacgtctggataaacttaaatgagattggataagcaaaaataaaaaatcaaataaaaaaggtagagtaggttgaaaccttatcagagtagagagttccacaatgataacctcatacgcaggggaagcaattttatcgccataagcaactatgagggaattaagggtccctaatgttgcctgccttaaagcccgattagcctatttagcaagagaagtgaagttcagaaatttgaacaaaaaatatgtactatggtcatggtagtaataatatgattatatattgatctattcataagaataagttacaagctctcttacctttcttaagaatgcagtcagttcagttattacttgctccaaaacacacgaaaggtcatttgcaacggagaagcagcaatcacagcaaatgcctggaagtaaacgatgagcaaatgtgtactaacataaagctagtgggaatttggtgtttcccaaaaaaaaaaaataaagaccaaagaacttgtgggtattgcataaacaaataaacatacacccaccttcacagcagttagtctggttatctcattacccatcctatcaacaagcacaggaaggcatgaaggtaattctgctttcaggttatcaccaaatgttgaaacaacgagtcccatgcaagtgatagcacactccttgacctcctggataagcacaaaatgtgagtcgcagtaaatcctctgaaatatttcttaaacaggaatactactgacctgatcttgatcttgattagtcaaacgtgacattatggcatcatagagtgggcgaacataaggtttaaagtcaaaaccattcccctacatcaaaacatcatgtacacaattaaacaacagacgcacaagatcctggagtcttacagagtaccaattaaactcac

SEQ ID NO: 187169 - DNA, 2702 bp, Cannabis indica
attttatgtaatgaccgtgaggtctaaactcagttttaatttataatataaacgcctttcctcaaaaaaaaaaaaaaaaaaatttctctttttttttaaaaaaaaaataattatactcaaccaaacttagattatttttatttaatttggataaataattaaaaataaattttaattatattgcaaatttttctattttatattaaaattcaatttaaggtttattctattctattctatttattaataatgatacaacatttgggtcaaattgtaaataatgagaataataacgtaatcaatgccacgcgtcaagatcactaagaattaagaagcttaaatcgtaacggctgagaaatgtagacgttacaaaatcctaaaggcaattaccccaacggctctttccttctccacctttgtcttttcttattcaaatttaaatatccaatttggaaaagtttattactctcttctctatccaatcttatcaaccacactcacaaattccctctactccattttcaacactcgcaaaaaaaaaaacctctgcgtttcgaaatggccatggctctcagacccatagacaacgagcttccaacaacgatcccagaaaggcctaaaaagcaagctaaagtagcgattccgattcaaaagcagccccagctttctaccaatgacgaaaacaaagctcctgctgattctaccatcgaatatatcgactctgagagtcttcaaccgattgaagaccctcaatccaagatccaagtgagtcagagtcccttttattagtttcttcagattatttttaagtgtttctgagcaaccccatttcaaattttatttatttatttatgaaatttcagagcttaatagaaggattagaatcaaaagactggatccaagtgtgtgagtcactgaataatgctagacgttttgcactctatcactctgatctccttacccctttactgtaagctttctattttaatctcaatttgttaactttttcatgaaattaaatatgatattagtacaaatattatatgggtttttacaatctgtgtgtgatattttcagggacaaagtcatgctggtactggtgaaggcaatgaagaaccccagaagtgccctttgcaagacctctatcatggcttcttctgatatcttcaaggccttcaatcaaaaattacttgatacatcaacctctgatgcatttgatcacttggtctggttctcttaaccttgaataattattaattaataactagttttctgtgattggtttttgataaaggggttggattttatttgatgagttttgcagatacttcagttgctactgaaggcctctcaagacaaaaagtttgtgtgtgaagaggcagacaaggcattaaaatcaatggtggggtccttgactcctttgcctctcctccaaaggcttagagcctctgttaagcataccaaccttagaatcagagctaaggctgctgttgctatttctaattgtgtctctaagatggtatgcttataaagcttaactaatgagtaatgaaatgactcttttagctaattcttaatggtaaatgctaatcgagagagattatcaaaccatttgttttttcagggtctggaagaaatgaaagaatatggactagttgatctgattcaaatagctgctgatttgttgaatgatcgattaccagaggcgcgagaagccgcaaggagtgctctggtttctgtttacaatgcatttatagagaatgaagagggggagaagaagcaagaggcatggcaaaacttttgccagtctaatttgtcacctatacacgttcaatctgtattcaaatttacaacttcctagaggttgaagaggaaattatactgtagtaactaaataaggaaaggttgtttttacatgacagccataagtgtgaacttctgagcttttggtcatgtaaaggttgtttttacatgacacttagtataacactggtttgagatgaatgagaattatttattgattgtttgctgtaaaaagcttcttattataaaggaaataaaaatatttcaagttttgggaagttaatcagtcacaattaccttgttttatttttaaaatattgtagtctttacattgtaaccaccactaatcatcattacaatctttcttatatgtaatcataagaaatatggaaagagtgctgcgtggtggtcttgcgatcgagtctcaaatttaatgtatatataaacgcttcaataaaaaaaaatttatgtaatcataattcctaaaagaataatagagtcaatccacactcaatcctgttaccattccaaaaatgaactaactattatattaccattacattacacaaaaatcaaatgaaccccaaagagcgactttgacaattaaaaaaataaagttttcgtatagtttatttaaccaaagagcgcaaagccatctcaacctcagcaaatggttgcccagcatatagttgaagctgacccttctttacaacaattaccttcaatttgtttgagtttattgcttcttggagttcctgcaaaagttttgcattcaaaaatgttggcacaagtctctcacttgaataaaagagtgttattatacataagatttttttaaggtaaaattatattattcttacttttatggacaaaggaacaatatcagctctaacatcacc

SEQ ID NO: 187170 - DNA, 3113 bp, Cannabis indica
ccaaattgaacattgaaaactatcgtgatcatcaatcaaatataacccactttagaaacccaaaataatttcactcaaacattataattacttaaatcaaacacagtgcagaactagattaagaattttccacagaaaaaattgaacaatccaatccatttcagaatacacactctcattctcataaatttcaatcctaaattcaatataatcgatcaaaaccaaacccggtatccaattaattacaaattctcatcaaattcaacatatgaaaattaatacctgaaataagggctgcgagagagaatgagacggtgaagatggtaggtggcacccatggcattaacgatgacatcagagaaggcgccggaattgaagccttcgatttggatgtggtcgcagagtgaggtgagattacaatccagggcacgaagctcggcgctgctccggtcgttatcggagtgctgcgagggcggaatcgtcattttcatatgcggtccgtacgagcgattggtcttgggatattggtcttccatgttcttcagaagaacaactcaaaaacgcaccgttttgatccaccacattgcttcactaatcaactcttgtttctcagactgaaacctcagttatgaaaaataaaattaatatttaataattttaaaaaaaaattgtattgggaaagaaaaaagtatagtaatgcaacgctgcgtttatctgcggaggggtaatttggtaatttcaacagtttcaatgttttgtttttcgaacagtattaactaatgatgagaccttattactgaactggactgtggaagttcattggcgccggctgtgactgtcttcgtcttcgtcttctctcttttgatttgcgtaaaccctagctgtcaagcttattgcttttcgaattacaggtatgtggattatcaatatgatgacattacagtactcactccttttcttatatgtttgttttgaaccttaattgagaactgagaagctttcaacagtttcgctcccagtattggagcaaagtggttcccttgttcactgctttattaacttcagcttcaattttagctggttttaaacgaatatagacatatatatatttgtactttcaatatttttatttaaattttcttttcctccaactcgccgactccaatttttttttttgttctactcagagaggccattgttatctactccatcatcacttgcttcagttctcatggctacttcttcaggtatcaattattgtctccttcatatgaacggactttttgtttctatatctctttctcgataagaatattatcattctaatgttggatatcctgcatttgcatttgcattgtaaaggttctaagatccatataaaagtggcgtaatgactgaatcagattcttagcggttggacttttctactagttaagtaaggtatggatctatttccaattttttgggggttaggttttgtgttttgtattctttagttcgatcattgtttctgtgactaaattattcataatagtttttgctcattaaactgtggtctgtggctagattgtttttcattatgggtctatgacaaatgtgggagtggtgttgtgaaagaatgatatattgaagttgtttgtaatgtatttgataaaatgtcaaagagggatatttttatttttacttctttcattccaggcctgttaattatggtctatgaacaattgccattgagttggtttgttggtcgaataggggtctagatcttgccaatctaggaaagaaatgattcaatggtaagcagacagatgtcatttgatcactaaattatgttttggttttatgttatcttctttcaccgtatgctagcataattgttattttcggactcgaaatttttggcttcagccacttttcatgctctgctttattgtcttgttagaacttttttgccttaatctgttactggttcaacatacagtaagaatatctaaagtgtcataaaatggtttgattgagaccaattagaaggttcaaagacatattgataattctactaagcgtagatatatggttagtttaaggcttcatatgaagtggtagcagtgatgaggagcgagcactagtgggcatggtctcacttatttgctcatgtaacaagttttttggtatgactgtttgctcaaaatacgggcagtactagatggtaacagtgggtccaattaatcatggtttttacatgtattgtctcaattaagaagacatttgttaatggctaggtagggtcccttcacaaagattctaaaggattttcacttttacccttaatttatcttggtaagctgaccactgccccttagaagaaatcattccagagcatcaccgcgcctcagttggaatcctttgatatcttctttttactgctctttcgaggaccctttttgaagttttggaccattatgtgttttttggtttctcttcaaacagtgcctataaactataatggctagctagtctaagaatctataaagtcctattgcttttcttcttatcatggagtatgttgagattgtgaagaggatagagtgacctttatatgtatgtgtgtgtgtgttttgtcttctccatttgttaatgatatttttaactgtcaatgtagccttttaatttgatctttcaatcataattctcttatattgattttgaaaataataaataatggtccttagacaaaaaataaaagttcccaaaacgtatttatgtatatatttatttatttttgaaccaaaaacgaaatatatatatatttgtgtttaaatattttaaaaaataaaataaaaaaaacctaaagttaacaatagtatttcaactggtttgaatgtgtgaaagttgtatggcatttctgaatttttcttttattattttgttgatctccataggctgagatgtacgggtatgtttccttgtttttgctgctttagtatttaaaggaaaactcttttagtaaaaaaaataaataaatttgcaccgtgtgcatcagatatatgaaagtaaaaaattcaactctaagcctggatggtatcagctggatgtgcatacatgaaaacactcct

SEQ ID NO: 187171 - DNA, 1497 bp, Cannabis indica
aaaagaagaaaagaaagaaaaatggagaaaactaggaaagtgaataaagaataaagtaattgatcgatgaatttgtagataaaaatggagaatagcaaagggaaaggaagaatgaccgaatgagacggtttagggccttacatacatatataatatgcattctctatatttttttatttctaagagcttcatggatcataatggcatattagagggggttttaggctttatacccatgagattaaaataattgtttgatcacaataatagctaatcaagcggatggaaactattgaaaaaagaaaagtcatagtaataaatgctaaaatgatatacgttaccgccaaaataaagcatgttgttttcaaataagaaaatacaaccgtaccctcaagcaattaaaaagtctttgttattttgaaaagtacttttaggggcaattgtaatacccatatttcgagcagcaatatggtgctgacacgtgtaatgtaactggaatatgaacaagcttgaattatgcaataataaatacattcagacaactcacctcgagaaatacagttggtagaagtatttgaactcaccctcttaaagacaatggcaaggcgtgaataataactactagttgaggagactagtgagatgaacagagaaagtccatctcgtgatacacagaatacacaacaaaattgtttataaagggtagaaaatgaattatctaaagagcttgcagctcattgatccatatacacgtgagtatgttgaaagactaaatgcaacacatttagcatgattcaacttgcaattgtcatgttgcgacaaacgtttcgcgtatggctaactaaacactaatagaagaacgcgatgaatattacagcacatacttagacactgatttaatataaagcatcaaatagaattattacatcgcgaggagaatgaaacatagtcagcataattgcctattaataaaattaaaagtgcaattatgagaagttatttttaattatctcatgtgcatatatatgaaacgtggagattatttatgtttcatgaacggttacaagtgataagatcccaagggaataactatcatcctagactcatataaatagggacaaaacttagggaacaagggacgaccggttgaaaaaagaaataaaattatacttaccatacattctgtaaataattaattgtattttgtatataattcattaatctccgaataagatagacttgtggactatgaagaattaatttcaaaactacataaaaattctcttgtcatttattataatattattattatcaattattgctggagttcatttattattagctaataaaaaatttcattaatagttgggaagccaagttttgggatttgtttgggttgacgatggccagaggggtggttgtgcgaaaaaatgagaagggaaagtgagtgtcggagctgagggagaaagaagaatcaaagaagaagaagaaaaagaa

SEQ ID NO: 187172 - DNA, 1850 bp, Cannabis indica
ctttgatatataatcacaatgtcgtttttttaaatactacttaaattactttgatctaatttataatacaccaacacgtgtttttatccggaagctcacatccataaattcttttgttaatgtgatttcggggatcattcccctaatgccttcccttctctcctttgcctttttcacgcttggcatccaggcatctacgaaggtcaacagtagaccaattgtcttcaagaaaaatttcttccaccccatcatcctagttaatttaatcattagggaattttttctatcccctaacagtagatctttacatgagtgttgggcctatcattttgcacaaatctgcctcgctaagtagaagggtgtccaagcccaaaggcatcaatggccttctttctctgcataggttggtcggttgtattcacattttttctaagaggaacttggaaagttttttgttggggctcacctaccttccccttccctttgtccttttaacgagcagaaggtttgatgtcggcgaggcttgccattttctctttatgagcaagctcttcaagagcgttctcctcataatcttcctttgtatcaccaagtttggcttgtagacgtgccaacatttttgtatcttgagtgaaaattcttcttgcaccgccaacttttgtgagcctcgacaagctcaccaactattccaaccacttcagggtcttgttcatagagtaatacctatctttatagtatccatccctgatctcaccatcatcctcttctatttctctattgtcattgggtcaacatcattcattgtgggatcatggccaggataagtaggttgtgtgacagtggttttcctggtatccaccacagttgcaaatacaaggtagcttcaaatcttctttcaactctgaatgaaagcaccaaactatttaccaagattttggaaaaatgatttaaataagagcttaagaaattaaataagtaaacataggatggagataaatttttttacgtggtttgggtgttaattaatcctactccatgagtcaatgtattatgtcgaatggctttaatgtagtacaatgagatcttacaagttcaaaaaccctagcttctagctattatttaccttctaattttctaacttaggcatttttgacttctaaaagaagaaaacctaaaacaagctctttgaatctcactccttgcatgaaggtataaagagatatttataggctaggatttggatttgggtacacccatgacccgctagggcttttgtgtaaaaataagcccactatgagggtaaatacatgaaatacatgactttaggcccactagcagatttttggctcgtggggcgaaggcgtttgtacgtctggggaccacgtggcctggcacaaatgtcctacgggtgtcgtacctctgaactgtggtgtcggatacgtgttgttggacaaaagaaaggttttccttttggtggtgcgtgatctatcatgctctacgtaggcgacaagatctgatatagtggggctaggcattaagaggcagccacgtcatcttatactaggcttttgaggcacctcttggagtaccctctctagatgtgccctaacattcatccagaaggctttgtttattccgacttgggaaggctggaggtttttcgatgtccaaatcagcctcgtcttcgaggcaagccttctaggctttggattggctcgggcccatcttctgtctagactgggcctacccttgtggaagggctttagtccaggccattccagattaatcctatttcggagatatcatgtgttaccctcctagaaacacaaataaatatatatttttaatta

SEQ ID NO: 187173 - DNA, 2096 bp, Cannabis indica
ccatctagagcttaaatgacctataattcgtgttctagaaacaatttatcgctacaaaagactttgttatgaggtcagtttgttgactgacatacaaacagtaacctagagaaagtctcaaggcatacatccattgaatgatggaagcggtagctaaaactaaagtaaataacaatatgaagttggtggctctataatcaagaattacagcagggtccttattttggaatgaaatgcaaacgaagagggctgacacattgtcaattttcttgataagagcccaaggattcattagcttggaggaaacatatactagagtctttggagtggctctgacaccatcactcaatgctgacaattccgtgactgcaccacacttgctagctctatctattttccctcccgaaacccaatacacaatgacatctatttataaacctactgccttggggtatgcgcctccaacaacaagtttctttagttttagagcaacacatactagatatagtggtgctcccgaataggcacaaagaaaccaacatgcaaaagttttggaggcaggagtgagccggtcacagaataagagaaactggaagagccagagttagagtgaggctccaaagaaataaaggaagggatatgaaccccagtatactgagtataccaacttagttgacatgcgagaaaatgtatacaggggtacatgcaactcagtccactaccgaaagcccccacagatgtaaaagggggttaaacataagaaagatcctagtgagagatacgaatatcatagtgatgttgggaataccactaacgaatgtgaccacctgaatgatgaaatggagaacctcataaaaaacaaatgcctccacaagtgggtaagaattcttatcatttatataggaccaatggtaggtcaaggataattggtaattcccagataacaaggagtggtttatccataagctccgagaatctaagcttctcaagggctcccaaatgtccaagctcctggaaacatccaagctttcgtactaggaaaccgttatccaccgggtaggtgttcataaaaattgaaaaactgaaactgaccatcaaatcgatcagactgtaaccgaatttttggttccacgtcatcaacaaatttggcagtcagtttcagttatgattttttttgatatggcggtcagtttcaggtttcgaaataaaaaaatggttaaaccaaaaaatatcaaaaccgctaaaaatcgccatagactgccaaaaaccacctataatcgccaaaaaaccatccaaaatcaccaaactgaaaaaccactaaaaactgccaaaagccgtacggttggttgtaaacggttataatttctaaacggttggtagttcttgtaaaataaaaatcgtaattgaccggttggttataaatttataaaaaccgaccataactgaccgattttcacccctaccaccggggacagctctaccacctgtagatagtcatgtggccacgatatctggaggtccacatattgtcggtggtacaagaaatgctcaaaaaagatatctcaatgagcttggctaggaaggggaagtttgtgccttagtacaaacaccaactcaaaggccatggatgatgggtctgcctatttcattcgtagaggaagacatgaggcacatgtactttccccataatgattctttggtgatcgaggcttaaatcaccaacaaaagagtattcaaaatgctagtgtacaatggaagtttggtcaacatcctattcaaggtcacgtttcaagcgtttggattaactgaaggaaacttatcacctttccagatccaacttcagggctttaatggagactcactacttcaaatggagaagatccaactcccgattacactgaagataaggataaatggaagcaatacttctacgaccttcaagtactacacatttgttatgctggattgtccacccacctgcaatgccattctgggatgacctgtcctagttgaatttggagcagtaaactctatccaacacgtatggatgaagttttcatgtgataataaaagtattgggatagtgaaaggtgatc

SEQ ID NO: 187174 - DNA, 2339 bp, Cannabis indica
ttgttcaagtatgtctcagtgcttctatttgaataaatttattttgaagtcatggaatgctatattttgttaagtttgattttggtacataacgccttggcaaaaatgttacaaaattagtatttgattgtaaaccaggcatccagtacacagttgaacaaagatatgcattttctcaaaatttcatatgttactgcattctattttgacctggcccctttcaagatagatagatgtagttttcaaattaaagtgattacttctgtttggagtaaattacattgaaatcatgcattatcacatttaaataggttgaattatacattatgcaaaaaatgtgaaaaagtagtagttgatgataaaccatcaaatttactattgatcaatagaagaatattcattttccgttacaaattttatctgtcatagtttggtttttctacttggatccctttcaagttgatatagtgtactttttataaggaagcaagcaattacttgaacaagtgcatgtgttaaatactgtaacgggttatgatatgagtatcttttgtgtccttgttgtcatttttgtgctgaacatggcattgccacgttgaatttgattttggtagagtttgcatgctgacctttaaagttccccagtgaacatcaagtttgactagtttttttccccctagattttaggtcatttcttaagcctttgttattcctttcatgtatcattttgactatacttttgatggatttttcggctcttctatgcatctctttcaactgcaagctaatttgttattttgtagatgagactgattcttcaatttctttatactgcaggatcaagtgatgaagctatagaaactgctaagcttcttgcattgaaagaaggcttgttggtaagtttagtgatctgttggaggaaatgactatatatctgtatatataaaatgtagtttaatttagctctttattctacttgtactgcaggtagggatatcatctggtgctgctgctgctgctgccgttaagatagcacagaggccagaaaatgctggaaagctcattgttgtaagttaatgttgccttatatttcctgtatattcagagacaattcatcttaaaaacttggaattccaagcaagcccaactagttttttctttttctttgagtaactaagaaaataaaaagaatgtttgtttttgtattacatctcatgtggtgtgcagtatatacatcattcatacatttttattatgaccttggactcctggtttttctgctgttcctgtttcatatttaatcacttgttataagctcttaacatttcattctaacacatgaacaggctgtctttcccagctttggggagcgttatctctccactgtgctgtttgacgatgttaagagggaagccgagagtatggttttcgagccctgaggaagtgttctctatattcaatagaaatcatgaatgtttgtgcgcatgaggcaaataagggttgcgaaattgcgttggggatttgagtttgggtgtttttacttctagatagttcttaataaacacgcaataaacaatcggatgagttctttgatgttgtaaagcttggtatcagctgttagagatgacagctgtgtacatgtgaacagtgttaatcgttgctatgaatattaaagaatggttgtttctccttgaaaaatagtttaaatggtttattggaagactagttaactggctaataatattgagccaaacattgccaaactaaattttggaagacatataaaaaaaatggaaaatattggaagactggtaataactggctaatgatattacccaaacattgcataactgtcatgtgtgatgtttgggtgtataaatatcattgctctagttaataattcagtactaattgactagacacaccgctcttctgttatttatttcaactaaataaagatgtggcaaacgagaaaaagctgaagacggcagctagtttctttttttccaagagggatgacttaaaacgtctaatttcaatagttatttcgacagaacattttcacagatatattgattaaacaaaccattttcacaaaaagtagtatgttcaaaacgatattagttttccttacaaaaacagtttaataaaattaattatttaatgtacattttccctttttactcccatcccatacatgttttcatcaactttattatggatgagtacaaacggccaggttaaatttactttaggttaaatttacttgcataaagttattaaataacgcctcagaaggagttgaaaaacagctcttctatcaatttcctaaacttttt

SEQ ID NO: 187175 - DNA, 4334 bp, Cannabis indica
tattatataactctctctcttttttttttttggtaaaatgacacattaacataacttaaaaagtggcatgaatatgtgagaacagtaagtagttaaggtaaaaataactacatatatcactaattggacatgcataaagtggacttgcataattaaaatagtaagtattaagactagcagagtaaacaattacctaatacactctaatacagtaattattaggtagtctttgcatccataatggcatggttgaagccttcacaaaattgttcaacaacatcatatttactctctttgaagtgtaattttttccattctactaggttctttctgctagcgaattgtatgcccttgtgttaacattctttgtatgatccattctcttatcaaactctgatgtaatggtggcatttgcaacattccatagaagttgtttaagcagtaggccaagaaactccttgaaatttttgtgcatatgtctcacacaaaacctactatcaagactattgaaaactttttccaccgcattatgaaaccccttctacctgtcactcataaaagctaaagagtttgactccatgggattcaagtcattttaataactctaaaaaccaactccagttgttggttatctctttttcaatgattacataggctattataaaaataaatttgacgcatcaatctcaattgcaacaagtagaattcttttgcaatatcctttcaaaaagtacacatccaaccttataagtggcctgcaaccttgtttaaatctttcttcgtaagcaagtagacacacataacgcatttgaaagattattttgccaccttgcatatcacatttaatcttggcactagtatttggattagtctccaaaagttgcttgaaataattctctagtatagcatactgcccactgaccaagccttctagttcttctcttaattaggctcttgctctataaaaataccaagtactcacctttgaatattttgtatccttggatatctgaactagactttgaagtgagttgcaagccactgtgcatcgatatgctatattatctgtaatcccaatttttgtccactcgacgtggcatgtccacatagtcaaaagtagaagacacgtgaagaacaactcatcactaaccggacaagatagtgatgtacggtttctcatccatcaagatgtcaagatcacaagaaggaatcaaataagaagaaccaggcaagtcttcaagacatggccagaccctagctggccgaccaatggtggtagcatgtgtcaaacaacttgcaaataaagatggcctaccaaaaagggcaccaagcttcgaacaacctacagcatgcctgcacaaggtcaagcagcctgcctgcacaaggtcaaacaacctgcttgcataaggtcggatagtctacagcctgcctgcacaaggttagacagcttgcaacttgcacaatggtggacaacttaatgtcggacaggtccttggccaccaagccttaaggtttcaaggaagaataatacaacctaaaaatacattgaagagaggtcagcactaacctgccaggttagtgtcgtgcagctttccaacctgccaggttagtgtcctgtagcttcacatatgcaagatcccatggctgcacaatggacaagcaagtttgtcctaatatcaatgccacaagcaaagatagaaatgtccacaagccaacaaggtcttggacggacctatagctggtcaacaagtagtggacaggtttcatgaaccaagcagcctttgataaggatggccggccaagtgtacagaaacacgccaacacttgtgttgttcaaaaaagccttccaactcgccctcaaaattcttacgactttgaaacagttcaaactgcccacaaagatagggactctccatcaacaaataacaaccttattccttagggattattaattatttacattgcatttcaaatatacagtgtaacttccctactttccaggaatatctctatgtatagtttgtaaactctaatactatataaagggtcatgacctcaagctaaaggaccatgctcaataaactttagacgatgcaagtacgctcaaaagtactatagcaacaagtcctctctcttttctcatacttctcacttgcaaaaaacactctcattgtaaaattgaagagagcctagcaagaaattataaggtttcagtctataatttgcttggtattatctcaagagtgaatataattaaaaggagagtatgtcattaccaaaacaaaaggggtcgaacctctgtaaatcttttgtctctatattatcattctcatgtggcagtcataagcaagaccaatcctaatcagactccaagtcggttggctaaatccatagtcaacatgaattgaacactaccacatttctcatactttgttttgtgttatcccaatttttgtcctcatgacgtggcatgcttacatggacaaacttgtgccatgtggcattacatctcaataaaaggaaggccaagtcaacaaccaaaccaacgaagactccgacactcaaacggggatcaagtgacaatccagctcgctcttgggagttggttagccacccctggttggccctatggctgccaggccaggaaacaactttatggtcaaccaacctggccagcacaaggccatggctggtcaaggattgcttagtggatccccacgggacacacctacacgtgggcatcataagtgggctgtgaattggggcccaaaagcccaacagataggcaaagaatatctagaatctaggggtattttggtcttatgtaaatatctagctaactatcctattttcaagggatttaagttgtaaacttagggtttaggcctcctatataaaggtctaaacctctagctgaaaacctaagttgcctaagcctcctctaagctagaaatctcctattctgtaagtgtcagactctctctctctctctcacacacacacacacacacacacacacacacacacacacacacacacacacacacacacacacacacacacacacacacacacacacacacacacacaagccttcaccttgagatagcgaacatcggagtggtcgaactcgaaacactaaagccaaggcgagctagtgagggcgatcgtttgaagttcgatcgaggtcggcaccagagtggaggctgtgtggattttctcgggaaaatgaggagaagaaaatgagatttggtgaaattgggatttaatttaagaaaaaatccaaatttctttttttaaaaatatatatatatattaaaaagtaaaaatatttttttaaaaaaaatatatatttaaaacggatcgggtcagatccgatccgtaaaaaaaacaagcggggcgggtcggatctgatccaagatccaataactatccgaatgtttcagatcagtagtgatccgtcggatcggatcactgacctgatccgaatgaatggattttaatcaaactgagaacctctagttttgaaataaaaataagaagaagggagaaagaaaggggagtcagaagattagtgagatttcacgtagtattatagtacaaaactctgaaagataattaggttagactttagaaaaagcttgaattttaatcaaactgagaacctttggttgagatcattatcagcaattttcgatacagctcgagaccgacccgtatctggtcgaattagccaaatgaaaaaaacctaattcgtcgtctgtgcttagaaattggggaaaatggagatatagaaatttggctagacgatttttgaacctgttcgtgaaatattaacccagaacaaaaccagaacccaattgccttttaagaaaaggttgacggtgctccccctccgacgtcccccatggacaatcggttgacggtgctctccctccggcgtcccccatggacgatcagaaatcgaataccgcatgcttaaatcaaatcgcttctttcagttgatttggattttgaacagctaagaggtcggatcagaaatcgaatactgcatgcttaaatcaaatcgcttctttcagttgatttgaaatttgaacagctgagaggtgggatcataaatcgaataccgcatgcttaaatcaaatcgcttctttcaggattttgaatcgcttttttttaggattttgaagagctggggaaaataattttagttgatttggaaaaggaaattttaaatgaaaataaaaaaaaaatatagatgaaaataaattggaaatttaaaagttaaagttaacggagacgttaatctcccgttagtttttattaaaataaaa

SEQ ID NO: 187176 - DNA, 1783 bp, Cannabis indica
taataataataataaaagaatatgttgtacgtgatacttgaaatgatatttcaattactttttgccacgttcaaatttttcattaaaaagtattaattaatttttaacaaaagtctactttacgttttttttaaataataacgttaatgtcaagtatcacataagtataactaaagagcattactattgggcaccagtgatgcacatgaggtggcaccctacgattggttagcgatatttcctaaatcttatttttgtaagttatatgagacctgctactttttttttatttaagcgtttatatattacaacatgtttaacctgggacacgaacccaggacctccaatactcacacacccacctatagccacttgagctagtatcatatcattattagtataattaataaataaattattaataataaaaaaaagataatatatttataattttacttagattattttttaagtaattattaaaaaaacataaattagcagctatattgcctaggtagatataatgacaaactagtaataaaacacctatgtttggagaaataaaaaagaattggagaatgaattggtaggtaggcgaaactttaaaattttgcagcaatttattaaacggcccccaccacgggtccaccaagccaataaatttggtatagttgtaaaacaagaattgtacaaatgagtgggtgagcctgagctgtgtaacaactgtacaacagtatgtttgattgtttttctgctgaaatgtacagtacgtacgttggtttaatggtagtacaatgatataataggtgcatgcaaatctcttatatttgtatctcaatgaaaactggtccagcaaaaaaaataaaaataaactgcccccaaaatgttggtatcagttagaaactaacacttggcaacaatctttttaacatattttttaatatattaattttttcctcgtatgtatgaaacctttgtagggtgggtcaagcagtagttggtgccttaaataattgtcacacttttggtgaaatgacatttaataaactaaatagagatgttaataaacttcacatagcagtatttagatatgagagagtcatcttaatttctcctaccaattatcaaattaaccaaatatggagaacaataaactaaatagagatgttaataaacttcacatagcagtattcccatggctagcacaaggccatttactcccatttttccaattctccaagttcttagttcaaaagggtcaccgtgtttccttcatcaccaccccaaaaaaccatactaggctcccaaaaaatataattccctcaaatctatcccatctcataaccttcgttgacctgcctttgccaacagtggacggcttacccgatggagctgagtcaactgccgacttacccattcacaaagtccctttcctcaagaaagcctttgatggactccaaccaaagtttgactaagtttctacaagactccggccacgacattacttggatcgtccatgacttcgcttgttactggctacctccactcgccaatcgacttgggatcaagttggttttcttttccatatttaacgccacctcgatggcctttgcgttaccgccatcggaaatggctagcgattaccgcagccgaccagaggattacacggtggttcctaaatggtggaaggatatgccatacgaggttgcttttaagttgcatgagatagaatctcactgggattgtatggattccgatgtttctgatttttgaaaggattaag

SEQ ID NO: 187177 - DNA, 2156 bp, Cannabis indica
gcggtcattatcactgctaacattaccagtaatgacaaaggactcgtcatactaagacctagactaaaaaacatagaaatcgactatatactagtttaaggtttttttttgttttttttttttttgaggtgatataattacatgggagtattaatgtgattttcttactttttgatctcttccgacattgaggactatcatttcaacgaggcctttagagttcatgagaaaaccaagagtgaatccttcgtgaattgtcattttgaatacatggcaacaagaagagttccaacaattttgccagcgcaggcaagaaatatgatgagcattaaaaatccccaagttccaatcgattggatagttgacacatcagttttaagcccacttattgcaaagaatagagggagtaaaagccccgaaataaaatcctctagcttctctataagagtaacgccaagaggtccatttggtataactaggccaaacacaaaagctccaaaaacagaatgagttcctatagcgtctgtgatgaatcctgagatcatgaccccagtgagaatgagacatatattgaactcactgaaactctctccctctggtgttcttcgaaccatccatgatataattggtcggacgatcaaaacacaaaaggcaacaaaagctgcacttgaaagtatgacccagagggaagccaaggagctagcacggttttcagctaaggcaatggccaaagcgaggagaatccaagcacacatgtcatttatgagagcagaagataaggcaatcctgcccagctcggtgttaatgagtttgagctctgcaagtattctagccagaactggaaatgcagttacagagagagctacaccgagaaagagtatgtaagtgccttgtgtcatgctctcatcctttttatgaagaatgaaagaaaagcatgcgccaattatgaatggcaacaccattccagcaactgcaatggcaagggactttttccctgttcgtcgaataaccgaaaggtccatctccactccaaccaggaagaggaagtaaagcagaccaacatttgccattgtctcaagcaccatcacacttcttagaggaaatattgtgttggcaaatcttgcattgcgtcccagtactgacggccccaataacacaccaccctgtacacaatacaatatatttttataaactttacatatttatatacaaggaaaggatccaattatgaataaatgcacataaacagatatagaagaaaatgatccaacagttaaaagtattatgcttataaaaagaacataccatgatttcagagataactctaggttgacgaaagggtttgagaaggacaaccaatgtgcgagtggtgaccacaattaaagtcagctgcaagatgaatagaggaagagagtaatccaaaggattatctccttgccaaataccgttggttgttatcatggtcggagcataacacacgatcgtgtcttccgttttgttaggcgtcattcctattgtcgtcgccatcttattttctggtcactgttgtaaatttatatcaaaatcaaaactattcttcctatttgaattaatagtaactatttattaatatagtgactacaatggaacagttaaatttttcaaaatgttccatgtgcagtagttgctgattgtttgtcctcctttaatttttcctactccaatacaagttttgttcttgaacatggaattgagagaggttttggttgagtatgagaaatgggaaattatgaggggatgggtgggaatgaaagagataattaactttaaggttttggtggttatccgttccatttgggagctgatcttggtctatggttaatgcaaacatctattttaagactttttgttatcacctctagttgttaaatatattttttgcgtatataaatttttgttttaagtaatattacaatacacgatatacacaagggaaattacttactatatttgtagaatggttttattgtaagaaataattgtaactaaatctgttgacgaatttcctctaagaaagttaacaagaaactacacaccaaaactatttcttattctcagtggaagtttcgttttgctaattatttcctcaaaaaacaatatatatctagagaaagtat

SEQ ID NO: 187178 - DNA, 2119 bp, Cannabis indica
aatgagttggatcatccaagtacttcaccagctggtgaatcttaccgatcaatgggggagatcctatcatcaatggatccagggcatcccttacctttgtctggtcttgaatcaggtcctggaaaggctatgaataaagtcagtggtggtaccaatcataattcaaaacgatcaacattctggggaagaagcaatgtgagtaccgtgcttgataccctgtacttcttacatgaactattagtgtttcatgatttgttttgcagttatcaatgtgttataaaatcaaaatggttttttttttttaattttctattttcttttctcatttatgcatcattctctactctagaaaataattttatttatggtaaagattgagttatttgggtcgtgctgaagctgtataggttattattactattctcttatttgattcatgttgcatttttaaaattcagtaattgttgattagtataaattgtaatgcagtatgatacatataattaactaggccatatgtttactgattataggagtaagacatgccccaagaaatagaccatatttttacacatgctgacatggcatattacgagattgaaatttagtgtaatatttgtttccataatggttacattgcatacttgctaatattttctttgttttcagaataaataaataaaaattcttctttttcatccttgtctctcagtaagcaataaagctgtatacctgtatttggtcagcaaggggttaagtgtggataagaaaaacacacaaaaataaaagtctaaagtggggtagaagtagaactagtgaaagtagtccttaatatgccttgattcttaaagtgcaagtacttattctagtttttctatgctaataacagctgtattcatagtaatactaatacttgttcttttgtggtttttaaatccatggtggtgttctttcatccattgttgaaatgtcacgattaacaacaaaagtctaagaagagttggtacaataaattagtcacataggaggaactagtcattagtcaaatacagtgtactttctagtaacttttccttttgtttttgtgaaattggttcctcaccctgcagtattgaagggaactataaaactttctatgtaggaacataagagggacttgaacctcaaacttcttaggaacaagccacatactttaccatttgagcgtgagccaccattctttggtagttacttccaactatgatttgacagaagttttgttgaagttctaatatgagaatagttccaaaataattaaaaatgagaaggcataaattgcatcaatttcaatttggtagctctccactaatgccgaattgtataaaggaaaattcagtttgaataaaaatttcttcaggttcaaatctctgtttgaagttatgctgaatattataaatttgatagtcattctattatactgatgccgtttagtattattctatcattgttatcttgaccatgttttactttcaatttgcttttgtttaattatgtgtttaatttcttgtttaatgaatatctgatttcaaattccaaaaaaaaattgtgtatattgtttattgatatatgaatagcagtacaaccttcgatatatgtagtattttcagtagactaaggaaatatccttaaatgttaaacatataatcagcttaactgggaaagaaataaactatatttacatcacatccacacttaacataaatagactgatcggaccaaatcaatgaggtttgatcaaaaactaagaaatcttccaacactagttttagaaattattatttaattatataaaagattcggtgtagcttggtttatttgactatatcgtacggagataacttttacatttattaatgattgctcttgttcatatgcgtatgcttagtgttttattataagaagaggacctgagcagaagtctaaattttatgatatttaatatggaaagacatttaattcgcttatgatggtcttcttgcaggttagaaagacaccatcaatggaatcagttgactcttctggagaggaggagtaagtttctcaatttcgggtttcaaacttgcttctttttttttttttt

SEQ ID NO: 187179 - DNA, 1791 bp, Cannabis indica
actaaaatttaaattaaaaatacattaaacaaacatttgagtaaaaggttatgcttacctaaggtttttgtttaaatcaaatttcattgtgaaatcatcgttttgcattgttcttagcatcattcttcccttaaaaatcaagtttttatagaattatcgttaaaactattatcaagcattgatttaccacacttaaaaataacattttcacgccactatcgttaagtatcgtaaaacatttttaccttgtaatacaattttcatgacaccattgttagagcatcgttaagcatcctcttgtataaaaatgaaattgatgacactattgtcaaagcattagtaaaattagtcaaacattgctttttgtctaaaaaattaatttttatgaaactattattagatcatcattaaacatcgattttagtttaagatacgcaaattttcaaaatctaagaaaaagccacatttgtttgttcttgaaacgattttatcccctagacatcgtatagaattaataattctaaattgtgaccaaaaaaatcttgtacaaaagttcaaacattataaaaacatgaagaaatctttctgaaaaaaactggataggactaatggaaaatgagtggtaccaaggagaggaaaggtggtgtgtcgtgctttgccatcggtagactggaggaaaaaggagagagaagaataagaacaagaaagaagtgggtttgagagtgaaagaacttaactgccaaggcaattttctctttatatatcatgaaggaaaaaagttaaaatatacaattaaaaaagtatgaagattgttgagttcttttttttttttgaaaaaaaaaaacctgtaaacgcctatgaataaaaatagaaattagtataaataagatttatccccaattatgattctagtagaattttaccttttaagttttaacttcttttttgttgcaaatattctccatcaactataaaattcgttacaaatatcttccttaagttacaaatataaatagtagtctaataataagttaagttataagattatacatatgcattttaagagctatgtttgtatatttaatgtcaataatatgaattacaagtaatatttcagagtttaaaattgttaaataaattatgatactgtaactctttgtcacccatgaccacacaaacaaattgttaaaaaaaagaccagaatataattaaagatatttaaaacgattttaacagtttgagaaatatttttgcaaccaacaaaaattcaagaagcaaaactctccctaaagggagagaaatcctatttattctaaaaatcaacaacatgaaaaagaagaaatctcaagatttctctggaaaaaaatttcaaaagaaaagccaagacctatttttctatcatatggaagaattagataccatggctttcggaacaaaagacaagtctttttcttttctttttttttttatgaagaacaaaagacaagtcttgtttgcaacaatacaatgcaattctatggttacttgacatcatgccaaaacaaaataaagaaagaaattcagtttccaagtacaatcttgaattgtttcatgatggaagaaatatccgaataagaagtttgacataaatcccaattgtcttaacaagatttaccaagccactgtagaagaagatgaagaagaaagaatattttgagcaaattttaaacaatttaatgtagagccttatatatatatacccattctttaataattaccacccattattgcaaaagataaaaaaaaaaaaaa

SEQ ID NO: 187180 - DNA, 2483 bp, Cannabis indica
tctataaaattgagtaaattccaaacacaaagaaataaccccaaagtacaaaaaagcatcaaaatctacaaggagtggcatcgataaaagaaccaaaggaaaaaaggacacacgcaccccacaaccaattaaaatctccaattcgactaaaaactcccacatcggaatttgaacgtaaattactaacaatatataaagactaaacctaacactaaaaatttagattcaatccgacggtggagattctccgaattaaataagtgagcgtgtactgtatacacatgatgtttttttttgcgttaaaagaaaataaaaacagttaccaaaaattaaaggtgtgacgacccaaggactgtttcaaaaaccccactatatatacaaaaattaaaggtagtaaaaaataactgaaaaaaaggaaattaataaaataaaaaataaaaatacaagagtcttttcctaataattaatcagttactacaaacctaagaagaacctaatctctattctcacccaccgtggaaaaataatgtacactaattcgaacctattcgacccgaattcaatgccgtatcactctctctttaatttttcctaaatactagaatgttattctttttctaatcaaaaacttggtacaacaaaaccagactcggcaacagggacgtcctccttcttccgccgcatctccagaactttccggtggtggtttgagtgtaactcgcttgaaaaagtcggactacaagcgggtcggtattcgggtagtaaccgacccgacttgaaccgaaccccacaagcgttacagagtgtctttgccccaagtggaccggttctccactgtggggttttctgaaccccgcaatgactgcaccgccgagatggctgaccggccgggttagtcgggttggccgggttggttgcgtggccaacctgagttaactttttcttgggttttttggcctgaggcttttcgactgaaccggccgggtcatgactcagtactgtctggtacaaaagccagggacttgacggagaagaagaagaagatgatgaggttgaacttgaggaggattcagtgaaagaaggagaacccattgaccaaacccttccaccggttcgggttctcttgcttctagctttggccggaaccggagtactgaaacagggcttttccggtatagtaaccatttggggttccggtgctattttttcagtctggtttttgggattctcagacgaaactcctccggtaccggcaaggtatggtgtagagaattctgagaaggaatcctctacgaaatgggataaccattcgaggttggctaactcatccacctgttaaaaatcgtacctttagtttaaaaaaaaaaacaaaaaaacaatctttatttagaaattttatgtttggggaaaaaaaaaagtaccggaacagagagttcagttgtggtgttgttgtttggtacagggccaaactggtgtttggttgaaaaactggtacttgtaaccgggatagagttatcctgttcttctgtttggtttgggtttaacagagaaggagaaacagagtcaaagcctttgttatcttcttcttcttctggttcttgttctggttcatcttcttcaacaaaacaatcttcattagaaaagttaagaaggtcatcaacaaaaaaatcatcaccattctcttcaaaacttgtcttgaaagtcccttcaacgcattccattttcgtttcaaacctaaaacccaaccaaagaaaaagttcaaaacacaacaactaaaacacatatatttaaagactgagtcttttgaacaaatttgaaagaaagattgaaactttattaaagaaaaaacatataaacctgagtgggaaaaagagagagaaagagaagaagataagagcagaaatgaagatgggtttagaggaagaaagagtgaaaatggaagaagaagaaggaaaaagggtggtgagttgggtaaagcattgaatgagggctcaaagtgtccgtggccctatactaaaagtacccgtttctttctcgtttttatctctctttattttaatttattttgggtatttacctttttctctctctaaatatagaatgttatttatacgtatactaagtctttgtatgtatttgacctaaatatacgttttgggacatgatttttttttatatacataacgctaatgtatattagtcaaaataaatgtttttggtaattttttatcaggatttatttacaccttatatttcatttatagtaataattttttattgtatttttgaaaaatatatacataaaatatatgagattttatttgaaataaaattaaaaaaaatgcattatttaaaaaatataattatcaaaaacacaaaataattaaaaatattaagattgatttcttaaacttaattattatttttattttttaacatttgagtgtacttttatgattatagaatgcaaataatttttttat

SEQ ID NO: 187181 - DNA, 3273 bp, Cannabis indica
taagggaggacagtctcatggtgaaatcaaagatggagaagaaaacatggctgcctggcttcttggtgtaaacaatctcaagattcaaccgttcactctcccacctcttggtatcttttcattattttctctttacatgttcctactttatacaatctctttcaataaacactcattttcctgttctttctcgtttttaattttttttatgcaggacctaatgatgttagagtaaggatgaaagctgttggcatatgtggtagtgatgttcactttctcaaggtgaatcattttatataattttctaaatagtttttctgggtagccaagttgagttgggtagcaaattctgttataccatttctcacatttaacagaactttggatagtataaataatacccacataccattttatacaataatgtttattgatcatcatctgtttgaaatgtttgttttttttctctcaggccatgagattagcagatttcattgttaaagagcccatggtgctcggccatgagtgcgccgggatcatagaagaagttgggagtggagtgagtacacttgtgcccggtgaccgtgttgcacttgagcctggaatcagttgctggaggtgtaacctttgcatagaaggtcgatacaatctatgcccagagatgaagttttttgcaaccccacctgttcatggttctcttgccaatcaggtcaaacaaaattgcatctttggagagtcaatttcttggtttgtaaatgtttatgttctgtggagcatacaagattaattttgtttactgggcaccatttgagacattgttattataatttttggcagttttcaacaagaaaataagctttagcagtgaacatagttgaagtgatctcttagtttcctgtcttatgcctaagagttgtgtgtgctgtgcttatttcaagtgttttaaattttgtttttcattgacaggtagttcatccagcagacctatgctttaagctgccagagaatgtcagcttggaagaaggggcaatgtgtgaacccttaagtgtgggtgtccatgcttgtcgccgagccaatatcggtccagagacaaatgttttgatcatgggagctggaccaattggcctagtcacaatgctcgctgcccgtgctttcgggactcccagaattgttattgtcgatgtggatgaccatcgtttatcagttgccaagaatcttggtgcagatgaaactgtcaaagtttcaacaaatgttcaggtctctttgattcaaatcatcatttgaagctaatgaataccgcatcataaccattaagctcttattacatgttaactgatgtgcattcaatttcactaaatcgtatggattcatgactcatgactcatgaatcatatcatataggtttggtagtaggtgctttaactcttattaagaagcatggtatttttatgtttgacaattatttatcttcatccatggttttggttcttactttttacaggatataggtgaagaagtggctcagatacataaagccatgatcggtggagtggatgtttcttttgattgtgtaggctttagcaaaaccatgtcaacagccatgagggccactcgtgcaggcggcaaagtgtgccttgtgggaatgggccacactgagatgactgttccactcactccagctgctgcaaggtatataaatgagactgcaaactagcttagcttaactctttacaaagagtttataataatgacatttttcctttttatgaaaaacattgacaatacttgagcacccaattggactatacaatgaaatgacttgtgagctacacagaaaatactaagaaactctggacagaaatgaagtataactaagaaaatttgagtagtaatgtgagttaaatgtttcaagtaaaaactttaatatgtataatttcttttcttcatggttataaacagggaagttgatattattggtatttttcggtacaagaacacatggccactatgcctggagtttttaaggagtggtaagattgatgtgaagccccttataactcaccggtttggattttctcagagagaggtggaagaagcttttgaaactagtgctcgtggtggtactgccattaaagtcatgtttaatctgtagttgttatatacttgaataagcagtaatatttcttgcatatttcaaccaagtaggctgctcttaatctagtgatccttctcacttgtgtctactactgatacaaataataaaattgcctactttttgtttttatttttctattttagaattgcttctcagaaagtgagaagaataattttagcttacttcgtagtagtggtaatagatttttctaatcagaaaccttctatcaaaattacataacacaagaacaaataagccaccacaatttagagctattcgagatgctccaatcttattttcaccacaagaataatctcttctataattctctagctgcctttacataaagactctcacccctagacattgactactcagacaaagaacaacagctactcttctctaccttattaattataattgagattgaataattcattataaattgttattttgggaatatatattgttttctaaaattggagaaagaaaatgaaataaaaggaattaattatttttttgagtaggagaaaataaataaaagaaaattaaaattagtttgatttatttatttaaatgtaatgataataaagatatcaatttaattttaattttaattttaaatttaaatattagttattgataccatattttataggagggatttaatttaaaaaaaataaagaaaaaaaataagtgaatgtttgtcatcataactaaaaagctgttttttgtttttaaaaacagaaaattattttttgaaaacaatttggcttgtttgacttgttttttgaaaacaggaaaataaagttacaaaaaataaaaattttgaaaacaataaaatgttgttttccgttttaaaaattaattcatttttggtcaatattgtttttaaaaaacactaaccaaacatgacttgtttttaaaaacttcaaaacaataccaaatatgctctaagattttcaggaggaatttgactgtgtaggtaaatgttacatgtgggttttttatttaatttaattagttgtttaaatgagttattttttttaatataaaaataaagggctatttaaatgcgttaagttaggataattcataaatttaattttttttttaaa

SEQ ID NO: 187182 - DNA, 4200 bp, Cannabis indica
ctctttctctttctctctctcaatcaacaacactgaagaataccctctactctactactcatcagtcatctcctctctcgctctatcttcaaggaaaaactttctctttctctgacttggtttgctttgaaactgaagagaaatactcttatcctgcgccacactttctgtacagtgtagagagggggctattttattttttttttttttgcagctttaaacagttcaatgagatcagaaatataaataaaaagtaatgctacaaatttttcttgtataatcttttcgatgaaatattttgtattttttattaaaaaaaatggaaaaaagcagagcaaaaccaggtgaacacgaaaaacagtacagtaagctcaaacagagacaagagagagaaatctccttttaagaaggaaaatatatgtaccaaagttcaaatattgtaggattggagaatccaaatgtaagaatgtcaaggtggcgcattttagcacgtggattacgaggatttgcagggttctttttcttgttattttggttgagcattgcaattatataatttaagtaattaacgattttaatattatttattaaattaaaataagtgtaatttcatattaaattatactaataataataataataatattcacccaccatttctctatttttttctccctatatcaaaagtaatttacaaaaaaacctcaagtcaaattattttgggtaaggttaaaattctaaaaaaaaatattgttgcaccaccggcacatcctttattttagtgttttgggggatatttgatttttatatatatatatatacggcatggttatttaaaataatttattaatttttttttcatgaatgtaatttgtaaatttttaaataatttgcaaattttttttaaaaaaaatattaattaatttagagtactgaaaattaaaataaaatttaaagactttttgcataaaaaataatcatgcccatattgaaatttaattttacattaaatcattcaaaattttccaaaaataatacatatagtcctagactcctagtcctcctaaatgtatctacaacaaatataattataaaggaaatataaataggtaaaaaagttttcttgatggggaactaatttttccaataatccccttaaattaaatatgtttttcttatgtaaaaaaaatgttaaatttgttgtatgttaggccatcaccaaccatagagataccgaatttagtgttgtacacaacaccaaatatatggtgttatagactctttcatttcaactacaacactaaggtgacgtttggttgagaaaaataaaaatataagaataggaatgagaattagaatatgaatatgaataaaaatggaatggaatggaatataatttaaaatacacaaaaaaaaaattgataaaaaaattaatattatattgaaatggtctttcctttttattccaaaatagaatacttattccaccaaaatgttgaatgagtattccattttgaaatgtcattctattctattccacttccaaccaaacgctacctaaaagttaaaacaaaacaaatattctttattattatattatattttttaaaaaaatatatataaaaaatagaatattttttgttattatattagtttatcaactatttacatttttgttatttaagacctttgtagatcaaaagggatattctcgtaaaccttcttatctctttcgggattgagtaaagttttttagtttaattttattcatgatcgtgtatgttgtagttatttaagaccaccaataaattttcaaaatattctgaacagtttacaatgtgaaaataatgttcaaactattcattaccatgtgtataagaaaaaaatagtcgcacatatttgaactttattttcagtattgtaaactattcagaattttttattaatttaaaagtgatcctaaataactacaatcacgatcttaaaaaaaaagataactaaaaaattctcatatatatcgatccggataaatggtctacctaaacatccatttaaggggtgtactatagatttatctaataataatatatatttaaatattaataaatataacgtaataatcacatatataatgaagtgatagtgtaaaattaggagtatatacaaattcatctaattcaattacaaccgaccgatctaatcccaaccaaccttttcttatcttaaaagtgtatcttcttgttcttttgttggaaaaaattgctgaattttaatctatattttactataaatatattatactatgtaattatagtggtgcaaaattttataatattataggactcattttacaattatttaatttgtcaataaataaataaatattatatgagatatgttagttaattttaatttaaaaataataattgattaccaaatttgttcttttattacacacaaaaatagaaattacttactatatttgcaactatacattaattctgttttagtaaaattaattgacttgaggggattgtgtgtgaattacggatttgagttcaggggtttaattattaacaagcctttttattatttattattttgataaacagttttttattattattattcgttattgttttcacctgctctatttagcaacaaacagtattattatttttgtgtttatttatttattttttttttaaaaaaaaaaagagtgagaaagaaagatataatagaagtactttctgtttgaccgatcgtcacgcgtgcggttcacgacaaaaacaaaactgggaacttcagctagaccagtgttgacacgtgtcatcaccatgtctgatcaatcgcggcgccgtttctactttttacacacacaaattgttgtggctcccacatttttttttttcttctcattcaccaaaaaatgtatatatatattaatttatataaatactaaataaaaataaaaattaaaatatacaatacaagagacaaactgaactgactgagctggttccggagcttcggatcttgggatcgtttttagtgctttccttatcttaataaccaaaatgtaaaactcaattcttcataccattttttttggtaagaattctttataccaaattaaatacatacaccttatggggaatcggtttctactcaaagggatatgtttctcttatctttttaatttcaccattcaaaccataataggaagccgagtgtgaacttctctaatcaaaagatgatagtgctagcttgcttttgttctgctttgcttcgagttttatatagcttccaatgcgttagggggaggtctttaaaattattttatttctttatttatttagtttgtttattgtagtttatttggtgttgtgtaccttatgtttttagtgacattagttttatattttttgggggatttattcctttctatgctttgtgagccttgaccttcttgctcttttgttgatcgatgtagttgaccaacatttaaaatcatctcctagtgagattgtgcagttctttatccaccaaacatatagggctttaatcatagtagtcacccctcattatgtttaagcatactccccaactactactagtctccaactatatattattttcattgtattaaaaaaaattataactgtttgggtacatttttactttggcttatagttaaaaagtataaactaaataaaaattttaacttaattgtaagtaaattataaattattttaattttagaaatagtttctaacaagttctttagcatatttcaaaataacttttaaattaaaaataatttcttatttttcatacaaacaccatatttttaatcctaaaaacttacaaagaaataatacaattaagcaaaataaggtaagaacacaaatgagctatattagttcattagcaataatttgtctacgttcacttttgtttgaattgtgattcggacttatgaatatctagatcgcctatttataagagaataatgacaaaaaaaaaattgtaacggaatgaactaaaaatataataaattttaaaactatttattttggtttaaatgacactaattaaaagaaagaatatactaaaaatctaattaattctgaaaaattaagagaaaggagattaatatagaataacatgtagtgggtcacgtagcagattgagtgcttt

SEQ ID NO: 187183 - DNA, 3320 bp, Cannabis indica
atcgaattttgctgattttacagtattattgtctttaatcacattagtaagtttatttaaattattaattaaatataacaattgtggtaattttgttaattaatatgatattatttttttaatttattaaaaaattaatataataataaagaatatttttttagtgtaatttttggtgttgtggttggagtagaaataatttttgacactaaatttggtgatagtgtaacactaaatttggtgtctctttggagatgctctaaacactaaaataggatttcataaagcaacaatgattgtaaaaatgactttaccaaaagtgcttgaacaagaatcaagtggcaaaattgtgtgtatttttctattttcaaagtgtctccagactaatcaaacaacaaaaacatcgtaccatcttattgtggtgactcaaaatatgtacataaattaaaacaaataataagaaaaaaaaacatctaggggtggtggcagtagtgtagtagtacaagctttctgatatgctttttttaacttgtgagctttctattaggtttgtcaatgaaattgctgaccacccactgttggcccataatatctgtttcaattaaggtccaaaagagacaatttattattattattattattgaagaaaagaaaagaatagaaaaagaaaagaatatgaacttacataatgcagtgttgaaagaagcaaacgaatgtctttttcttttccagatgaccataaccttatattctcatcttagtaatctcatctccatctgtgactgatttaatagaaaagtagacaaaaataaaagggtcaattttttctataatacataaagcaaaaaggttttttttttatcaaaatttctttatagcaataatctatatacctctgaagattgaactattccatgtttgttatccattagttcttggggaaatgtccttgtattaggcattgctgcattaagtcaaaacataaattaataagtgttaacttgattaatgaaattgggcccaaaagtaatgtagtaatctcatctctataagctgctctataacatatcaacaccagcaagttatggtttaagggagaattttcatgtagagtgagaggatcaccttcttcaaccaatttggcagactctttatcctcttccttgagacttgtgttgagttctttttcactattcgtatatgtttgtaacctctctttagcccaagcaatggcatcatcaatagcaacagcattttcagatgatgtcctttctctataatctgaaccaatttcaatcacataagaactattaacttcatcatcatcatcatactcatactcatcctcatgatcttcatctcttaattcatcttgatcaacttgatcaatagtcccatgcgtttctgatttagtttgattgatcgtactaccatcatgacataaagaagagactgcagaagaggctggagagttgagctgttcgtcaaaatcgtctagagagattttgacactaacagtttcaggggaagagacccttctggagaacccaaaatattgagaagaagatgacttattattattatttactaaagtagtactattccaattgtggatggtgttttggtcaatatcagtctccatgaattggggttgttcaacacaggaattattatcattaggactacggctggcgccatagaagaaacttggaataatattactgttgattcttcctaactgtttcttcaataaactttcctctgcttgcattaatgtggttgagcttcttctgcatggaacattgattggcctgtgtaaatatatataatatttagtctaaataattgaatatatatgcaagacacataattggaaaaatactaaataaaattttagattttttttttcatatcctcactatagtggcttcaataataataataataagacaaagctatttcatttaattataagaattgtgacataaacaacatgggttgtcccctaattgtcattttcaaccttacataaatttatgttaattgaaatatatacacttttaatattacccattattattcttaaatttggttaaaataacagtgaccttaatttttaattaaattaattatagttagatattaatcctccttgtccatttcactcaatatttatatataatattatttccaccaaacatggttcatgatttcaatttactagacttaagtacaaaacacataacatcatgatatgctagaaaatttccacaaatataacctaatttatataatatattagatatgtgtataagacaaacgaacagtgaattagctttctcaaaaggttaaatatggctcttcaactcttcacaatcataaacagtaataatatcaagaaaaaaataaactcttcacaatcaacaacagtaatattccttacctaaaaaaaacagtaaaattaccttaaaaaagttgaagacaaaattcatcttcccaatttttctctactaaatattcatcattgcaggcaaggcatgcttctattttcaaaattactattctacccctgccagtttactaccatgtaagggtataaatgtaaaatcaaaccaattttgattcatcttcactgtcactatctatactgtacagtacctgagcttggaagcaaaatccgacaacgccacgtgttcgccgaccaccggactcatttcctccgagctaagcacagaagaagaagccgacttcgatttcgatttcgccttcgaattcggcctcgacctttccctcgacatacgttctccaccgccgtcatcacgacgatcagatccaaaaacatcgccgtagaatccaagatcgtttccaccgggaatcctgaacgccggaaatccccgtctaccggagttaaaactctcctgcggcctgaaaatctcatcgtaaaatgaattcgaagtggcaccagcgaaatcagctgaaactttcctccagtaaacacttcgaggcggacctccaaactacgtcggagaagtcttcgggatcgagagtatctgtggaatcggcgaagacagcagcttgctctgtggatcgccgccgcgagtggtggctctccgacatcggcattcgccaagattcgtccatatatatgtatgtatgtatatatatatatatgtttgtatatatatatatatgaatatgagtgagtgagaagagtagtgaagaagaagaagaagaaagagaagaagttttaatgagaaagaagaagaaataaataaagcatgagtcttctttttatacttgtttttttttaactcaaaaag

SEQ ID NO: 187184 - DNA, 1971 bp, Cannabis indica
tggggtagtaaatataatcgacccctaagtaaattgccattgccaccataatctttaattggtcgacgttatgaatttttaatttgtttttttttaaataatttatatataccaataagaaaattataggtggatgatgacttgacatttaacggtcaggtacttacaaaaatctataaatttaacttaagtattattaccgccaaaaattaaacttagatatttatttgcaactatgcgttaaacttagatatttatgctgtaaattactcttattttttctctgattgacaaaagatttttctcattttcttaaaaaaaatacaccactaactgataacttcaaaagattttttttttcctttttctataaaaaaccaaacttcattcaaaactggaacaaactaaacttaaaattcaaggctcccaacgaatggggcaacatcaaaaccaaaaaaggattggcagaagtcttgggacacagcccactttgccaaattgtgagtagaaatattaaacttcttaagaatccatcaaacatcaacaacattaacaaagttaaatctccctaacatctgctcaaacatcaaaaaaagcctctaggaggggcactttccgtcttcaattgacttgcataagacttggtagtcggtgaaaatacagacctccaaccaattagttttgcaactgagatctaaagttaagatcaatccatgaagctcagcttccaagggagaagaaactgaagctttttttgacttagctttaacaaggttgccttttgcattatgaactagggctacaacaaatacagtctatccacgaatcgctggatcaatgaaggtcatggtggaacatcttagaaacaacgttggtttcaggggttctttggcaggttaagaggaaacactactattggcttccctccagtcttggacctcggtgagaaccctataaaagatagcttaaggggattcaattgacccatcatggaaagctttgttttgagccttccaaagggcagaacatagagtgacagccacgtgagtaaaaagaaatttatcattatcattcacctgtccaagaagggcgtcagaagccagtccactaactctttcaaattagagaaagttaaagtgtcgtatccaataccccattgagtagaaaaccaacatttgcacacaatatgacatttaagtaacagatggtctagagagtcttcatcacagtcacatctctagtttgtattcaaaatcgagtttaatctctgacttcgagggaggatatctcgaggcaacttctaaaggaagagttttgacctttcatggagtggggttttccaaatatgaatccagagactatcacgagtttcccccctacgcttgatcaacaaagtataagccattttatcaggaaattctttgtttcttgattctttccaaataaattagtcttccctctcaaagaggaccaaaccttaagaagtttgagatttcttctctagcattctctaaagtgttgtgggagaaaagcaaagctgatttcatgatattaatcacttggcttggccaagagcaataagtatccaaacaagctttctccttggacacttcaaccatctccgctttactgaagagaaaggtatcgttaccatacatcaattgcaaaatggggggcatttggaattatagaaaaacccatggatattcccattagattcctcatcgaggatgaatctcaagaggatttcactacaaatgatgaataagtatggtgagagggggtctccctggcggatcccacaagatgggtgaaactatctgagtgtgcctctattaaggaggatagagaagctaatagatgagatagacttgtaaataagattacggaatctatctccataaccaaaagcaagtagagctttatccaggttcttccaatcaaggtggttgtgaagaccgcttagtttaa

SEQ ID NO: 187185 - DNA, 1286 bp, Cannabis indica
aaacgaccaggatttattgttattcagatacagatgagaataaaatagaagtgaacagcagaaagaaaagaaaaaagttgtaagaaagaataattaccaagaccattcccatcaacatagcagttaatccgaccataaccactctgtcactccattttgtccatgtccaggctcctgcacaagttccggtgatgagtccacccaacaatgttcccattagtagaacagcaccggaacaatcatacgcaataagtgcttccacaccagttgactggaacaattcccaggcatccctagctgaatgattaaagctcttgccataaacagctatctgaaatacaaggttaccaaaaaataatttaaaattaagagatagctattactctggagcacctcaatttgtataggaaacaaattatgaagaatacatgagaaactcttggtagaattagccagattggttcagaaccaataatatttccatttttccacaaagcagagttatcatctgcaacaatattattagtccagataataggattatatgtctgtcaagtctcaagtttcacagatttttttattcttgtcctagctactccaacatgcccatactaagtaaactaatgaacattttcatgttgtttgttctcatgtagtataaacatgataatcatttaattgtgtttcatactgtttcaccaagtcagtaagttgcctccctgaattgcataaatcaaaatgctgatcattgttgtttgcttgtcaatactctagcaaaagcaaatttgatctatcattaaacttaaattaaagttgttttcataagaccatcatgtatcaaataataaccccaatacaaaccatttggaattcaagaaaatataacaattactgtgtaggtattcaggagggaatcgaaccagagcttgtggaacagtggaagcaaaccatttgtctaccgagtacaatttaacaatttatttagagcactaaatcatattaatgataagttacaagcaatgcaaaccaattgtccaaataattcatcattcacaatgaaaatctgtatatatcatcctgttattagttgtatgtcaattaaactcataaaaatagataaaatgtgttcacttaaataaagaaataaatgacagattactcagcagaaaagtactaaactacctgtacataagcatacttgttgaaaaaacgaactagagtctctacaagatgaaaaaggaaatcaacacagcaaagcagacattcattgtttccaatctttgaac

SEQ ID NO: 187186 - DNA, 6098 bp, Cannabis indica
attttgctagagaatgcaggggctgtgtttcggaccagtgagaggtatgtttgaatttgtaatgctgccatgagtactcttaatttggcctgttgtattcgatttatcatcattattacttatcagcttttctagtttttgttgtttgtgaagtctgctacatgtacttattagtttctgtaatacgaggtatcgtatttgttaatgcgggtgagacgatgatgaagaaatgcagttacgtctgtagagtgtagagtcttcaagagttttcaatttcgttttttacggttaaaaacgtatgtagtgctcaaaatctatatcggaggttgaatgtgtatatgaacgaactatgtttgttagtgtcctgtcgttgattttttgcatatctattgctggaatttggaaatgtttgttcttaggatgttaatgttttatgttagtttaacttttgatcaggaggggaaaaccttttctatgatttttgaacttcagctccttagattttggaagaaacgccaatcattttttttttaaattattattttaaatgtcctagactaataactcttcagaaagagctctcctagactcctagctcttaagaaagcactttaccccccctttcccaagtatggttttgaattgctcctttaatgagtaaagtactccctaatgctctggaacatatgtcaattattgatagtggtttatctttcctgaagcctgcccgttaacatattctgtttattatgatgtgaaacaggtttttaggtgcaattaagcaatacttgtgtctctcactgttgaagaacagcgcttcaactcttatgatagtttttcagttatcatgctctatctttatcagtcttgtgtcaagatttagagctggattgaaagccgaaattggagtgttcttccctatgattgttctcagagttctggaaaatgttgcacaacctaattttcagcagaagatgatagtgctccgatttcttgagaagctctgttttgattcacaaattttggtagacatatttatcaattatgattgtgatgtcaattcatcgaacatatttgagaggtatgttatgtcatgcttgttatatcacatggtctttgacatacaatgattcaaagtctggctatcttgcagttgtaacaataccaaatttgatctccctttgttattttctgttccattgctttgtgatgtacttgctggaatattatctaattttaagtacctgtttttgttgtttgaatcttgccaggatggttaatggacttcttaaaactgcacaaggtgtccctcctggtggagtcaccacgttattgcctcctcaggatgcaactatgaagcttgaagccatgaagtgcttggtagctgttttgaagtctatgggagattggatgaacaaacagttgcgtattccagatcctcattctaccaagaaaattgagtacgctgaaaatagtactgaactggggagtcctccccttgcgaatggaaatggtgacgagcccgttgaaggatcagattctcattctgaagcatccagtgagacctctgatgctttgacaattgagcaacgtcgggcatacaagctggaacttcaggtaagcatacttatattgtagagaattcatttcttttttattttattgtttggttattgtgccaggaaccttatgtaagtcttgtggcaggaaggtatatctctttttaaccggaaacctaagaaagggattgagttccttattaatgcaaataaggtggggaattcaccagaggagattgcagcttttcttaaaaatgcttctgatttgaacaagactttgattggtgactaccttggtgaaagagaagagttgtcgttaaaagtgatgcatgcgtatgtggattcctttgattttcaaggaatggagtttgatgaggcaatcaggacctttcttcaaggctttaggctgcctggtgaggcacagaagattgatcgtatcatggaaaagtttgctgagcggtattgtaagtgtaatccaaaggtttttacaagtgctgacacggcctatgtccttgcttactctgtaataatgctcaacacagatgctcataatcctatggtaaagaacaaggtgagttcacaagtaccattttcattaatcagatatcaagacagaatgctaacacttctgatattgtttatttatgtttttctttatgtgtgactataacaatacagatgtcagcagatgattttataagaaacaatcgtggcattgatgatgggaaggatttacctgaggagtacctgaggtcattatttgatagaatttcaagaaatgagataaaaatgaaaggagatgatttggctccccaacagatacaatcagttaatccaaatagacttttgggattggattctattttgaatattgtgatccgtaagcgggatgacaagcatatggagacaagtgatgatctctacaggcacatgcaagagcaattcaaagaaaaggcacgcaaatctgagtaagaatttaactgatttagcttattatctttgtttttctttttttttttgcaagctaaagcaggtgcaaataaagcaatattttaatggcatttaattttatatttatggaattgcaggtcagtttattatgctgcaacagacgtggtgattctgagattcatgactgaggtctgctgggctcctatgcttgctgccttcagtgttccacttgaccaaagtgatgatgaagtaataatagctctatgtctagaaggctttcgttatgctattcatgtaaccgctgttatgtccatgaagacccatagagatgccttcgtcacatctctagcgaagtttacttctctccactcccctgcggatatcaagcagaaaaacattgatgcaattaaggtcagtatttcctatgtagaagctgtcacaggatgcaactaaacattatgtcattaatttactactggatttttaatcaacttaaaaatttaatttcataaatctaacgaattttgttattttgttcttagtcaatagtgacaatagcagatgaggatgggaactacttacaggaagcttgggagcatattttgacttgtgtctccaggtttgaacatctacatctattgggagaaggtgctcctccagatgccacgttttttgcatttcaacagaatgagtcagataaatcaaaacaaactaagtcaaccatccttcctgttttaaagaaaaaggggcctgggcggatgcagtatgcagctgctactgtgatgagaggttcttatgatagtgctggcattggcagcaatgcttctgtcacttctgaacagatgacgagtttagtttctaacttgaacatgttggaacaagttggaagctctgaaatgaatcggatttacacacggagtcaaaagttgaacagtgaggcgattgttgactttgtcaaagctctctgcaaggtctccatggaagagttgcggtctgcttccgatcctcgggtttttagccttacaaagattgtcgagattgcgtatgtaacatctacttgagcttactttgcatactttcagtttatttgtaatgtatgcagcttttgttaacaaagtatactttgacttgatctttttcttatcccaggcactataatatgaaccgtatcaggcttgtgtggtctagtatctggcatgtgctctctgatttctttgtaacgattgggtgctctgaaaacctttctattgcaatctttgcaatggattcattgcgccagctatcaatgaaattcttagatagagaagagttggccaattataatttccagaatgaattcatgaagccttttgtaattgtaatgcgcaaaagtagtgcggttgagataagagaattaatcatcagatgtgtttcacaaatggttctgtctcgtgtcaataatgtcaaatctggatggaagagcatgtttatggtaatgaaactgtaaatttgtttgctctcatatatctctgctatatggttccttaattatatccgtatatatatttatatacagttcgcaggctgttaatactttttatcattattaactgcaggtattcacaactgctgcttatgatgatcacaaaaacattgtactcttagcctttgaaataactgagaaaattatcagagattacttcccatatattactgagactgaaacaaccacctttacagattgtgtgaattgtctcgttgcattcacaaatagtagatttaacaaagacattagcctcaatgctatttcttttcttcagttctgtgcaacaaaactggctcagggagatcttgggtcttgtgcaaggaacaatgtcaaagatggctctttactaaattctccacattcacctcaagctggtaaagatggaaaagaagataacagggaaataaatgataaggatgacaatctctatttctggtttcctttattggctggtaagagttctcattatattggtagcatcagtatttgcttttgctatatatgttcagtgtcgttgtttaccttgtttgaattccttgcaggtttgtcagaacttagttttgaccctaggcccgaaatcagaaagagtgccttgcaagtgctttttgaaactttacgcaatcacggtcacctgttctccctaccattgtgggaacgtgtgttcgaatctgttcttttcccaatatttgactatgttcggcatgctattgatccttctggtgagaactcaccagatggagaggatggtgatactggtgagcttgatcaagatgcctggctctacgagacatgcacattggctctccaattggtggtagatctttttgtgaaattttatagcacggtcaatccacttctgaagaaagttttgacgcttttagtaagctttattaagcgtcctcaccaaagccttgctggtattggcattgctgcctttgttcggttgatgagcaatgcgggtgttctattttctgatgagaagtggctagaagttgttttatcattgaaagatgctgcaaattcaacactacctgatttctctttcataagtggtgaggatgccattgttagaaacatcgaagtatcttccagcagggagaataatggagaggctgctgtgtctggtattcctgacgaagattcagagagatctaggacccaacatctttatgcttgtatatctgacgttaagtgcagggctgctgttcagcttttattgattcaggtagagtttgcttcctgttcttcaaatgcatttcataattaaaatttgttataacattgacttcatcaggattttaatgctctgatggattagatcttggtggatttctgtgtaggctatgttatgtattgttgacatcctgatcattggcttttttttgctgttaaatcttgcaggcggtaatggagatttataacatgtatcgatctcacttctcagcaaaaaacatcttagttctctttagtgcattgcaagatgtagcatcacatgctcacaagataaacagcaacaccacactgcgttcaaagctacaagagtttggctccatgacccaaatgcaagaccctccacttttacggctagaaaatgagtcttatcagatgtgcctcacattgctacaaaatctcattgaggacaaatctccaagttatgaggagtctgaggtagagtcccaccttgttggtctctgccaggaggttttacagttctacatcgaaagctcacagtttggtcagatatcagaatcatctgctagtggccagccccattggaagattccgttaggttctgggagacgcagagaattggcagcacgagcgcctcttatagtggcaactcttcatgcaatatgtggtttgggagagacttcatttgaaaacaacttggctcatttctttccgctactttcaaacttaataagctgcgaacatggatcaaatgaggtgcaagctgccctcagcgacatgctcagttcatcagtgggtcctattttgcttcggtcatgttgattttggtgaggttggatcgacccaaatgttgaggtgtatgatattttttt

SEQ ID NO: 187187 - DNA, 1161 bp, Cannabis indica
tttttaaaaaaaaaattaatgaattctcattaaatggcatatgtcaaaataagagcaaaagctcaaatacatgaaggagtaccaaaccatagaatctaaagaaaaagataaaattagcatgcatgttagaatgagtgaagctaataacattagattagagcataatagaaatacaatccaaaatgatattaccaaacttaaacagaaaaggagtcttgcttgaaagacccaccacaacccgattgcaatctgattcgacatccacatctttatagcctaggcgagcatagagaagtaaaccatataaaatagcaagagcctcaaccacatccaaccttcaattctctggttgaggcaagacaatgaccagaagcatcatgaataactatcccacactcaattttatgattgattttctaaaatttattatgacaatttagtttcatgtgacccaaacctggaagcaagcactgaatcatcgcagaacccacccacccctccctcaatggatcgagaaacatctccaagaatcttattcacctcactgtattattgatagaattccaaagcccatctaagaacccattcacccttgagaatcctatgtgcatggacaaacttgttcgattgaaatcgaattcgccaaaccaacaccaacaatctttcaatatcaacttgacacatcatagaagtgttaggaagacttatatagtatcaaattatttttcatgtaaataattttttaaaaatttaattattccctataacatgttatctaaaatctttgaattatatatgagtaacagaatacttttagtggttatttcatagaggaatatgacttcttccattcagtgatctaactcttgttcattttggtcacaatgtattatgaatcattgaatttggatctccataggactcagaacaaagcaccaatttcatcgtaatcttccatagtgatctgggtgttaatattgcccacacattactagaaagaaagattttgaaaacacatcactagtaatgaatgttgaaaattatctatagtcatgataacctcgtaatgtgttttcactatggtggaaatcattctgggggatgaaaattccaagaaaaatcttacattttgcgtagagggttatcatgaaattctaccta

SEQ ID NO: 187188 - DNA, 1968 bp, Cannabis indica
gcagaaaagataaaactgcaaaattgcaaaaagtgaggcccaaatccacttgtatagggccggccacttttgtagggaatttaaactgatattttcattattttaatgccaaataattcaaacctaaccctagtggaatgctataaatagatagtgaaggcttcaggaaatttacacttaaattttctatttttccttcagagaaaaacctgagcctttctctctccctatctttagccgccacttcttctttctcttccctcttgaatttcgaaattcttagtgtaagagtagtgcccacacacagcaagtgatacctcaatcatagtgaggaagatcgtgaagaaagactttcagcaagaaggagtttcagcactaaagaatcagagaaagagatccaggttcagatattgataatgctctgctacagaaaggaatcaagggctagatatctgaacggaaggagtcatattattccgctgcacccaatgtaaggtttcctaaactttatatgtgtttatttcatcgttttagaaagttcatatttagggtgttaatcaacatacttgtgagtagatctaagatcctggtaaaataatttccaacaattttaacctgtatcggtttcctttaaaaaaaaaaaaaaataagccgtcaacggttaagcacaaaagaagtatgaagtatattagacgtccaaactaaaagaatatctgatagaattcacttatcattgactatcagctaatgatcttataagaaaatttaggacataacagtcccattgttcaatataaaataaatgaaaataagcaaacgactaaccatagcaataacaattgtaacacacaattgcatcataatccatggggccaatagaaacatgagaatctccttgatctgaatctgaacatggacaaagaaagttatgctattaacataaacatactttgagtcaatagagatttcatcatgaatgaaaaaaggtctactatgataacaatagtaaggtggtgtatgaacaccattattgaaattaaaaaagaacaaaataaattaaacataaataatgacataatgaaaaacacagatgcctatcgaaggtgtattctccccacgggtcctccatggacacagtctcaccaccttacagatcaccccgctcaaccacgtagagcccacaccgacaaccactacaaccccagattcgaacaacgagccaccaaaaccccaatggatttgaactagcccgataggcctaaaaaccaccctcatctcatggctaggcaaccccagatcttgcaccatagctcgacaaccaaaggaccacgaatcccaggcgaccaccagatcgaccgccacaccaactttcctcaacgactttgccaccctacacccaaaaagaagaacactatcaaaaaaactatgacacctaaatcaaaattcgaccagagcaacgcctaaggccagaggaagccggcaagccctggtcggactggaagaagacaacgaccacaaagggctaagagagaaaccctagcagcaaaagggatttgaaattcaacataagttttttttttttatatatatgtaatccaattatcaaaacactattatagaattaagacttggtagttatgagtgaaatataaatctcacaaattatttccacataaataatatgagacaatacacactagtttcttctctctttttttttttatagaatttatttacacgcataacattaatcttccataatgttcaccatcttaaactttcttcatagcaatattttttatttttttgaacaatattcttatgattatgcatttcttgtatgtcacgtgttataaactttagggttgctttctatattttgatgattaaatgcatatgtatacattgagaaaaactggttaagcatgatccaatataagaacttacatcatggtcatcatgtatcat

SEQ ID NO: 187189 - DNA, 2205 bp, Cannabis indica
aaaataaaaaaaaataaaaactactctttctctcttccccaaacaaataataataaataaataaataaaataaaataaaaatcttgtgtatttcttcttccctaactctcccgattcgttttcttcttcttgttctgggtaacccagatttcaaactacgatttccgaaaatccattcaacaatcagatccaaattcaaggtcaaatccaataacccctacaatattccaatttcctcaatttcgattatgtatcatttttcaatggctgtgctttttctttaatgcatgaagatgagattaacaatccattgaatttctttcttcttctctctacagggttgctttctctaccttcaaagtgtgtaaatttgtgttctttttgtgtaggggggagattgaagtttagacatggcggtctctgaggaaaacagtgctttgttcccaatatttattttaacaatcatggctttgcctttggtgccttatacgataatgaagttgtgtagtgctgcctctaagaaagctaaaactatccattgtcaatgttctgaatgctctcattcaggcaagtaccgcaagtccatatttaagaaggtgatgagattgagatttggttcttatttgaatttgtgtaattatatgataaattcagttgtttttgattcgtaagttatattttgttctgaatatgtatggtttgttttgatttcatatttgcagatctcaaatttctcaacttggagtaacttgactctgctcctgctttggattgttatgattatgttgatttattatatcaaaaatatgagcagtgaggtaagatatttttagctgaattttaacaagttgtttaaagtagtcatagttcttgttgttgaaattcataatagtttagaaatagttgatttttcagcttcattattggtgaaatttgtgctcattttgtagtagtttgaatgttaaatgatgatatgagcagtgaggtggatatttttagctgaatttgaacaagtagtttaaagtagtcatggttcttgtcattgaaattcataatagtttggaaatagttgaattttcagcttgataatagtcgaaatttgtggcattttgcagtagttttgattgttaaatgatcatatttacatgctttgtgaagcttttttttttgtgaaaacttacaatgagattttataatagtcacaattcttgttgttgaaattcataatagtttagaaatagttgaattttcagcttgataatagtcgaaatttgtggcattttgcagtagttttgattgttaaatgatcatatttacttgctttgcgaagcttattttgtgaaaccttacaatgagattttataatagtcacaattcttgttgtcgaaattcataatagtttaggaatagttaaattttcatctcgataattgttgcaatttgtgctcattttgcaatactttgaatgttaaatgatcatatttacttgctatgtgaatatttttgttgaaaccttataatgagcttataatgatttttgtatcagattcaagtttttgagccattcagtattcttggattggaacctggggttacagattcagaaataaagaaggcatataggagactctctattcaataccatcctgataaaaatccagatccaggttgaaggtttttttttttagtttttgcagcttctatctgtggcctttatcgataatatgcgttttctaatgctcttccattgtttttaatattgtagaggctcacaaatattttgtggagtacatatccaaagcttatcaggctctaactgatccaacgtctcgcgaaaactatgaaaaatatggccatccagatggcagacaggtaatgtacaatgctcggaatgagtaggaagtagctccatacatgttttcttatgtagtgggaaattccgtaaactatattggccactcgtgttgtgtaagctatggttgttttatttttcgtacagggttttcaaatgggcatagctctcccacaattcctgctagacatagatggatcttctggtggaatacttttactctggatcgttggtctttgtattctcttgcctttggtggtagcagttgtgtatctttcacaatcgtcaaaatatactggcaattacgtgatgcatcatacattatctacttattattacttcatgaaaccttc

SEQ ID NO: 187190 - DNA, 1840 bp, Cannabis indica
attatgtactcttgcctacaatggtagaaaatctattgaaactaccaagtaataaaatttgaaacatagtagttctgaggcaaaacatttgaaacattacaagataggccatgcatcatgattcatgatgaggggcagttacgattgtaattctgatgtaaaaacaggatacttaggtatatgatcttctataacttctaggatctttttcttagttctagatccctcacctataactacttatgttgaaaacttattataccatataataagtaaattgttaatactacaatgaattatttaaccatctcaagcataacttatcttgaaaatttgaacagggtcgaaaaggtaaaacacggattcggcatgaagcctccgaaagtagctgtttcatcaacttgacaggaccataagctagaagagtaaattctcagttcttcccagcatcatatacatcattggatatatagaatatgccttatttgcgtgcaagcttagccccaaaattgtgaagtttttgcctgtgattaatttaattcagaattctctgactcttgcattgcaaatcctaagtgatgggatgccatgttttgcaattatacatgtcaaccattgttgttttaaatcatttctttctggttttagtttgagttagttttcttctataggtggtttggtttgtatctcttttattttttcaaatgtattattcaggtttaatgaggtaattcagtatccttaactcttaattgtatatggattatttagtaagggaaataggaaaatgatgtggattttgcgttggtgcttttacaatcataattcactgtctttggttttttggctaatggttcttcttcttattgggaataattgtcctaccatggtggttaagcagggcattaaccagacctatgattggtctagtactgccacattcccaacccgatggaggggccctgggtctgagcacagtgatactctctggttaggatagtattagtcagtcccagaatcatttcatgggcctactgtaagaaccttgtgtggtctcttgtttgggctcagccttctgctatggtagggcccagagaccagtcatatgttattgacatattatagtagacaaattataattccatattataaataaataaataaaatgccatttgatatttgagactatagatacaaattctctagtggcataatatcaaattctaaatatatatgaataataatcccatttgtgttaatcaaaaaaataattccattcgattttgtgtgccatgtaacgacatgaaatttaatatgaataatttataatatggtttcatcattctttgaccagtgctgtctctggatagcctaaattttagtgcaaaggtttttatattttattaagcaaaagtgcatattttattcttaaaataataaaacataaatgtaacgtacgagttcgacaaacaagaaaacaagattatggtatgggtacttgttacttgttagtgattattttgttaagtgtaaatttcagaagacaaacataacatgccttgccttcatcattattaaaatctcattttcattattaagcacaagagttgttatcatttgcacacatggcatctctttatccacatataatgtcttattttctcattatttttaacaataaaacaaataaacaaccccaacaaaaaaaaaaaattgtacacgtttgtccaaacattattattataaacaattttattttaattttttttcgtgtgtaagggatattgcctattggtttttcattctttcagctttattgattttgactcattaccctata

SEQ ID NO: 187191 - DNA, 4864 bp, Cannabis indica
aaaaaaaaatgaaatttctctttactttttctttatctttccaatttggtttggccttttctttcgtccagaacgcccaaaactccgattgagcttgctattgattttatcttacatgactttgagatggcaggtcagtttttcagttttaattttaatgaagtcaataatgaattaagagaaaatgggaaaattcatgattttttttaaatgcagaagtcgaacccatatctacttatgtggattttggagaaagagaatttttagttgcggatgaaagaggttatgaacatttgctatataaaatggctgaagattttcttttctcatctggggggaatattttggatagtcgtcttaaactcaataaggtatattaatattttactaattttgctcatcatttttgcgtgtttgtgttcatatatttttatatatttttatgatttatatatttttggaaaattaataaaaatgatttggttcctttcattgttttcttacttttaatcatccaatcataacatatgaaaacaaaggacgtagataaagaaatagaatagaggagaaatcctatttctgtttctattagcacgtactgtttgatttttcattttttgtttttgtatgttgagttgagattgattgacccacttttggagtttaaagataatgacgttttcagaagcattttcctttctttttcttttcattttctttggtgtccttaatcgttattattataataataatggggaaacaacaactttacttgggtcaactcacttttgttgtttttaatatttttttaattattattattattagcctacaggagctggtttctttcgcatatgctcgagtagataagttctttctttcattcatgatcatatattcattatttaagagtggttataatgggtaatataatatagtttgccaacttttatggtctttgtatcacgggcaattaacagcttttctgttggttttttcttaatttcaaaatttaatatcattttcttgaatatttaaataatactgacaaatctgatgatccgtattagaatacaaaagatgaaacgtctatggtacgattttgcagtaaaaaattaagagacattttgtaggagtagtttaggagagatctcaaaatttgagtcagattttttgagtatactgccaaaattaaaatattgagttacctctctttgaaggcaatctttttgtaaacttctgttctgttaacattttccttattttttgctgaacatgtacatcttctcttcttctgttctgtaaccaaaatttgactttgaaacattcaaccaagctccaagtgttggtgctttttacctttagtttcattaattaagtactccactcggagtcaattgtacacaggaaagctaagaaatagcactttttgagtccataccccacgaagagctataccttgacctaccaacaatatctttgatttcaatcatggaaccatggaatggaatggaaagcaatattatcctttccgccatcttttttattttattttattttgaggtgactcaaagccttttacctttcattaattagtaggccccagaggtcccaatttgcattattctgacttgagaacgttagccgttgaggtgagatgtcatatcaaagctcaaataagaacacgaaagtatggagtcttgtcaattttctccattaaatgtgctgtgtatttatgttatttccgaattgctcacaaaatcagtatccaatggatatacctttttttatttattattattctaaataaccacgatgcaattcatcgtgattttgatttcccaaaaattgttttggcgtaattggatatgttcatctgaattctgagccatcttttactcctcaatatttcttttttttttttacttttcagaatcttttagataatattagtacagttgattagtacatttattaactatgtttgccatgcataatttggggcaggttgtacgggaattacggcactcgagaaacggcgttactgtgacaacagaagatggttccgtctacgatgccaactacgtaattttgtctgttagcattggcgttctccaaagtgatctcatttcattcagtccacccttgcccgtacgtctttatattcccttatttaattcctttctgttttaaaataatttttaagagtcaattccaagacacattgatgagcttctcgttaataggatgtgacactacacatttatttttcttagatttgtgtatctctcatccttccctatttacaaccatatttatttgcttttatttggagaatctttaccgctcaatatgctcataagtttcactatggttctgtccaacatggtggaaattcaaatgctgtatgggtccctctaggtgggagttccaatctcaacttgttccccttgtatatattatatgtaagaatggcccacaacgtttaatgtgttaagttaaattagtcagaatctatagatatgagctagctagctatagctagctcttcacacccaactgggttatgctggcagctgacgtgaggggaagatttccaaggtgtttgcattatgcaaatcctgtggatggctgaatctatgcaatcaaattgtaatttgcaacccacaggattaccaagggatggcccattaggctatttatttgtattttataatatagacaacatgaaattaaaaagaaatcatctagctgatttgttggctggtgaccatgcagcctctctcttttataaattttatatttttactttttttgggcacttggccgtgaaatatttgtttatgtcatattttcaaatcataatgataacataatttataactgtaaacagagatggaaaacagaggctatacaacaatgtgatgtcatagtgtacactaagatatttctcaagtttcctgataaattctggccatgtggacccgggaaggagtttttcatctatgcccatgaacggagaggctactacactttttggcaggttggtttagtttttactcttcccatgcaatctatatatatttctaattttgctacatatgatataatataagctatatgttttttgtggtagttggtttggttctgattccattcttaatttatcacttgctatgtagtagtttatatttgattggtgcacgacaacgaatcacccatcagtgtttttatgtgtgtgattacgtgtccacattcatgcacctaattgcaaaagattcaaatataaagttgttaaaatagaatagtattttttacttaaagatgacttactttataagtttgcatgtacatgcattagaacaatttcatgtattcttaacaatactgtatagatatataaagtattattgtgaagagctttggttttgattgacacatacacagttgtggttgtcatcgcttgtggccaaaatgtccaattatgtaacaaacgctcaacattttttccccttgagcggcattgtgtttggattatgattgagacccttgtcccatatgtgtccaattatgctatcaactgccttggattgcaaattgtaatttagatattttttttttatttttcctttctcatgtaaaatacttttttacatttttagtctctattatggttcttatctttgatagcgtaattgatgtttttgtcgctctcgtagagctggccatttttgttgtactatgaaccaatctctgtctaagctgttcctcaacttgtttttaaaaacaaaaataattaaaaaaaaaaaaacttatttaactttctttcctcgaatcctttttttaattaatttgaaaaggacgtcaaatcttttaaaattggtcaatttgtttgtatttataaagaattgatatattataatgagcacacgtggcctgttgcggagacagtgtgggatctcctttgtctcattcatttccaatgttatttagtttatcaatatggattctatatctataatcaatttttataccaaatttaatatctgtatctttctatatatatatatttatttatatatcagattgaatgattgataagcataccatctttttaatatggtttccttccaactactcgccgtcttttaagccatgctggctcctaatcttgtacgttaatgtgatgtgtcattagcacatggagaatgcttatcctggctcaaatattcttgttgtaacgttgacaaatgaggaatcaaagcgtgtggaatctcaatctgatgaagaaacattgaaagaagccatggaagttcttagagatatgtttggccccaatattcctgatgctactaatatcttgttcctcgctggtggtagcaaccgttttcagcgtggcagctatagtaactaccctctcatcactaatgaccaagatttccgtgacattaaggtatcacttttcaccccacatttgcttacaataaatgtcccctgaattcgaaattttaaaagaaatggtttttttctttggttaggctccagtgggacgcattatttttcagtcggcgaacacacaagcgagagatttagcggctatgtacacggcggattccttgcaggtatgaaaaatttgttcttttttaaacttaactctaaaaatggattagtttttaaattagtcttatatatatgtaaaagaagatgttgtttgtgtagtgtatatatataggtattgatactggtaaagctatactagaagatattggtaaaaacaaggaaaaggcaaaacgatcaaaatcaaaacatttttgttagaacccctgttagcgttgaccgggtcgttgactttgggacagaacag

SEQ ID NO: 187192 - DNA, 1863 bp, Cannabis indica
tttttttttttctttttcttaacttcaatttagtctctaatgttgtcaaatatctatatataaagaggtaccaatttatcaaaataaaatttggaggattaattaatcaaaatgtgtatagtttaaggagtagaaagaaaataaaataaaataataaaagactttattttgaagaaagggtttaagtggtttcatcttcaagggttttgatttgaagttctcaaacactctcattttgataatcacagtccaacggaagcaaggcaactgcttcttcaatcttcaatcttcttcaatcctcaatcttcaacctttaatcgtcaatcttcttcaatctccattcttcatggctgacgaaacaaaggaaacacagcccacaaaaaacgacactgagactaaggatttgagctccaatccctcaactttgaagccatgggagcagcacggaggagtcataaacttacctcgtttcgactataacgctccttcttctcttcttcaatactctcatactggcttcctcatcacctgcactatcagtcagtgtttttctttctcatgtaattattcaaattatgattaattgggaactgggattttcttgaaatctgttgaagttgaactaatctcaactgggtctgtaattgtgaatcaagaagtagtattttactattgggactgtgaaattctagcttataagttgtgttcaatgtaattcgttgttgaaagtggtttgatgcaaaaatttgaatctgtttttttattttgcttctatgatttacatgctgagtttttttatattcaagttattaactttttaattttttcttggtttttggtagagagggagaaaagcgcaacgaaagaagcaatgtctatccttgggaaggttagtttttcattcagaacactatttgtgttagtttctctttattgaattctgtatcttctgaaactaaggctacatttggttgaaaagataagaataggaatgagaatagaaatgaaaattgaattaaatttaatatgcatataaaagtagatataaaaatttaaaaatttcatcttgctttagaatggcctttccacaaaaatagtggaaaaaatcattctattggaatgacattctagtgcttcaacatgcaaccaaacaaaagaatgtaatgaaatttgattctttttcactccattactaccaaccaaatgcaccctaagtggctattaactttgctaagaggaaaatggtttatgctctctcatttttcacaccctattgtaatttagactacgaaaaccagttcttaattttaagtcttgttatagtttttgctgcaatcacattcctcttgggtctataatactctatatatttatagcccttattcatctctgggatggatggtgttatgtttttgtgtaagaaaggacattcccatttgaacactcataaatctattagttgaacttgtcgatgaaaatgcattctaattctttcttattttttttgaaaagatatattgtatgttcatgaaggtctcaactgcataaaaagttgatttgctatatttctgctattaatatgtttggccttctgtttctatatttatatgttgcagtattttactggtagcagtaataaaaattccaatagctccgcgtctgatgaagcttctaattctaagaaaaggaaaacatgtgcagaggaactagataatgaacatgtcaatgatgaggaaaacaaagatgcgattaatctttccgaggacaaatctggtaatttctggcagatagtacatgaattttgttggggcttggatcagatgccttccaagttttagcatttaactctttttttttcttttt

SEQ ID NO: 187193 - DNA, 2793 bp, Cannabis indica
atggaaaaatgattgggcatagatcatttacttcacatttagggtggcttgtgtgctatttttgaaaagttgaattggatttaacttcaccaagttcaaaattatagaatttaaatttaattgtgttctaaataaaatgtaaattataaatgaaaccacatattagggatttgtctagcataccgttgaaattgaaagcacttctaaagcttacttgagagagtatttggataattttttgtagttttttaaaattattttttgggttgttaagagttaaaaggctattttaatgggtagatgtccacgtagatagactatccaaatagttactagaaagacttttcttcagttattctatttaaaagtggagtaagagatgaagcttaatttgattactagctaactaatcataaaaagaccttagtcatattaggagaatgcaaataaatcaggaaattatacaagtaaaccaagtgtcaataaattagttcagtattcagtcatcaattaaaataagtgtttacttcaaaaataaaaaattaaaataagtgataaaaattgttaaagagaataaagattgctccaaattcagtgaatatacattttggtgatctttgtaagaaaccaataacttgataaattagtgtatatacgtttacttgtttggctactttctaagttctcattatgattattcgtggtgcactttttttttctttttcttttttaattattattgcaacaacctcttaatgcaaattagaatatatctttatatctaaagcattgctagtaggtaccaataataacttataagtattaatttttttttcatattatatattaatttaaaataagctagagctgatataaaattatcctaataacaaatagtaatatgttttttaaatagtgttgggttaccatatttgaggccttaaaatgattactagcttttgtgtacatttgaatagaacaattctcttcctttcaacaaatatgcttttttgacaacccacaacgcttacgcaattgagaatgagccatctcacactggggtccctcgcttcacttttacaaatcaagaagataccattactcagcagctaaatgtacggtaaatatcacacagtaacaagtaaaaatataagcatttcatctcagcaaagataaacttatttatcttcactcttcattttagacccaattttaacttttattacaatatcatccctacagaacggagtacgagccttaatgcttgatacctatgattttagaggagatgtttggatgtgccattctttcggaggaaaatgctacgactacactgcttttgtatgtacaattattaagtttttgataatgataaatatatgtaaaatcatttatttgcataatataataaaagactaatgtgtagggaccagctatagatacattgaatgaaatagaagcattcttggcagccaacccatcagaaattgtgacattgatcttagaagattatgttaaagccccaaaaggtttgagtaatgtgttcacccaagctgggctaatgaaatactggtttcccttacaaaacatgcccaaaaatggtcaagactggccactagtcagtgacatggtgtctaatagccaaaggcttatagtgttcacttcaattcaatcaaaggaacaaactgaaggaattgcataccagtggaactacatggttgaaaatcaatgtaatcctcattgtatacttagttaattagataaagtattgaaacgtaattttctgattttattatgtttataatttcttagatggggatggaggaatgaaagcaggaagttgtcccaacagagcagaatctccagcacttgatgacacgagtaaacgtttagtgttggttaactattttgagtcagttcccattaaacaaaccacttgtaaacacaattcaggggacctcattaacatgcttcgtacttgttatggtgctgctggaaacagatgggctaatttcgtagcagtcgattattacaaggtcatactcttgagcacaccacacactcgtattcatgttaattattctttttatctcttgtaattaaattgtatgtcttgttcatttattatgtatatgtgcagaggagtgaggggggaggatcatttcaggctgtagatacgcttaatgggaagctcttatgtggatgtgatgatgtccactcatgcgtggtaagtgctcataatgattcttgtacatgtagttgtaattatatacacatcatatgtatataatcttttggcaattttatacttgggcgctatttttgacgttattttctaaaaaatggatggaatgtctcttctcatcacttcaatacatcatatatatttgtatgtatagtaccaaaacaaaattgctcctactagttcgtagagacaaaattagcgtcacttctaaaagtcttatctataattattaagttgtttgtagtttttaagttaatttgatcgaatttctaagcaagttttttttttttggtttgcagccaggatcatcttcagcagtctgcactccctaggagaagtagtatgcattagttattgtaattgggtgttaatggtaatgaacactcataattcataaaattatactcataaggacgtgggtgggtattgaagaatgagaagcagagaaagagagagagagagaacacaaggaatgctttgaactcttacctctacactgaggtaaattcctttatttatagagagatttcaatacaattacaaaacag

SEQ ID NO: 187194 - DNA, 4522 bp, Cannabis indica
tttttttcacgtatatgtgaatttgataaagctataaacaactggtgtgccttttaatgaacattaatccattgttttctcctcactttgtgatctttattcttttaacctttaattccatttacaacccaaattaccataactaaaagttgtttcttgattatctacaaggacaaagaaaatgagcccacgtaaccgaccgaccgcctacaggatcggtctgaaatgcttccccatacattgatttgtaactggaaattatcagcatgaagctatgtcaactatatacatacacaactgcttcttagctaggagttcagttcgtctacccgagttgggtagcacaaatggtaaggcatgtagttttactcccacgatgtctgaggttcgagtccttctttggtacctacatagtaattgctatagtttcccaatccccaaataatatagggttaggagggaatcctagtctcaagaataacattactcagtttcgaactaagctttacctcctcctgccatgaatttccaagtttttttctttttcttccaccttagaactgccattttatctgttttccactttcgatatttcgatcgattcttcaaccagtggggataatccttgccctccttacattcgatgaagtctaacaaatcatcacactcgtgtgtgtttctggggttttctaccacacattgtaagaagatttttccagtgcaggactgctctgtttcctcctcggtaccaacattcgactctgtcctggactttcggatggaggtattctgtgtagcttcggctttctcatcttctgatcttaaatgggaaaatgaagaagattctgtactgctagatatgaaaaagacataagaacggtttagttttaaagattagctatcttaaaaatagtaaacttcacaaacaatcaatcagatgagattaatcctaaaccaacacctatattgttttgagtaaatggtgaaaataaacattcaaaaatgtcactatgaaaaagaggaataggttaaaaaaaattatctaaaaatagcttttttaacaactcaatacacaaggtaaggcatacactacatcctacttgtgatttattttctccccaaataactacataagctacaggtaaaggcataaatgtaaaaaggttcactgaacaaaagataagaatccaaatttgagttgcttatgcatttttatgaaacaatatgaaatgtttttacatcacataaattttccaagaaaatagaagatatgtattaacagaaacatatacctcaagtatgttgattttgtcttctgaatatttgaaacaatctttctacttaatcgaggaatctgcaacatttatgttgatgtaagaaatttggtttaaaacacacacacgcattgaagcaagaagagaaaaatggcgacacgaaaaaaaatatgtgatagtaccttactaactttgtcaggaggcgcttcagatgaaatggtttctgcgccataaacgagcaatattctcaaagcatctaaactaccatcttcgaaagcatagaggttcatcagtgtcataatcatggatacacaattcttcactaagaaatcaataccactagcaaaacataatgataacaagccctgaaaatgcataagtatccacttgctactcttatgcgtgacgaggccagctttcatcaagttaaacattttcttctgatttggtaaagatgcattgaaatgttgaaaacagccaataacatccacaatgaaatcatattccttgcatgttgaggcatttgctaaggttttcaaactacccgaattagcatcatgccttaaacaccaaataactgctgacattgaattactcattaactttagtaaagcagccagaagatacacatcttgtggacttgtttccttctttccaaataatactgcatcacccgaaatgtctgaaaacgatccaattattatagcactggaaattgacaaaatatcatctttacaagattcatcaacaacctgttcaccattgtttatgtatgcaatggcctcagccataagctcagaagtttctttacagaacatattgcaaacatgtgagttccatgaagaatctaatttaacgccaagatcatctattttcgcgcttgtggactcttgaatataacattcaaaagaagattgaaagcttctgccaaacataggagaatctgcataagaacctttataaccgattggatgaccatccataagcagattggtcatatatccagtgtacaagatgacagacatttcaaatgctgttaggtaacaggtcataagtttaagattaggtctaaaactctctgaagaactttctatagcaattgcttcagaaaccaataaaatcacatgtgcctggaatatttttggccccgaaagtacgattggattaagtagtgatatggctgcagtcaggcttagctcaggatgtctaaagtctttgccccatctgccacataatcttttggggaaagtctcaaatgcttgttcatctgaaagtgataagataaaatgaacagaaatcacctccaatacacttccactataaccatgaacaaaatgggacctaaaaagcaccctgcttgagctagatgcagaatcaacacgcataagatattctctcaaaagtctatgtagcaaaagttcatctgcaaatacctaaagaatatgtgaccaaattaagttctgcatggatgatagagcttctacttatcctaattgcaaataaggtatggaaagaaatgaagaatgtgatacaaacaatgcaatcaaattttaaacagactgatctatagtttcctgccgcatgataactcaagggtaactcatatctcccaatagtgtcaagaacaaacaaagcatagcaagcatagacattaaaatagctaacacaagatgaggcaaaggaaacaacattgacagatgtaataaacaacggtaaggcctgaccctacaatatttggagaccaataatctaagcaataacctttgaccttgaatggagcaaaccacatgccaatgactgaatatttgagattgaataaataggatttttaccaaattatcctctttggttgcatttggatcatattttaatataatttattgatgtggtataattacagtatgaagacctacttaactaatcaagctagctggaaccaagtataatgatcttaccattcaaacaataaactctaaaattaaccaaatataacgtctcagattttatagttagagtactatcattgcaattattttttacctgaattctcaaattacagtcaatcagatcttacatcagaaagtcgtttgcaaaaatgatcgaaatgcaaccgaagtatcaaatttgtaattatttctaaggttcaaggtaaaatttttacaaaataatattaattcaagggcaaaatctctaacataattcaaaaaacttccttgattcaaacataattcaaagaacagttgtaaagatagaatggttgatctctaatctaatcacatgtagaaggtttggtctttcagacattacctcaagcacttgggataaaaatggacgccatggatcagaaggttccaaaatcgataaagaagcagcaaaatcttcagaaacagaagttgaacaagcaaaatcactgtaagaacattcacgagaaacaaacttctcaaaagtaaaagaagttttcttcttctcatttcccccatttgtaaccaaacaaatcaatctaccaagtacagaaagtaaaacttgggctttctcaagcaatccatctgaatcaagcaaagtcaaaatcacaagacaacatctcaagacaagtgtgagttcatcaacacgaaacctagaattatctgatcgattcacatcacacagatcactaaaaaacacttcgaacctagaatcaagttccgtgaacaaaatttcagccaattgattaaacccgctaccatctagctcagtatcagaacctcgaattggttcgtttaaggaaaaatgaaccagaagacagtacaattttttcaaaaatggcggattgaaaccctgaaattcgcacagaagaaatagaatcggaaaattgaagagtttgaatcaatcaatcaagcaaccaaaaaaaaagtatgtacctttgaagattgaaacgcagaaattagggattgtaaagcgttagagtgagaagggaacaagcgtgtggtggtgaaggtgtcgttggaagccattgttgttggtttggaagaaaaacccccaaaaccctcgtcgttgttggagcgggaaactcaggtaaggtcgctcttacattgttaggtttgattttttttatttcttttctcaaaaataccattttatatttttgtttatagaaataccattttgatattaaattatgtgaaatttgtttcttttggaggaaattttattgagaaaaattacaataagattttttttttttttttttttagtagaaagaagtcattcta

SEQ ID NO: 187195 - DNA, 4315 bp, Cannabis indica
gcaatgctggcagattcagtgaagacgaggttttctttagtctttactttacttttacttttttctcacaatgatttcagttttcaaaatgagttttctttgtttcacaggctagatatttctttcaaacaactcatttctggagtcaattattgtcattctctggtaaataaaacaacacaaagtttttaccttttttgactttttttaccctttctgcaactgtaactctgcaactcctttctttatttattagtacttatttactgtttgcagcaaatatgtcatagagatctaaagctggaaaatacccttcttgatggaagccctgctcctcgtttgaagatatgtgattttggttactctaaggttcatttttaactttcatatgttcagatctaaatctttcttttttaaaaataattgacccaactaaagaaaatgaccaaagtttatatctttatgataaaaaattatctttgtgtatgtagtcatctttgcttcattcaagaccaaagtccacagttggaactccagcttatattgcaccagaggttctttcacgcagagagtatgatggcaaagtaaattttcttccttttttttttttactaatttttgggatattataatattgaattcagcatattctttagcctttggatacttttatatagttttgtctatagtgattgtgatgttttgttttgattatgccattccccaaatcaagttacttaattcaaaaaaatggcatactaaagacaaaaactaaagtttgttgctttgctaattgtgattgacttgtctgccactcttatagtttcgagtcattttcaagatacacttgcttgttaagttaccaagttcatcttccttttctgtatttgtaatttgttcatgtatcattggttcagggcctagcacatgttgccatgttagctatatatatatttatataaatataagagggcaggcaggccttgatcttaccaaaaagtcctttaccgcttcataggggtaatggggttttattatcatcttcttggactgcatccattttggatttgattgactcgtggcctcattcaaaactgtagtgtctgtttttcccttttgagatatcttttaaatctttaagatcttatctgtaacctcttcatttgattgggtggtccttttttgaccttttggctattccagtgcttgagtggtgaaagtgagtaagtgagtggtgagggtagtggggacacaaggtggtgttgactggaaaaagccagagagagatatataaaacactgctgcattttggttcattgtcattaagaaagaaagtctttaactttgtttggttttagatggggccctttgccttgttaagtctccaaaatgtagttggggagcattgaatattttaattagaaaacatcactaactacttaaaaaaaggtgtaattctattacgtataggaatggaatcaatgaataaataaatctctaattaggatttttacttttaaattttttaacccgttaaaaattttcttcgaattattaaaattattagatttaagaaattttgtccaattttattcaattttattaatgtgacaattattcatgtactaaattatgtcccctgaactttagtatttactaaattacgtttcttgaatgttaatatgtatcaattgtgcttcctaaattttcatccacgtgagactttttttagtaaaattggacaaatgtccttaaatccaacaatctcaatagtttggaaaaaaaatttaacgacttgaaaagttctggggcatgatttgaaatatattaaagtttaagaggcaaaaatctaaattaacataaataaatatccaatagaaatgatgaaagaacaaacttaactaatattgttatgattgttttgttttgttttgtttgttttagttggctgatgtttggtcatgtggagtaactctatatgtgatgcttgttggtgcttacccttttgaagaccaagatgatcctaagaactttagaaaaactattcaggtacttttacatacaaaccacttacttaaactgtggttgttgagtaaccaatgagtttctgcttttagtacagagctaaaagcatagaggataatggccttgcttgttttgcatgctgagatgctcatattgttttcattcatattttcacagaggataatggctgttcaatacaaaatcccagactatgttcatgtatctcaggattgtagacatctactctctcggatatttgttgctagtccaatgagagtaagtaatattattatttatcattgtattctaataatgtgtgcaatttcatgaaacaacatttatatatgattgtcaatctctgcagaggattacacttaaagaaatcaagaaccacccttggttctaaagacttgccaaggaactaacgaagcggctcaactggtgtattatcagagagaaaatccagggttttctctccaaactgtggatcagatcatgaaaattgttggggaggcaaggacaccgcctccagtgtccaggcctctccgaggctttagttggggagaagaaggagaagatgacgacgatgatggcaaagacattgatgaagaagttttggaagatgaagatgaagaggatgagtatgacaaaagggtgaaagaggttcatgctagtggggaattccatataatctaaaatatgtttagtttgtttgtttgtgtatctgtattatcatcatcatctcctttgtctagagctattatatttatgactacaaactttacagtactaatagtttgttagcaaaaatgtagaagttatagcacttatttaaatatgtaatgtctatgattttgttaaacaataaattggctccctcccccattgtaatatgtgtatttcttcacttgtttaactttaaaatatatatatatgtggttcattcaggactgttttgagattggaatttataccattgtgttgtgtgttatacacttcaattaactaaattataaatattaattgtttacacaattagtaatgaaatcttttattttttattataggtttagctcatgtatgtttaaggctgtccttgagttcattcatacttatcaagttttaagtaagtagatataattaaactaaacatcttctcttccatgagtcaaaattggtaacacttacaaatattcttatttgtttgtatttattctgaataaatcatagcaaagcaaatgctttgttgtttgaatttgaataaagaaatgaattatgtatgatgtaaattctgaatataacaaggaccattttcacactctttgggatgcaacgattggagatgttgttaggagtaatagtcagccacacgaatattcaacctgcgtagccaaagagagtgaagagtcatatgaaacacatcatatctcttaggaggatcattcactacaaagtgtctttgtgccattttaacacgcctttgcatcctcacgtaatggctactcgaaattcccatcaagatctccttaattcgaggtatgtccttcaccttgatctccacactaaaagctttccaattcaatacatcactgaaaggtgggatgtacccatccgaaatcaacacgggcacacattcagcatagattgcttctacaactctcgggctcgccacctcgtacccgctcgggcacaagcaaaacttgctgttcctcaacatctcaatgtacgagactccacgtgggagagtctcgaacacttggatgtctgcgtcattgttcttccatctttctaaaagtaatgatctggaagaaaaaaatcaatcagtaatgagtggagtaactcaacaagataagacaaagacactcttatattaattactaccttatgtggccgtggagacggcctgcgaagaatgctagggtagtcctctttgaaggagagggcccgccgaggcttgtcatttcgccggtgaagaggttgatttccgggagggatgcatctttggatggcttgaaaccttccgaagtgttggcattgcataacacccgaatggagttgtggaacaaacttggcacgaaagatgatgtttttggtccctgcatgaaattaatttaattagaaagtttaagagaaaagtaatcaagagacatgcatggttaaaaaccatttactttttcgtacaaacttattctttatcatttacatctaataatacatacaaagaggtacactactctctttccataacgccaaaacactatatatatagtatcaaaacattattattttt

SEQ ID NO: 187196 - DNA, 1311 bp, Cannabis indica
ttttctgacatggagaattagggcagttggacaagattattatgtttttcggtgtagtttcaactgtaattattaaatttaaaactgtaagctgaatcgtattgtatagttttgctaaaatgcaaatcacaactgcactataaagattaaagagtttcgaagaattttttatgtggtgtaatgtgggcgatttattctattccatccaacatattattttattaatctctctatgtaatataggtgtatatacctttagtgttcaagaaaaaaaatatatcatgtttgaattagaaactaatttagataagtcaagaaagttagcttcatttccttttcaccatattggataatgatatggcatgagattcttatacatcaataacaacttggggtaagaatattcacatttcataccccattattacaatttacaaaatgatacaatttggactcacaggacatttataaaatatcaatttcttataaatattattagttaagtgtaaagtacatttcttatttattttagcattcaagaaaggtttttaatataattttattcataattgtgtatatttcaattacgtaggattacttataaattttcagaaaattctgaatagttttaatatcgaaaataaaatttaaatatttctttttgcaacagtatagttcaaatattttattgcgattaagtttttttacactcgtgataaataacattctgtaaattatttatagtattctaaaaatttacagatagttttaaataacgtataatatatatgaaatttttttgataaaaaactcttctatatattagcttaaaaactaagctagcaatatataccacctttctcaacaaaagaatattatgtagcaccactatgaactaactcatttgcgtcaaaactaagcaactccataaagttatcattatgtatgaaccattcaaaaactttctacataaaagaatcttgagctacctagcttaccctactataaaaccaactacttcaaccctaaattttagagtaaacttagccatacccattatgtcttgcctaagcctaaaatttccaagagccaataaaaagacatggtggaagagtctcacttcaaaaatccaaaccaaactccacaaactcaacaagccaaaatccattaccaaacacaagtcatcatcatcaaaacacaattccaagcccaagagatttttccttgtagagccaaaacgttttcaatatcataatcatcattatcaggttaaacgacgtcgttttgttttattacctttaataaaacgta

SEQ ID NO: 187197 - DNA, 4780 bp, Cannabis indica
tgccccacacagagtcttgattatcactgttttcactcttctttccccaaccagaatcttgatttccacttacaccaccagattccgcattccaactattttttttgccccacacagagtcttgattattactgttgtcactcttcatgccctgattatcactgttttcactcttcttgccccaaccagaatcttgatttccacttacaccaccagattccgcattccaactgcttttcttgccccacacagagtcttgattttcattgttacccccagattctgaattcaaattggtcttttttccccaaacagactcttcaccagatccagaattccaaccacttttctttgaatctcggctgtcatcattgtcgctggaaccaaattttccactgtttttcttatctagaaaagaagccttgttaccccaagaagatgaatcgtcagagactttgtcatcagccacacttttactgttgccccaagaatctaattgattctttttagtagttgcagccccccaactcccagctgaattttcagaaatattcttccctttaccccagggttcttccacagcttttccactatcctgattgtcatgcacattaatgttcttctcccaggaagcagaagcaccatttgaggaatcaagagctttatcattgtcttttttcccccaacaaccatcaactttgtcagctgcctgagcaccccaagcatcatttgtctttgaagtcgctttactcccccaagcatcttccacatctgcaaaggaatatgctgttaaaaaatttgcaataattcacaagattagtccaagtaatttttttccctacatacctttattagcatcattttcagcaccaactttgtcagctgcctgggcaccccaagcaatatttgtctttgaagtcactttgctaccccaagcacctcccacatctgtaaagtagtatgctattacaaaattttccataactcacaagattggtataatgaaatgtttttcccttgataccttcattagcttcattttcagcaccatctttgtcagctgcctgagcaccccaagcaacacttgtctcagaagtcactttcttcccccaagcatcttccacgcctgtaaatttgtatgctattacaaaactttccataagtcataagactgggataagtaaatgtatttcccttgatacctttattagcattgttatcagcaccagcatcgtttgcactgccagattcccactgcatctgcatgttaaaaaggttgattatcagcaaatgtcccaacatgcgcaccatacccacaaagagaatgaaacagcagaacaagttaagagcaaaccgaagaagagcctggagtagataaattagtccaagaactcctacaaacatcagcggaacattaaattagacagtggcacattacaaaagcaaaagagcataaaaggcaaagctacaattataaacaaattaatggctaggaatgcattggattttctattttcatattcactctttcttgtttctactacaacaaaaactgcatcaaattaaattaattcatataaatagtaacaaataaatatttataacagctattaatcaataatattcagaagttataaaaccatgcagctacacagtgagccacgccactgaacgatcaatgagaaccacatataattgagattcttttacattaaatatttcccccttttcaaactaatagttctgcttctaaacaatcatcccagctcgaaaggaatatatgcccattcaaaatccaatttttttaaatgttactatacctttgagatttgtaacatgattaaaaccaaaaaaaatcctaaatgaccaaagttcaccaaaacaagatgattcatcgacaatcactacctcatataaaattagtacaaactgaatcagaatgaacaaataggacaaattgctacctttcactagcccctccaccagaagtccacccatcacctgctcctgatgtccctgcaccacccgcccagtcttcgaaggaaacaaaaaacatcaaaattcttcagtaaaactccatcaaagatcaacacaaaaaaaaattattgaaaagggaaaaaagaaaagcacatatatgaagttattaaccatacaaacaaagaaacaaaataaatcaaaattcttcaagtcaaactccatcaaggatcaacacaaattaaaaattattgaaagggaaaaagaaaaacacaaatatgaatttattagctatacaaacaaagaaagagtagaaaaggagacagactctcacctgaagataatccttcgcctcctaacagatcaaaaggtttcaggaaactagattctggatcctcactttaaagagagacacgagaacatcagaacagtaagcacatgttaagaatgacaatcatacttgtacaaacagatattgattatgaagattacctcagaacaacagagctgctcccacgaacctcagaaagatgctcacttttaactgcaaatataacaatctgaagagttaaccatataactgaagaatataatatactaacagaaaaaacaaactaaaaccaacttagtaacaacaggacacaaatatcaataataaacaaggtttgaaaaacctgtaagaattttctgcttagagttaagcttgactgtgacatcagaacgacgtattgcaatgacacggcaaagatacccctttaatggaccaatgcggattctcaaagtttgaccaatattgaatataccatccttatcggtctgattaactgcattcaagaaaccaatcagtgataaagcaaaagtcttgctagtcagaagctataacttgagaacttcaattacaaaatcaagcaagggcacacatacaattacggttgtcgtctcttgattgccattgcttcttaggggatagaggggacttgggggatgatgggaaatcatcaaaagaagggaaactagactcgccaccctgaatcatgagaatattatcacaatgcgtacactaaattgcatacaacaaagcatgcatgataagaaagggattccaaccttttcattgcaagtggtaggaggagtgtgcttcactctctcacaaatacgagatttgcagcagaaataaccacaattttctgtttcattctcatcatacataaacacaatccccctataaattttcttaacaattccctgcttgccctaaaaaagtaaaagaaagagttgtaaaatcttccaggcaccttttaacaagcacgtttcccaagtcaactacatttagatggcaagatcttaaataaaatgtcaaacctccaatggcccttccataaccttcacagtatcagttacaccaatcgtcttcatgcggtgatctaaagcagtaaatttcatatccgatggctcattctttaactcactttgttgaacagttaccaccatgggtccttctctaccctctttcagtatctgaagtgttgaacagaatgtcagtcaccataataaagaaatatgaatgtattaactaaactatgtaccttataactatcatctttctctacacctatgataaccccaaagtctctgcggctgcaacattatatagaatagcaaccataagaaagtcaacaacaaatataaaaataaattttaacagcattaaatattttaaaaatcagattgtacatgagcagttcataactgaaagattgctcttcaacaagctattatatactactcacccaacacacacaagatcatgcacttcaaaactattcatggagattgactctgagcactctctttttccaccttcaattgaccctgagccctctccttttccacctgcaaatgaccctgagctctctccttttccacctgcaactgatcctgagaactcacctttaccacctgcaactgaccctgagctctcccctttaccacctgcaactgaccctgagctcactctgtcgcgcaatggatcatttctaatggaacgttttttcttctgttcaccatagagctgtgaaagccactccgcattgtcaggttcattgttcttagaagtgctaaacttcatcacctcctcttctgatggaacaacaccgaagcagcttatggaatctatggctacttttttgaataaatacccatccttgatcatcatgccatcaagaacttgaacaatcatcccagtatcacgatctttcttggtttgaatgagaggtaagaactctctaaacagatttaataaataaaaattatttcagaaactaaaaatgcaaatgaaactaagaatcataaaaatacagaggaagggattaaataaattactcaagttcacttgaattgattaatcgcggtgctggattggatactctcttggcagtagctcctccaccctaacacgcaagtaatagggaaatctaatcatgccaacaatatttccaaacgaaacaattcaaacttgagatgacaacttcaaaatgaattgtgagcattcaaattaacaatagacaaaacagaagatattcgttttaattatccaacaatgggcggcataacctataccttccaatattaaaaaccaaatttcacatactaaaaacacatatacacaaggacttaaaaaatcattactatgattcataatacattatccccagtaattagtgtaaggacattaaatcatgacaattcaagcagaaatcagatttggtaaaggtaagcaaatatcctaagaaattgggcttagggc

SEQ ID NO: 187198 - DNA, 1828 bp, Cannabis indica
aaaaaaaagttttgaggcataataatgaatatgttttggggagcaaaaatctttaaaaataaaagaaaaaacaccaaacgcccctccttgtagtatctgattcttcttgttctttctttctatgagtaatgactgactgaatcattcaatccattcatacaaagccctaatcttttctccattgctattttcttccacgccaccaaaacaaatcaatggagtatcaacaccatcatcaacatccccagcaatggcgtccccttcccagacctcctccaatccaaggtaacaccaccatctgtcctacctgctcatactctcacttccctttttgcccaccacctccttccttcccctttcactccgatcacgctcactacaggcctgctttcgacccctatcgaccaccacatcctgttaatgctatgggaaaccctaatgctcatggtggaggattcggccatccggggccttacggacaattcgcaccacaaccgtctgagtaccccggggttgagggtgataggaatcgtaagaggcctagggttgatgattttggttccggggactttaatccaaattctccattggtcgatgagcggagattgaagatgattcgtgatcatggcggcgtatcgggtggatcgcctgtttcaaggtttgggcccggtgaggatcggaggtcgcatggtttaatggagaatggccgagctgagagtcttggaaatgaacctccatatccttatacaagtaattctaataacaattatcaccagccacaacaccaccatggatatggatcgcagcatcagaatgtgaacgaacccagatatttcccacgccctggtggtgaaatgggccatttgcaaggccctcaattttttggtggacagcctcccttgcctctttctccaccacctcctcttccgatggaccaccctccagtaccggcgtcttcagagttgagagtttattcttcgcacccacaaagaccctcttctttatttcccgttagttcatcagcaatggcagctttaccttgtccaccaattcctgaaaccaaatcattgccacaatcttatttccacaacaggccatacttgcatactaatactggcttttcaacgcaggtatgacttctttagtcattttcttcttttttaattacaaaaaaggtttaccttgcactctcgtagccgttcagttttttgagtacgcaattaatagtgtttgaattttctaggaatcacaagtcatccacgggacaatgccaaagcagtttgggggagaggaccgatcttttttgctgaaacattcatcttctagcaaaccagttgttgttgatgcttctcaattatttaagaagccacaccgagctacccgtcctgatcattttgtgataattcttcgaggacttcctggtaccaattttgtctcatctttttggggtttgaatggagttttttattttattttttttttttttaaattgatcatacatttatttagttctttactcatttgtttctttctacttatcactatcaatccagtttatgcttgctggagtttgagtgttttttctttctcaaacgactttatggatgttaagataatttttttataaccttttcacaaccaggcagtggtaagagctacttagcaaagatgttgcgtgatgtagaggtagaaaatggtggtgctgctccacgaattcactcaatggatgattatttcatgactgaagttgaaaaggttctattattgtcatttctgtttcttcttcatgatatcctccttatatttttgtatgtgtatatatatatat

SEQ ID NO: 187199 - DNA, 1098 bp, Cannabis indica
agaaacatacatgcatgcttatattaatattatgtattaattaataattataaacaaacaattatgaagtaacgaattcgtacattatattattctccttcatgtgcgctccataaactatttactttataattttaaatatgattttgcctgacatttatttattaagccacaatattcattagatacaccaatggcatcctatgtttcccaataattaacttaaaaaaaaaattgtatatgtgcattttagaattttataaagatattatcgaaaatataatttcatattgatcacaattattaattgattatatgtttgatttcactaataaattacataaaagttttttatacaactttaggcaatattcttttgtataatttgaaatttgaattttagagattgaacttgagaatattactcttatataatgtgactatataataaaaattgataatttaatgtattttttttttattttcttttaaagttaacggttaaacatacactgttaaataattcaattaattaatttttttttttaaaaaaatagttttaaatatttaaatttaatttatttattaaaatatgatatataattatttatttttttatttttacacttcaaagtaatttttcttttacatttttacataaatctatataacaaccgactaagcaacctcttaatttaaatttaaataagacgtaaataaattaattaatcatattttataacaaatttagtagttatattatttaaaatatctaaacttatatacttaatttattgtttaataaaattagttagatatattttttcataaattaatttaaaactatattaaatgttatatatttaaaaattataattgaattgtattagatttaaattttattattattttttaaattaataattaaataataactactctaatacaactttatggaagtatgcattgtataaaaaaaattaagacctaacataacaatatttattaatcatcagataggtatttatagtatattatatctatttttgtggctcattattatatataaattcaataatctatatatttaaatatata

SEQ ID NO: 187200 - DNA, 2671 bp, Cannabis indica
tagaaattttgtcctcaaaatttttaaacatctcgggatactgtttccgctactgggactttaattcccaagttacctttcaatcttgttgttcacctacatcactttagctaacgatatattctttgtttcgtagtaccttctctctttcttgttcaaaacctggatcaactgtttctcatatgacaagtttatttgaaactccatattttcataactcggtatacgaatcgtaactgcctcaaacttttgagatattaaaatacaagttatgaactccaggtaaggcagggagcatggctagctgataagctacctaaccttcccttctaggacttaacttacattccttctcaattttcaagtttccttcattaaaaatacctgaagaaggataaaattttcaacttggaattttaatatctctacactttggatcaacatagtctgtacactctataaaataaacatatgaacctgaatctttcttatagcctcactcgttccttagattgcatcaggtccaaggttcctccgttcaccgacttcattccaatgaatgggtgaacgacatcctttccgcaaagtattttgcacagaaacataccaatggtactctaataataatttttattatatgaagactcaatcaggagagatacttactccaggaatcctcaaactccataacacatgctcgtagcatattctcagatatatgagtaattctctcagaacgactatcagtctgaggatgaaaaactatactaatctattttggtgctcattacttattgcaactcccttgacatttggatgtaaactttagatctcaacttgagacaattaattttggagcaccacagagttgaattatttccttgacatacatattagcacaccatatcactatatacgtaatctgttctaataaagaatctgtactgactttgcatatctatccctaattttctaagtagaatcatagaataagagcatgttttacagattgattagggttactattgaagacgaagatcaagcattattgttactcagttctttactgaagttatttgaacattttcaaagatacaatattgtacaaaagatagtcaattacactcgatgatattcaatcaactttaaattcaaaagagctgaatcaaaaatgtgaattaaagaactctgaaaaagatgatggattgtatacgagagacaaaagtgagaagagagaaaaccataaaggaacaaaagaaaaatcaagattgaaatcacagtctgatggtcggaagaccgttaaatgttttcattataataaaacaaggcatatcacaaggatgtgtctggaaaggctgaagtcgggtgattcaagatctgaaggatatgcaactgtgatgggtgatgtttatgactcaagtggtgttttgcttgttacctttgagaattcagattccgaatggattttgaattctgggtgttcattttacataacatcaaataaattttagtttgaagaattcaaacctaaaaactaagagaatgtgtatcttggtaataataagttctataagatggtgggaattaaaactgtaaaaaagttgaatttaattttttcaaatataaaaaataaagacactcctattggtgagacgaaaacatgatgctatcaatttttttttcttccaaaatatataatatagaagttgttaggagtgctctaacatttacatacaaaataaataacaatcaatgaagtaaaagaaagtgaaaaagagaatgtatttcatataaatataagtattgcgagtatcatcacctaaaaatgatatcttgtaattgaataataatattttataatagtaattattttaaaattatataaaaaaaatttaatacttaattacattaataccctatcagatctttgaaattattaagcacttggagcatttctcatttcatatttgtccttatcacataataaaatgcaaatcttaagcacatgcatgccattctcttcccatgaatgcaagaatatatataaattaaccttcttgagatccacactatatttagtgctgctaagtactataatctctagccctacgcatataaatacaacatttattttctttttaattaaagaaaacagctttcactgtataaattaaaaataaaataaaagcagctttcattgttttggtgcaactttgtaataaatcaagggagagggactgacatccaatgaagtattattttgcacttttataataaagtcaaatcttatatttttctttttgggatatatattgatacccccaatagatttggttaagtaaattcagaaatccgaccatatatatcaattaaataaaaactccatctacatgacatttggtgttcatcaatttttacaatttctatttcaatatttgttagaattttacgattaaggtgtaattaagatgtacaggattttatttcaaaaatggtaacatttgataatatttttattttttaattttttaactacaaaataaaaataaaatttataattttcaaacttattactataatttttattttttattttttctattttttaaatttttattttaagttcggtatttcaggtctgaactgaaactgagactgagtctgggtgacc

SEQ ID NO: 187201 - DNA, 1740 bp, Cannabis indica
tttttttttttttttgtcttctacttccaaatccaaattatttattatttattacagaaaataatagtataactgtataagtgttgaacttaatatatttcgacccataaaagtttcttagtgaggaaaaaaagcgaacaataacctataatcgaaacaccttatataaggtgttttgatgaaggatacaattagaagcatgcctctaagctctaaagtggtatgacttaaatagctaattattgctagcttcatcgattctcattccatgctttaagtgaaaatcaaacaagattgtggcacttaagacttgatcatgtaagccaaagagaactcgaggaacttgaaaaacatgggttgttcaaagataagttaaaaaaaaaggtagaattttgtgatgaatatgcctctagggaaggcttgcaggattaaattcaacaaaagtagtctacattcacatagatctatgggatccatccagaattctcactatgggtggattctactatttcatgagaatagtgatgatttcaacaaaaggtatgggtacatttgttgaaaagtatggaccaagcttttgccacttttgtagaatggagaaagctgttggagaattaaacagagaataagatcaaagttctaagaatagataatggacttgaattctgtttagatgaattcaaactattttgtaaaaatgaaggaattctaagacataagaaaatgattatgactctccaacaaaatggtttgattaaaaggataaatagaacactattttagagggtgagatgcttgctcctaggtgttggtttaacaagaaaattatggggagaagtactcaatacaacatattacttgatcaacatatgtccatctattgctaatcaattcaagacacatcaggaactttgaataggaaagcccccaaagtttgaccattcgagagtttttggttgcattgcttttgtgcacatcagacaagataaattgcaaccaatgacacttaagtgcatgtttcttagataccctaaaagggtcaaggattacaaggtctagtgccttggagaaggacacaaaaaatgcatgatcaacagtgatgtgccttttaagaaaggtgatatgcctatgaaaaccaaagccacatcaaaagacaatgaaattgatcagagagacaatgttctgtttgaggtggatcaagcagatgtgtcacttcatatagaattaaatgagaatgagtcaaatgaggaagatgagacaaaagacaacctcaacaaacatcagttagccagagatagagagagaagggagagcagatcttgaactaggtttggctattctgattttattgcctatgcactggttgcagccgaagacaatgatagctcagaaccaacttactatcaagaggcaataagtggcaagaatgttgtagcatggttgcaggcaattgaagaagagaagatatccttgttaaagagcaagacatggattagtgttaagagacatgatggacaaaagctaatatcctaaaagtggattttcagacaaaaggaaggcattcctagaattgaggaagcaaggtacaaggtaagacttgttaccaaggaattcactcataaagaaggtgtagatttcaataaaaaaatttactagtggttaagcaaacttcaataatggaaatgatggccaaggccacaaattttgacttagaaatttactaaatggatgtaagaactg

SEQ ID NO: 187202 - DNA, 2313 bp, Cannabis indica
gataaacttagttggcagttcctggaccatgtgatgggttattttggagcccctgctcaattttgtaattgggtatcccaatgtatctccacaacgtctcttaacatttgccttaataggagccaagtgaggagaattatgtcgtcttgtggcatccgttagggagaccttctttctccttacttgtttatctgggcagcggagattcttttgagattgcttgagaaatccattagttagaaggagattaaagggattactcttagtcggggaggatcgcgtctttcccacttattctttgcggacgaccttattttagtaggaagggctactatcagggaagcaaaggggtactggcaatgcttagacaatttctgcgcttggtctggtcaacaagttaacaaactcaaaacatccatcttctttagcaataataccagcaaaagtatgaaaaggactattacgaatacatagggaattagggaatcagaaggtaacattaaatacctgggactccctcttttagatcaatacagaaggatgctggtttcaatttcattcttgacaacctcactttcttcaaggatggaagatcaaaaccctctcgaaggctgggagatccaccctaataaaatctattaggatggaagatcaaaaccctctcgaaggctgggagatccaccctaataaaatctattgggctctctctgccaatttattcaatgcaaaccacaaaattatcaaagaagatggcagttaagatcgatgacatggtgatggatttctggagggccatgaaaaggacaacaaaggtctttatctcaaggcttgggataagatatgtctccctaagactaaagggggtttagggtttctataaattattgaaatgaatagagctttccttgcaaaatggagttggaaccttgtaatcaatagtcatctctctcgtgtaaagtgttgaaagctaagtaccttaggggaaagaatttgcttgagggtggttttaactcatggctctaaaaaaatattatcaaggcaaaggaggtgctcaagaaaggggcatgcaaaatggtggttgatggtaagaacactagtatttgggaggatccctgggtaatccataggaaggatttataccctaaactgattggttccaccctttggttccaaaaggtagcagacctcttgttggaaaataaggaatgggaccttcagaaattggccctgttgttcgatcaagaaactattgtaaacattcggaaagtgggtaaaccaactggaaggggcaaggattactgggtttggactagagaagcaaaaggtcaattctcttctaaatctgcttatttgatccaagtcttggatagaacttatcagtgtgatgtggctccttctctatggaacaggtgtggaatagtaaaattttggagtgccacaagatcatgtggtggagcatactgtctaatgtgtttcctatttgtaagattcttgggcaacgtatgacagttgaagacacttcttgtcctatttgcggaggaaacgagaaaactatagaatatttattcctaaactgcaatttagtgttccacctatggcgttcgtccccttggggccttattcccatcagtgactctagtgcaagaatatgggattgtgttaagtttttgtggaaccttaattcaagaggagttaatgttaatgagatctttctctatgcatccatcattattgatacaatttggaggacgcaaaacgacaaggtacacaataataatgtagctagcatattgtactatattgattctattaaacattgttatgtagattatgcctcaactgttctccctccgattgtcgcgcatgcagtgtttgagtgggctcttcctcccattactagatcaagatcaattgtgatgtaagaagagggagggagaccatgtgtgtgtcagcggtggctcgtgactatttgggcgcttttgtgtgggtagctgtcaacagttttcctttatgatcccctcattggtgaagcatcagtttgtcttcttgctattgagacatcagtagctttgggctataattttgtgattgtggagagcgactctgagattatcatcaattcgattagaaggctttcaccatgatgggagattgatagttacattagtaattatagatatactactaaactattatcgggttgccattttgctaaaaatatctcggtaatgtaatcttgttgccgataatatggctaagtgggcgtatgtcaacaacatatctgatatgattaatgtttttttttttaatttt

SEQ ID NO: 187203 - DNA, 5302 bp, Cannabis indica
agctcgattgcagagcaatcaaatttaattacgggaagaggggtaaaagatagcttaccttccttagctgaatgacgatattcattaaattaggagttttttatcattaagttgccacgattgttgtcaaataactctgaaagagatattttgttcttgatagctcgataaaaagcatgctgtcgtgaactcaatttgcagtgcaccgtgatctctgttttctgggtaagctctgaaacaacatctgttttaactcgacgcagcatgaaaggttttaatattgaatgctgtagaaggaccaagcataatatatgtcagaaatcaactgttagatgaatttactcatacatttaaaggccaaatgattgcatcatcccttcagtagcaatatgtaaacactaatagcgacaatattaaccaagcctaaaactagaggaatcttaaatggtaaagacaaacaaataccctctgacctcaccaaagtttcaagctcgcaaaaagttgatatgctaacacatgctttaaagcagcaccttgcaagtcaaatctattaaattttgttgcgtaaaagatgcttaccaatcggttaagctggtgctcgttcaaagtaccaccatgttctgcatggctctcaattctggatacgatagaagatgattaataagaatatatagcgcataggaatattaattatttgaactgtgtcagcaaacataaaaaaatatttacataccctttagaaaaccactcattaaactgttcatgactgtcaaatagggtcggcatgatgaaatgcagtaaggcccacaactctgccatattattttggattggagtgccagtaagcagaagcctatttcggcaattaaaactaagcagtgtcttccatcttatactgtccactcataagcacaacacaaaatagtaggtgagtacaaagaactaaaaatagaaaaccacccagaaagtagatggacttgaagaaaatagatatactataaagctaataaaccaaataatgattagaaaagcatctcagcaatatgaccacagcatacagttcacaggaataacttctttcagtaaaccttcttccaagtcaataaaatgtctaatgttctttaaccaagaacacaatttacaataaaatcaagctaggatgatcagataataagaaaaagaccaccaccattgaaataaataattccctttttctaaaggcagcacatctatgttactcagctacattataacggttaaatgttagcacaaactttaaagtacaccgacacagatgatatgaatcaaacctgtttgaacttttaattgcctgtgcttcatccaacaccatatattgccatttcacccgccgaaagtacttctcgtcagaaacaagtagctgatagctggtgataaggatatgaaacccagcatccctggaaatgaaggaaaaaaagtgattacattgaaaaatatctcagcccttgactacaaactcaaatgagtaaaggaaactagtagacaaatgaaagcaaaaatgcttcttttaccaaatccccaatgatccttagaaaatacaacaaaacaaaagaagcttacctacggtataatgtcttcggattgatttttttcctcagaaccgtacggtcctgaagcccaccccaatatggaagagttttcaagtcagggcaaaaccgggaaatttcatctgcccagttgttcaaaacagatgcaggagcaacaacaagaaaaggtccccatatatttttatcctgcattaaaaatataaattcaaaaattaaaagttagaattccaagttacagcaaggaaaattcagacaacaagccgagtaattacttcagctaaatgagccaaaaatgccatagcctgtatggtctttccaagtcccatctcatcagcaaggatgccattcaaaccctacaaatgataaaattttccaagtaaacaatcggaaaaagaaaaaagaaggaaaaaaaaagagaaattatatgtttaatttaaattatgtagcattaatcaacctgctcataacaattgaccagccactgaagacctttaagctgatattctttaagggtgcctctaaacaactgtggtgtttgaacagttgatgtcactggcatggtggaactgcaaaaaatggaaatataattataaattatattaaactgagaaaaacactttagtcccactccttatctgttctaaacaagaatagaaatctgaggaaacagatgaaaacaaaacttacggatgaagtagatctatgttactagctcctgcaacctcctgtggagcctcaggttcaccaatttggcgcagcttcatacattcattatcaaatgcacttgtcagttttttctgcttagaaactgcatcttgagcagctttcaaggcctctctctttagttcagcctcttcaggatcatcttcctcaaccttcccagcatcaacagacataatgtgctcttcttgctcagttatttcctcatccacaagtgtagcttcagatgcttgtgtgcttgacttgttctgcatgaaatggctgtaaagctcagtttgttgaataagaaaattcaatctttgttgttgcctctttgcttctcgaagctcctgctcacgccttagggcttcagcagcttctctttcctcctttttcctcaattctgcctgcaaaagaagtatgtacataataaattaataattccactccagcttacagtttatgacatgggttttttaaagaaaataaaattagtttatgacatgggaaaataccaccaataatgttctttcaaaaaaatatagttttaactgtaatcaatgtactctcattaagaaaactgaaagttaccatctctttatccactctcttaaagaaaagcagcatgtccctagctatcttccgtgtgcgaattggagcagccctcatcaatttaagtgatctactcactttcaatttcacctgataaagaaaatattgacaaacagataaataaaagcatagtttcaggatattagactacagcacaaagactaataaatttaggcttcactaagttaactacaacaaaattcaaagttacttttaataatgctgcaagaaattgaaacaagatatgcttcagagagagaatgtttgcttgcctctctttgacaagtttctgaaaccctcttggcatcaattagttgcttcctatgaaaagctgtaaaattcctatgatgctttggcatgtctcttcttacaatgttgacccacacttttgcaattttctccatttcctccctctcaatcacagaaggatctttcttcacctttagctttttaggcaagcttctctcaattatctgcagtacaaataaccacaatttgattaaaacccatatactaagaaaatgagaaattgaacaccagccacctcccgccccttatagacaagtgtaaattaacaatcaaaagtaaaggacatcaaaacctcatacgattcgcctttctctagaactttgacatagtagacctgtaaaacaccaccctcagacaaaatagagcgtttatacttccggctgccccttctgggatgggagaatatgcatcaggaactttgagactgaaattctgagatgagttagaagcagcaagagacttcaattttgaatgaagtgaatcatattgggggtgaggctctcccattcctgcccggtttgtatgcccaacccttttatcagtcgccatcatttctgctagtgagcctaagtccaatgtaccttctaagtaaatttcatccactcgaatatcagaaaaacttggcaagcttaatgatgccgccagcttgtcgtaagttggagggatcctgtaggtgataccatccccaatatccaaataaggaggctcatatattgctctgcataaataaataaaagttacaaatacgaataacttgtttatctggcactaaagaggctgttttagatcttcaaacatccctacaactgagatgccagaaaacaaacctatcagagccattaggcggtgtcaaatctgcctcatggtaattccctggtttgggatgattagcataattgagccactcaggtgtggtttccgattcaagaaaccctcctcgttgttcattcttcaatttcctggctttcaaacccacattactcttcgggactggaactaccgtcctgggtgggacagcaggactggctgaggaatccttgatcctcctcttgtacttctgaatgtgatctccaagcatcgatcgatatctctcctctgtaatgtttctgttgtagtaactatcctcgtcctcgtagtcaccgttctgagaccgccttctcttcttcaatgagctcaattccctttcagacattagtccattacctttgtttgaacctgccccacctatagtagacatagtaaagctcataattttcaatcttcctatctaaacttcccacaattttcatccacccacataagcttataatacaatagaaaacaatgagattcaatctgcataagtaaaaactccataagtgtgttcaagagttcaaattatccaataaaaaagaagtacaaacctcggcttcctctactctcatcctgactactattcccataataatcaaagtcatcatctggttgtggaagttgaaagttcatcaaagactacaacacaactcaaaaattaaagaaaatcaaattaaaaaacaaaacaaagtttcattttttaatcaaaaatacaaaatttacaaagttcaaaataatcaaaatttcaatttacccacaaaaaaaaaatgccaaacaaaccatcaacgctcgaattcacagagcaaaagccgaaaaaagtgaactaaaataagcaaaaatctgaaggaacagagacagaagaattgagcaaagtaaaaaaagtaagaaattaacgaacctcgagatcgaaaagattcgagtaggaggtggagtccttggattggttccggtggtccatgtgcagtgtgaaaaggtgagaagataaaaccctagttcttggaagggcatggagaattggggaaggagaattgagcgaggagaagaagaagagtgtgccctagttagccctagaagaagagaatgggaaagacaatggggttggtgcgtaggataagagaggtcggcggagaaagaggacgtatcgtagtagtgacagacggtgcaggaagcatagacacatgctaacgtgcactgggttcgtatattatctgttaacatgcgctgtttcattttcttctaatttt

SEQ ID NO: 187204 - DNA, 4084 bp, Cannabis indica
aagtgtaaaattgtgaatctcttttcgtttatctatctatggttgcccctgtttttattatccaaggctagggaagtttttacttgaattgaaaagggacttcaagcttttgtgatgacatcaaaattagttcaatgtgccaattttttttttcttctaaggagtttgctatttatagatttcctttttgctctcttgtgtaggggggagaccgtaaagatgtgttcttttatcaagctgatgatcaacactacatacctcgagctttactgattgacttggagcctcgagtcattaatggcattcaaaatagtgagtacagaaacctgtataatcatgagaacatctttgtttcagaccatggaggtggtgctggtaacaattgggccagtgggtaccatcaggttcgtcccttggatttacttccgttaggtgtttagatattctcggtagttactgcctgtagtaaatttatttatggccacaacgtgtaatgcttaataatgaaattcattttgataagaaaataaattttgagtttctttgtatatgaactaggaaatactgacattttctgatgataacttacaactactagtgcataattgagcaataaatctaaagtaataattatatgggtttgtcaaggatcatgattttttgcaaaaaaacaattgcagtcttcttaattaactgacctttgttttgaatgttaacttggcaaactgactgtactgtataaaagtgctgtcgttgtatggattaaaatagcatgtcattaatgacgaatctatgtattcccagaatgttgcatgctgtgttcactagaaagaacaccaaattcagtgattagatacagatgcctatagctaatccaacacttgtaagacattgataagctgacctacccattacgtacacatatattgttctgtgtttatgtcatggttgtttccgatgttgattgccagctattttactttttgagttttttttttttaaatttctgatcagggaaaaggtgttgaggaggatataatggacatgattgacagagaagcagatggaagtgatagtcttgaaggttttgttttgtgtcattcaattgctggaggaactggctcaggtttattcacttcaccacactttagtcatttactttttcctaacttaatttgctcaggatggtaatatgatgaagcatttcggcatagcattgtagatactctatttaaatactacaatctcaacctaaatgactatttatgagtgtctaatctctgttttgaaacaataccaaattggattcatccttggataaggatgacaaatatggatccctgttaatcttgcgcaagtagagtgagattacacttgaaaatattaatcaatttgaatgaaacatctgctttagtgatatggtcgtgcttataaacattattctgcattggttaaagtttagctttagtgttactgtgtgcttattaacattattctgcattgcttacatgtgttggctataatgcaggtatgggttcatatctgttggagactctgaatgatcggtacagcaaaaaactggttcagacatacagtgtgttccctaatcagatggaaacaagtgatgtggtggtccaaccatataactctcttttgacacttaagcgactaacacttaatgctgactgtgttgttgttcttgataacactgcattaaataggattgctgttgagcgccttcatctatcaaatcccacctttgctcaaacaaattctttagtttctactgtaatgtcagccagcacaactaccctaagatatccgggatacatgaacaatgacttggttgggcttcttgcatctttgattccaacaccgagatgccactttcttatgaccggatacacacctcttacagtggagcgtcaggtaagtttatccttttgttcatacttatatatatattaaatatgtctccatgtatattagaggaaatactggagagtgaattagaaatgacatgttgcttgtttgaatcacttttctttgttttaaaagaatattggctgtttaatgtgaatgtttcttcattgcaggcaaatgtcattcgtaaaactactgtattggacgttatgagacgacttttgcaggcaagaatttttttgttaggttcttatggtaaagttaccaccagttatgtatacaattgatgaattctttttcttccttttttgtagacaaaaaacatcatggtttcctcttatgctagaaataaagaagctagtcaagcgaagtacatatccatattgaacattattcaaggagaagtagaccctactcaggtgaccatagtcatagaattgcaagattgatataaatctttgtgaagaaattcataggcggcattgctctttaaattacaatgtggcttaatcctaacaattcattgttttccaaatcaggttcatgaaagcttgcagaggattcgggaaagaaagcttgtgaacttcattgagtggggtcctgctagcattcaggtttttcttatctgtaaaattaatttcctatttcactttttgtttttatcttattatctggagtcacgtgatctttggtttttgctgttttctaggttgcattgtcaagaaaatctccatatgttcaaactgcacatagggtacgtgctttctcctttgttcgttataattttttattttctatttattaaagctaaagattcatgacctcattattgaggatctagatcatatcattactttcattaaattggcaagaaatgatggaaagattagtgaaaggagctatctttgtgttgttcagaagtgaaaagattatagggaaacagtacaggaaagaaacaaaattaatattgataatttggtgcggaagttttgggttgacatcgatcttccatgttttgctattaaaaaaattgctggctaactgaaattacagctggaaccgaaaaaaagggtgcactaatctattttttcttgctgtatcttttaggtcagtggtcttatgctggcaagtcatactagtatccggcatcttttcagcaagtgtttaagccagtatgagaagcttagaaagaagcaagcttttcttgacaactacaggaagttcccaatgttcgctgtaagttgccagccacacacagttataaagagtttcagttcacatatattttgcctgttgtttggcgtgccagtatgacagaatatgttttactgttaacatgaatgattgctgaaaattttatttatattcatgcttgtttgatttcaagctgtagttagtgagtaagactggtgatgaataaatccttacaatgtaagtattacttgcaagttagagacttacttttatttgtataatatacatggacaggataatgacctttcagaattcgacgaatcaagagatataattgagagtttagttgatgaatacaaggcctgtgagtccccagactacattaaatggggaatggaggtgattgctctacctgtgtttgcatgtatttgtagattttcaacatcgaaatagcctgtaaatgaattttatctcattctgcaggatccggaccatgtactaaccggggaaggcaatgcttctggaacagttgacccaaaattagcagggtaaacaaaagtaagttccgactaagtgctgcttagaaataaaggttacagtgatgtacatatagagacataaatatgcatgctgatgatgagtccattgaattgaaaaacctgggttgcaggttgagacagtggttgcaaaagtaggttatttgaagaaaatctttagcagttgattgcattctaagttttgggttttggtgctttggtggaatatccaatggtttgtggtttgattctctagtttgatcttccaatttgttaattatcgttcctgtaattaactcaagggaatacagaatctcactgtatgattttctttttgtccgtttgatcttgcttggtggagaatttagggaatgtagtccactcatttgaaattgcagcttggttctcagattcttggccggcctaccttt

SEQ ID NO: 187205 - DNA, 1070 bp, Cannabis indica
aatctcattaaatttattcttaaagagcacatagtacaacttgatagaatattatcactcataattatttaaactaaaccataatgtatagtttggtagggttttgatcttcttaaggaataacatgagtagggttgattagggtttccatggataacaatagctcttcttttgaggagcataaccatcatgaagacaaggtccattaggatgaacaatccataagtttatatcgaaaataacttccatcgaagatttgaagatatcgaatcgatgaaactccttatcccattgaaagctacaaaagaagagtgtagtgccccaaaaattgggtaaaaatgagaacaaaaaggagtcgttgttgtggagaagtctgattccgatatcatcgtctttcgatttacaatgaacagttagatcggtatttaaaccatttcgcaccacaatatcaaccgcaggtcctccattagcttcacataataatgatttatgagatagtgaagaaaagaatatgactagaacaaataatagtaatggatcaatgataatacccataagtttttttgaccttaagacaatgaggctagggttttaaaataatgagattaattctctcttcttttatagacacttaaaaaatataaacgagttagtcaaattaatattgtgatgaagagaaataacgtaccaaattcacatttggaatattttatttgacaacatgataattttcatttaaattaatttataacgttcttcttttgtattaattaaaacaatatttgtacgtagtgttcactttccaaagttgcatatatatatggaatcattttctttattattttccaattaaggagacaaggttataaagaaatgcaatatatgcatgtactaaacatacattaatatgtatttatttatatatatatatattttttttttttttgaaacaatatatatatatctattctatataaagtgtgcctatataactgaaattcttggtttatgagaaatttatgggtgacttttaatttttatttaataaaataataaaatattatttatat

SEQ ID NO: 187206 - DNA, 2162 bp, Cannabis indica
aacgcgaagggctggtcaggacttaaagagtgtctcaatggaatagttacaagaaagacgagaggatctatagagcatagcagccagatcaaagttaacccgaagtcaagggtgcccacgaattaccgttcttgggccaacattgtgaagcagacggggggacctactctgaatgagcaacatatagtgaagaccaaggtaacagcaggggatcgggacagaggcagaattgaatggaaagagttatacccaaaaattaaccccggtttcaaaccaaagaatctctatccagtgaaaagatttactcagccgaaattttatgaatacatgcggtccaaggctatggcaaaagactggaaattggcaattattctcaccaggaataatacttatgctgattggtgtactatattttataatctatctagagaactaaagaggaaattggtggtcagccaactttttgatgataggtgtataatatggtgcaaggatgaggtggaaagggatgagcttattaagatgcatagcatgagtgtccctggggctcaatccttagtcacttttctaccgtggagttgggaaaaccagaaggataatgtgaaggtggaatgcagaggctcttggattggagttcaagggctgcctctgaatctatggaacatgaaattctttaggaagattggtgagttatgcgggggtctattggatgtggacaaggatactgctgaggctagctttttgtctcacttgaggttacaattgatgggagacgatctcggattcatcccagaatcggttatcatgtgtcatgacaatatgtgttgaactaaaattctttaaactcaatgacttgagttataggctccatggcatttttaacacttgctgtttcaagatttcgatcacgggaaggtgtttggcgatggggtagcgtcggagggagatgagatagaaggtggagatcatgaagaggcgttgggtgattaccctagagaatcgcgttctctgggggggtcactttcggcgccggagaagtcgacttctggtggaactcaggagacggtaaaggaaatcgtacaacctatggctctacaaccaagaaaatctctaaggacgtgcggagatggttcggcggccgaaacagctgactgcctcctaggtctcgatccttacgagaccactgatttgagccttcgtgaacaggggaaggtggtgagtctccctactatatttaaccgcctattgagaagtctgagggtgccacgtgttagtagaaatcccacttttaatgcttatatcaatctagattacagctgtcaaattgttgacaaaagtgaaccttttaagatgggccttggggtactgggccgaagtgctaaggtcccagctctgaatgatgagttgggccggtccattagtggcccttcaaagaagactcctgtccatgatgtagcttcggataagaatttttcctatttgagtgggccgactatttatactcatctgggggacctgtggtatattcaaaaaagcccttttatcattatcttggaccaaaattctggttctcaagatttgctcaataaaaggacggagagtatggtgtttagtgattttaatggggccagaagaaagacaaaagctttgcacagaaagatgaatccagaacaaatagtacatgaatttttcaaaggcagactgcgatcaatcaatcctaaagctcgagagaatttcacaaaggcgataatacaattttggaaagattttgctctggaaaaaagaaaagctacacaatcagtactccactttgagaaggaggtggtaccagagaaggaaatcagacctgcagtcactattgtgtataacagaaaaagaaaatctattacttatgattgtgtgagccactacaattcagaaaattactctcttgagtcggaggaagatgatgaagatccgaaggaagttgagttcctagacttaagttcggaggatgaggactctgaaggggaaggagaagatacagagctagatgtaggagaagattccgaggatatactatgcaacataaacgaattgtggaaattggaggttgaagatccaccaaggcaggaattaggtgtagagaaactgggtgatgcaatcgaagttaagaaagatgc

SEQ ID NO: 187207 - DNA, 4925 bp, Cannabis indica
ttcagagttggaactttgtttagtagtttactaaaaacaattttaactacgtaaggaattataacctgagcatctgctccagatgaaactagcacattcagaacgtgagaaaggctaagccagtaatccttttagaatggcctttcagcttgctctttacctgtgtcatgagatgattaagtaacaagctcaaaaatgagcagtgcagataatcacaaacatactgatgctgttatatgacatacctcatccacccgcacattgtagatctgaattgtggaatcatccattccaatagcaataatattgttatcttgaggatggaaagcaagaaatgttgcagcagggggtggaggcatgaaagttgtcattgtctgtacttaccaacaagaagttaatattcgtctgagcgaatcaagataaacactgagcaatattggggtcaaacgttaccttaaacgtcatcatattgaaaagggatatcttcccaccagatgctgacattacataagaatcattcttggacaaagcaaagcaaggaacagcctcttcaggattagtgtcagcgacatcattggtcattaaaataccacttgttggttgccacagttgaggtgatacattggctgtcgcctgaaataataaaagaaaataaaaacaaaaacagtaaggtaactatggaattcttcaaaatgccaaatctatgtttaaatctaaggagccctgcatctacttactctgccactagtattacggtcacttcgctgccatttccatagtaaatgaatagcatttgatcccaacgctaaaacagcattaccagaatttgtataaatcaaccttgatatctgtgacaacaaggaacataatcagaaacagatggcaggacaaaggtgaaagtggatgtcaagattcgcgagtgtatttgacagtatcatatcagcacagattttaaatactaaaatataccttggttaccctcatgttttcttggagccttaaagaccgacactgagatggttcagtgatttcagtgagcttccaaatctttgatttgtcattttcttcagttattctaggtttcacatctcccatgctccgggaatccccattctggcatatatataatacttaacgattaaatatgtaactagaaaaattctactttttcatgagaaacaaaatgcaaaacatgtttatacatagattagaagtgaaaatttgatatctaaagacacaccattcctgcaatgttaactacagaggttgttctttctgaaagtccagcactagtagcagcagcagcagcggcggcagctgaaatcgggctaactgtaggctggagaagatatatagcatgcacgtaacatgttaggcaatttactaacaatacataagatatcagtatcataaaataattaaaatctgacaaagctacctttgccacagcctcagatgccctagatgcatcataagaaagattttcaaaagtgcgcagcaaccttattccgtctgtatttgccaaaattttaatgccattctcattagcagaaacagccaacagacttccatccttgttaaagcggagacgggggcttgcctaggagtcaggaaagaaggaattagcattcattattttaaatggcaatgtactagtttaatctaaagataaattaacttactggcagtcctccatcagcctcaacagtagtcaatagttgaatattgtccatatcccagaatttaatagagaaatcatctccagctgctaaaaaccgatttttagtggtatcaaattgcacaacacccagagaacgcttgcggaatccttgataggtcctctttacagccccttcactttcattccattcaacaataaatgactcccatctttacttgtcccacatgaaaagagcctacatgacacaaggaaatgagatggagaatgaatcatattggtcaaaccaacggtcaaccaaggtgcaaagtcaaagacagcaagacatttcatgagactactaaccttgtaccatccgcactatatgccatggtcgtgcaccaacggccaggagcgtcatagtcaactcgagatccaagattgtcatacaaccatgcttttatctttccgtccagggctgttgaaaagataaactgcagtatacagcacaaaaagagcataagatcgaggaaaaactaggatatgatcataactaacaaaaaaagtaaatgaaataataagcaaacgaaacaaatagcatgcaaataacacctgaatattttccttataatgggggcacacagaataaacaggtgcctcgtgaccttcaaaagtgtattgttttgcaccagtagcagcatcccacacctgaaattcaaaaagacaatcaggagagaagaaaatgcattccacatagatgattaacacaattaatatgagtagcaaaccttgatcgtcttgtcgtcaccacaggtgataacacagagttgcttattggggtgcgagaaagcaagatcatttactcctccaacatgagcatcaatctaaattttaggcattcaatcatgtcaatatggatactcaccaataatataacagcaatatttgaaaacttaaagctagtaggtactaagtaatgtttacctccaggtgttgacgaacatcatcacctccttgataagaatataattgaataatgtgccttgaatatgcaacccctgaaattgaaagatcaggaacagcgtttagaataaagattcatttcaccactagaaataattaactacattacattgacaattacagtaagcttaccaaataaagcaccatcagggctccatataacccgattcactgaaacaccaggatccttcactaaggcagcctgaatttccaaatggacagagttatgcaccaagaggaatatgataaagaaaaaagagaaaacatgaaaataaaacggcacacacctgcagaggcactgaacatgcaccgagatcccaaactttgaagtttctcaaaaccaatcgttcccttgaaccaacttcccacaaccctatgtcacccacattggtgccaactgaagcatgaaagtgaaagtagaatatgaagaatcaatcaaatggtgcagactgaaaaagaccaacgatcatgtaaaaattattaagtaatatgaaatggaggttaagtgctaaattgaaagaccaaccaagaagtagagtctgctagaacgagggtgaaagtccatgctcataggagatgaaccctgatttaaagtccttgtaacagttttgggcaagtcatcaggagcattaaaagcctgactatgaccatgtcccggaaatgttgtcagcacattaacaggtagattcacctacataaattatacaagagttaggaaaagtatagccaatactactctttgttttgaaagttcacagctttgactacagttgcatcacctcatcagaaattcccattggcctagttctttttgagacatgatcagaatccccagatggatagtcgacagaaggattagttggaggagtccttggatgcttcaatgcagctatgaagcaataaaaccacactcatataagaaccatgatctaaatgtcccatcagattcacaaatgccaaactcaggaagcatagcaaaacaaaatgaggtttacctggaattgatggagcaccaagattaatagctcccccagaaacagcaggatgagttacggtaggattggacatccaacctgctagaggtgttggaactgcagccggtgctggttgaaatggctgaataaatgaagcttaaggaaaattttctaacaacaaaatagataaatttcaccaattgagctaaataactcaccccatgtgcacctagaggtggaaagcctccagctttgggcaatgatccaagaagaggattatttgcaggtgatggagcccgcgcaccgtttggttgtccacatgagtgatccacaaaaagagtttttatatctggatttggtctagggtttttacaaagttggtgctgccaatttaagctgtaacatagtttccataaggtaaatgtcaagtacacttacattttgttgataaaaagtactcacattttaattcacttatcatgaatatcaatgtacaaggtacagagctatatgttaagcatttaaaaaataatgagcatataaaaattgagaaaaacttacctttgattaatgagagtcctcaacctagaatttttaagctgtgggaactgcaatttgtcacgaaacaaaggatttgcttctatcaacttcttgagctcaaccaacatgattgccctggctgactttgtatcaccatactttgacagttgttcattctctcttcacgtgagattttttacaataagttagctacaattctctcatacaaaaaatataaccgtaagtagcgaacattattttcttacctaaaattctctagtgtcaaaagctgagtgatttccttgaatagttcttcattaaatgtagcaaagaccttcaaatccttcactaatatatccacggccttagaccgatcatgcctataaaaggaattcaaaagttgcaatcataaatgaaatcaaaccatctgcgtttttcgcctttcaacattaaatttcataacattgtctctacaattaggaaaatgaacttgaacacgaaagattaggagcttacttatccaaggcttcaaggtacttctgctttcttatctcaaaaaatattttcatggaataccgattatcatctacttttgtgaacccagataagtacttttcaacctcatcccaattgccactgtgaacctcatcctcaaaatacttcatattaaagaaaaacccagattcctgttctagcctatttatgaaaatataaataataaacaaaaaaaa

SEQ ID NO: 187208 - DNA, 1647 bp, Cannabis indica
atgagatgatgaaatcggaggacacatataccattaatttagttacaataattcaatagtgttcaatgtatactaaaaagccgtatatcttaatgcatgcgcacaggtaatatatccgattttaatatttctgcttaatcaaatacttaaggaacttatttaattcttttacgggctaacttttaaaaaaacattcattaacataatgaaatcgggctcaaaaggattaatatgaaaatccattagttattatatgatagaaacaggacaaaaaaaaaaaggtaacgtagggttttaaaagtacatatagattttgagacaaaattaacttgaaaagaaatattccagcagcagagcaggccagcagttctagttctggggttcctacaaatttgaatacttgctaggtactgatgagaccgtagagtttgttgataaaggcatcaatataagagtcctcaagcccttcactcaatagaaaatctctccatttcttatgatttgccctcacttcctcgcccacgcggctctccttatccatcacagcctccacagcagtacaaacaccttcttttgtaaacaacccatcttcatctcctttttcaacctcaactccaactttaagatctttactcataatcctcgcattaataaactgatctccaacatttgggaccaaaaccatttgacactcattcaccatagcctcaagtaaagacccagaaccacaatgagtaacaaagcacccaaccgagccatggctcagtatcagatgctgctggacccaaccaccatggaccatccctctactcccaactctcctcttgaacccatctggcaaagctgaatcaactgtttcgaacccaactggaggtttcagcgccactaagaacggtctatttgttaactcaagacccaaaacaagttcttggaattgctccttcgccaaaacacattcgcttccgaaggcgcagtacaccacacttcccttctcgaatttagaaagaaaagccgccgtttcaccttccaataccgatttcggtttttcaggaacgaccgggcccgccagaataactgtcttcccccacttttcggctacataatcggagtagattccttccatctctctggaggttttgaaggcgatagcatcgctgtcgtttaacgagatttgctgtcgtttatggaatgagatgccactcccgaattcattttctgttaatttaaccagattccgagcttcgtgagacttaaatttaatgtacgatgatgggaaaccgggtttaggctctaataaatcggcttccgttaagggattaacttcgctcaattctctgtctggactgatcaggaagcagagtgttgcagggctaacggttacgtaacagatggacctaatcccaaaacgacatgccgtttgaggtacccaatgagtgaaatcgaagaagatgaattggggtttgaggttttgaagggaaagttcgagttggggacgagtgagatccatggcggtcatgagaaagggcagtagatggaaaggaacgtcagaagtagtttcagaaccgggagggaggccttcgacgtgaggcacgttgatggggatgaaggagatgaggtgtgggtggaggttgaacgacagtaatttgg

SEQ ID NO: 187209 - DNA, 4343 bp, Cannabis indica
ttctttctttctttaatttttttactgggatgttagtacattcttatcctagttccgcactctaagattaattatgatagtcataaacccaatatttagattaattatgatagtcataaacccaatatttagattattgacatagtcttgctgaaacttgattatcattgatttggttcaactgcttattaaactgataattttattgattgtagagcttaactgtttaatgatggattgattcgatttgcttaactatttgattgattcaattgcttaactattgacgattttatagctgtttgcatcaatactcttataaataatggtcaggcaagatttcatttggagtaattgccgtgagttttctagtaattgaccccttgtgtttctttttttatataaatatgggcaggcaatgtcttatgcaaaattagctgggcttcatccaatttatggactttgtaagtgaaactatcacgtatttctgtatttatttacttttatataataatataaactgaagctatcaccatttattgtttttttctctaactattattttcgtggtaaactttaaaatattttggttctcaaatctgtttctttctggttttactatcttcccaattatctttttgtcacttagtgtcataaatgttgaatacactacctcttggatatggaagatttattattttacattctccctgatattaatatgttactttggttttgcaaggaagattctggttttgtgcctttatttatctatgccatatttgggtcatcacgtcagcttgctgttggtccggtggccttggtttctctattggtctctaacgtgttaagtggaattgttgattcctctgatacggaattatatacagaaatggcaatattattagcactcatggttggcatattagaatgcacaatggggctcttgaggtattcttgtttatcttatgctaagtgtgtaatacaatttatgtcatttatgtaagtaaatatgcaacatcgtgggttgcattcattatcagacacctagaaagtgatttgttcatagggtaactctagctaatacttgttgtcagtggtgatccaggaaattgcagtctcatagctctgcaggatgaaagattgaaccatgtagggtagaagtataagaatacataagaatacacacaaaatcaattttagctgttattggttatttgttgagaagtcttttggtactttaaaaataaaattttgaaaattaaaatgaacttctgaatctacagcatgcttattaggtagatacagtcttaatgaccaacttttttctcttcgtgtaagttgctgaaattaataacttgtatatgcatcaatgtggtcataaatataaaagataactcatgtatatatcttgaagatgtaagtaacacgtgcatgtccttttttttttttagaaaactgtgcatgggtgcatgactatcttgattgttgccttttgagctctttactgaagtttcttctttcccccaggcttggatggcttattcgatttatcagtcactctgtcatatctggattcactactgcgtcagctattgtaattgccttatctcaagcgaagtactttttgggatatgatatagaacgaagtagcaagattgtgccgctggttaagagcattatacagggagcagatggggtatgctacattcactgaaatgatataatcttaatagagtatattatgatatattattcctatttgaatatgagattgcagtatttctagaagaatgtttcttgtattatgatatattattgttcattaagtgatcgtcaaccatcttacatccacatatctactttatttactgctcatgtttcgtttcattgttgttatcacttgctatgtcagttttctaatctttggaggttcttgcatttgcagtttttatggcctccttttgtaatgggatcaatcattcttgcaatacttcttgtcatgaaacatttggtatgaacttatcccgtgttttttgattggattatgcctccatgattgtttttggctgtaattttgccaaaatttacatttagggaaaatcaaggaagtacttaaggttccttagagcagccggtcctctcacgggagttgttttgggcacagccattgtgaaagtatttaatccatcttctatatcattggtgaggttaaaagttgaaaagcatcatatttacattaattactgtgcctttaatgatgagaagttctcctctaattacatactttagtaatgaatcgtctaaattttcctaagttctgtaaactctgtcagacatccctactcaatgctcatgaatttactctctagaataaatggagagaatctaaagtcatcattctcaaaacatgatactcactgattacctagctagcaacctttgtttatatagaatatgtaactggtggataaatttcaatgaactcgacttttagaaaattgatagtaagaacttattaatcttgctacagagaaaggccacatgaaagttttatcaaatatcaaaagttgcattttagcataaaattggcatggttgctgtcaattagctgatggctgccaagaaccttactctgctttatttgatgcatttttttttgggcatcacttttggaaacaaaagaaaaggacattctgtttcttgtctgaatcctttgtaagattgaattttcttttttcctagttataaattaagcttttctttccatgtgaagtcactctggtacgtttttagcgatactgttaatcaagaatttgtgattcttcatccttgtatgattatttatgtacactctaaatcatttactagcgtctactgaaatctcttgcaatcaatagtgaatatgaatcacagtagctttgagttcagtatgtactctagggatgattagtattagtatgttgccagaatcaatgaacataggtgtcaaatgggcttttagcattagatggggagtttcaaatccaagatactactacaggactgtgaagtttcacatgttatgtgcttgtattataattgtcccactttgggtgctctttgtcccacttttgtatgtttcttttcgattctgtataaatttgttttctgaaggaattagtcaatatcatctaagtcaataacagtatggtcggtgctgattgattgtcatattcttaataggtaggaggtataccacaaggccttccaaaattttctattcccaaagaatttggatatgctacgtctttgatccccactgcatttctcattacaggggtagcaatactggtaagagaatttgtgtagattactgcaagttaagtttcttttctttctagctttgactatcatgaaattacaagtttcatgaaactcaattttgtacattaggaatctgtgggtattgctaaagccttggcagcaaagaatggatacgagttggactcaaatcaagaggtatgccttttaaatgaatagaactgcatacaactactgatctttactgcatgctagatgaaaggactgcatttaatataacagtgcttctcttttttcctctctcagttgtttggtcttggtgttgccaatatttttggctcttttttttctgcttacccctcaacaggtgagattttaaatttatagtatgacggatattccaagttcttctgtaatagcttaattataatcagcatcatatactggtggattcaactgtttctcttttttcggacataatttgtaggttccttttctagatcagctgttagccatgaaagtggggcaaaaacaggattagctggtgttgttacaggaatcgtaatggggtgtgctcttctgtttttgactccattgtttaaatacataccccaggttttgttctgtgataatgattttatttcttgacacatgatatatagttggccatgttttatagcatctccaattcatctctgcataacgttgatggttcaacttcaaatagtatttttccttgttttattatcataattttgtcttgccatgggcagttgcaaatttacaaaacactcaggttattttaccctttctattcgttcaaagcttgtatgtttcttgttttatcaatttaatcaaaacactaactgttacttttgcattctcttccagtgtgcccttgctgctattgtgatctcagctgttatgggtctggtgagttttgtaccatttcacaagatgtagtttgcggtgtctgattagtgtcaagaaaatatgctacatttgatttttgttttaagatccatcatttaagtctactt

SEQ ID NO: 187210 - DNA, 1938 bp, Cannabis indica
aaaaagattaggtcgttgtttaataagatgagaatcacaatttttagagggagagacttttaaaacttagagaagaggaaaaaggagattggagatttggagcaattgtgacaaccccaaatctagttttttctcttctcttttagttttctggttttattatgtttttcatagatttgattatgatcatgttgatggagattatgagctaaactccaatttaagaattttaatgagattgtttgaaactttctatggattaatactattttgatttttctcttcaattgatgtgtgatttatttatatttgtacttataacatgtgtttgattagccaccttatgcattatttatgatttcaatacaaaatcttaaaagtgagcgttaaaaatgctctaattgaatagacataggttttgacacaaaatgagagtatttgtgtagcttgtgtagcttttaaatcattgcttaatgctaattatatgtgtgttctgaaatggaggataatatcatataatttataatcagctatcacactagatagaagaaaatcatccatttgcattattgaaataggaagtagaatcaattgaaattaatttccatatatataatttcataattaaatcttatttattgttttgttatttacattgttttcatgtaaaaattttggaagtgtctaggcaaatgattcattgtaaaattaaaccaaagcatggtgaagaattctatatcaccatcaatctatgcctttaatgaagcatccaggaaggaaattttatgggaaaccatgagaggttttgcaaaagagtgtaaggggtcgtgggttgcacttggaaattttaatgccatcatcacatgcagatccggatgaaattttgagtgtttggaagattttgagttattgatgtaaagtgttcaggctgcttttacaactctagatgatagagttgatagagttgtggctaactctagatggatggatagatatccaacccctaaggctagatttttccttaagggagatttgattactgtccttgtctctttttggtttgagtacaaggaaagaggccatttaactttttcgacatgctgtgagcatcacgagtttcaccgaagggtagatgaagcttgaaaaactaggttcatgggactccaatgtttgagattactcaaagttagaaaaaaaaaagttactcatactcaaagcattcaattttttttttggggaaggtagctaatcatggtacattgctagaaagctattcaaagggatcctcataacattgagctggttaataaaagaggttcaagctccctagaagtataagccaagctcacaatgcttatctttcaatgctttctcaaaaagcaaagctggcttgggccaaaaagcaaagagagcaaaattgaatatatgcaattaggaacactaatgacaagtgggggatgacccgaatagagtcactgaggcttttttagagttttattcagagctttcgggtccaaatatgcgaggcatgagaagagtaaatgtaagaattgtaagagatgggccaactattactgatgttgaaggccaatttcttacttgacctgattctgcagaggagatgaaaaattccttatttgatatttcgaattccaaggctcttggaccggatggtttcaatagcatgtttttcaaaaatatgtgaaaaataattggagacataactaaagctactctttccttccttcactccggagctctctcaaaagaggtaaatgccacaactcttactttattcccccaaagtaattttcttatatatatagtgcgagactattgagcgtttcaatgtggtgtataagatggccaaaaacatgctatacaattgtttgaggcttgttttacctaatatcattagtcaaaatcggggtgaatttt

SEQ ID NO: 187211 - DNA, 3006 bp, Cannabis indica
tttttttttttttttggataaaactcaagatctgtggcctaaaagtatggtctccaatttcttatttgttcattattttggcagaaggcttttatgggttcattcgtacgtatgaaagaaagaatcttcttcaaggctgttaggttgctcgtggggctccttcaatctcatatatggtgtttgctgatgcaattacttgttttgttaagcgactaagggagcagcggagagtattctttctcttttgtagcaatttgagcatgctttaggtcagatggtaaatcttgcaaaatctttgatttttttgcaagaatagttgtctcttagtggaaaatcatgtttgttctttattgtaagtggttaaagcgaatgatgaaagtaaatattttggtttgcctaatgttatggggcaaataagaattatattttgggtttcttaaaggactggatggaaaagcgaattaatagttagaatgggaagcttctcttgcatgtgaggaaggaagttttgttgaagaatttggtccaatcttttcctatttctactatgaaattttgtcttctcttaagtttgtgtcaagaaattgaccatatgatggctcagttctggaggccttcttaatataagaattcttgagggatcacttggatgagttgggagaagatgactagtcctaaggaggagggtggtagtgggttttggtgtttgagagactttaatcttgctatgttttggtgaatctaaattctcttgttggctaggtttttaaaactagatattatcctcatggggaatttatctcaattgaacttctgataaattcgagttataatggaggagtgtgtgggaggctcaacatgttgtttcttcaagtttgtttaggaaggtgggtttgggggagcttatgtgttgatcctcgatttcctaattctaagggccctctaaggggtgatattgtggaagatttagagggtgtgaaggtgagtaaattattgtgatttggagagcaatagtgggatgttgatttggttagagatatgttttttgaggaggatgctaatgcaattcttaggattcccttaagtgacaatgttgagaatattattggtattggttttgggaaagacatggtgcttataatgtaaaaaccacgtattgtgagttgcaagaagctaaggaatgtaaaactgttcaagtggacttgagttttcagaagatgatttggttggctaagatttctccaaaaacgagtaacttgatttggagggctcttacaaattgtctttccactcgagttcatttgtgggagaagtaggttttggtgactcatctatgtcctatgtgtgagctttacggtaagacgatagcccactatttggtgtcatgtgagttcacttttcaatgctagtcctttgctagttttgaggtgggagacacgatagaaaggttgtttggagattggtgcgagagttatttctggcatcttctttggattgttgggataaggttatggtgttgtgttgggccatttggaaagctagatttgacatggtgtggaataaaaaggggtgtacatttctaggaggtggttacaccaacggcagtctgggtgaaaggtcaagaattatgttggtatctgtcgttagggccatggtatctttgtgatgggctgagttatggaccaaagcgaaagaaggtatgaatatgatcaacgttgatatagcgattttctaaagagacaaaaaatttgtcttcggggctgtggctcgtgactattctaatgcgcttgtagaggctcggtgccaatgccatgatggtgttgttaggtcagatgttgctgaagaaatgggtttcaaggcacaatttcatcaaggacttttcatggaagcaagtagatattgagcttgatagtttggtagtggttcaaatagtgcgtagtaaaaataaaatgcaatctgtgtttggattgttaattgaaaattgtaaatctttgattgattattccctttctaatgtctcttttaattttgtgaaactatccatgaattgtgttgctcactttttggcttgagttttacgagagccatgttagttgtactttggttggaaactttgttcttgttaaggtagtttttgctcttttggcagatggcttttaatgaatgaagcatattttattttaaaaatataataataataattaaggaaagtccattatttaacttttttttttaatataaattaactaatctaatatattatattacaaaatttatatataataagcagtaaaaaaaatactatttagtgtacttccctaagcttaactcttccctccattgattcatcaaataaatttctcaaaatcttaacctactccatcaacaaataaaatagaattctgaagactaaaacaatactgaagttgaagattatttatgattagtgataaatcaaaggccaagaagcacataatagattattgtcactggcaaagcaaccaccatcccaacgataaccctgagaaaatttttacaaaaccaaaatcattgctatataaatataaatcgtatatgagctattataattataataaattaggttatgaaaataaaagagaaaaagaaaaaaagagtgcacatataacttacgaagtgctcattatctccgcatgtaaattatattccttggcaaacacaaaggaaattattgcttggggaagagcagcctacaaacagagtattaccatttttattttcaacttcaactataattataagaaaaaaagtttaatcttatacattctaaagactctgttgagcatgcggcaccatgggaatagtggttgctagacaacgttacaataattctgactaatattgtagtgtcacatggcttaagataatatatgtaatatttggataagcttaacggtgaattataaaagtttaatatatgttatggctaattaggtaatgaattagattatgatcctactaatttat

SEQ ID NO: 187212 - DNA, 2036 bp, Cannabis indica
aagattatttttttctctacagaaaaaaatactaataaacaattttatattacgatatgtaatctaaacaacagtatatttgggtgttgtattttgatggttttttatcgtataatagagattcgatacagtgcttcgattgtattattttatcctggagacaacgagactgataatctacttgcacaattatgagcagttttttgcattaacttttccaacaaaattaaatatcactacaacaatagcccgtctaacaaggcacgacttaaaaaaaaaaaaaaaaagttactcaccatactaaaatgatcaagttgtttatctagaaaaaatcataaagagatacttgaaaaataaacacacatcataataaaacttagtctatcagatacatgaaaaaaaaaaacttgttttaattggtccaattaataagttattataaataattttttaggctatgtgttagaaaaataaatcagttttttctatgacgcacgttaatattttatttttggttctattttgtttttttattggctttaaaaccaagcaaaatttaaaaaaagatgtcatttattttcatacttttttcttctcctgctgtaggtattacacatacatcactttgtttctatgaccaaagtgattaaatcgcaaatagaatttaaaattaataaaataatgttactagcatatataaaagaaaaataatagcaaacacttgcttacttccttcatttgttttcttaatttcttttattttgtaatcctatgctttcttccatggatgaaagaacaagaatttgtggaggagtattgtccaccatttgtggtttaagctttctatacaaaagctctttcttcacttctcaattcaaagatgacactacacatttaataaggatattggtttttggttctatttccattggggtcctccctcttgctcatgtggctccaatatgggaatggctcatggacaaggtaaacaatttaaactcgtttcttaaattcataattaactttttaagccaagggattgttttggtgttggtcttcttgagaaaatatcctggttttgatgttcatgatccaaacaacaataagtatataaagtcaatttgtacaaatattgttgatcatcaagaagatggaagtcaatacaatctgtattcagttggaacatttgctcttttggccttacttttatcatcacatagtgagaaaaagatacaacttggtttgtttagtgttctaataagtttgactattgaaacttcaatataattaattccatcaagtctgtggtatatgtttggggctattatctactcatatattgtgttacaactcttgcgccataatattgatactctgataattggtcttgttgaattgattggcctagaaatggggacttggtatctaatcttggaaatgtcttcagcacttggtggctttagtcttctttatgcatcatctttttctaagattcaattcaaagatgctgacaacttaaaaggtgtcatttttattctcactgctctgtttttggggctttcttttaaggccatacctgggttaattaagaaagtgggtgacaagtgtaaatgtgagaagatgttttatgttaaagccattgtgaaattttccttgttatgtatttgttctgtggttactttcttgaacaattatcctaagtttagagtacaatattcaaagtactcttgttgtttttcggaaaggaatatacatgatgtgataagtgttgggtcatttagtgcacttgcctttacccaatcatatgagagagaggaacctgtgaagattagtatgttgagctttcttcttcaattgaccatggacacctctattgaaagcttgggaagtaatgatgatgatcataaacctacaaactttttgtacatgtttggtgctggtgtctactgttttgccttaattcttggaaacagttatattggaaaaccaactagggtaccaagctcaaagacatcagtagtgtctagtggtgtcta

SEQ ID NO: 187213 - DNA, 1587 bp, Cannabis indica
gggccaacaagaagagaaagctgattcctttggtattttgtttgagtctctcagcaagaatgacttttccactcaattcaacttatgcgaagaggcagtagaacatggaattatttgtatgtggtttctactttaataaataaaaacagagtaggtccaacttataccaaaccccattgagattaaaatgattgaagatgataattatatatataatactatatactttgatgtgtaattgtataatggctaatggcaataagagcaaaatagtacctaaccatgatttggtctaactttttgaaaccttttttcatgaaaaaaggcatttatcaaaatagtattagaaaaagatagaaaaaaaaagtatcactaaattattacagacaactcccagaaagaatactaggcagtcattgtgatacctttaaaaatcaatttgggttacttatttttgcaaaaagggaagttaggttaagtttgagtatgttaggtgtgagctaaaaattaagagagattaaactatgaaaagaataaaaaattagtaaagaactaatgttttagaagccaagttcttgggaaaaataattagagtgaatttttgtgtgataattaaagcaattaaattgaaaatgttttttgcttttttcagaaaaattatgaccctttagtcttttagataggaaaacaaaagaaaacaaggaatacgggccagagatcgatgaaaaataattgaaatttttgggcccatgtcttagtcatggggcccattgtttagacgaactgccaagacctaatggtttcatattacattttaatttatagtttcatcatgtgctacgtcattcttctaacaattctcaagactaaagcaaacactatatttttcaacaaacattgtggactctcttttgttttaagtttgaatgtaggattttctcaaaattaggaggttctttagcattatttttttacaattattttctcaaaaatgagaaaacaaattttgttgttttccaaattgaacaagtgagtttttttttactcgacttgaatccaaactcgaacttagacttcaaacccatataagagatagtgtgaggagagagaaatggtgagagatgggaaactaatgagaggaaaactaagaaggaaaagtaatgagaagatgtgatgtgagggaaaatgtaaaataaatattgataaaaaaataattattttgaaaaactttattatttgaacatttttttgacaatgagatactttctcacagttcccataacctccaaatagggataaaattcggtatgttatggtcaattttactaatcttatagccgtctggttggttacaatttttattttataaaaatcgtgaccgatcgtttagaaagtaaaactatataaactgaccatacggttttttatgcttttttcagtttggtaaattttgattgattttttggcgatttttggctagtttttttttttttttttttgctaacaatcaaaaccaaccgctatgttaaaaaaaccgtaccgaaactgaccaccaaatttggcaaagacgtggaactgaaaatttag

SEQ ID NO: 187214 - DNA, 1849 bp, Cannabis indica
agagagcttgacatgaccatattcaactccaagaaaagccaatttcacaataaacattaactggtccacacatgagaaaccttcactctcctttcaaacaatcacaaattgtgaacataataaatcaataaatagccatttgtagcactaataaatatgaccccctctgccaagtaccagcactttttgcttgctacacagcaaagtatatgtacatatttgatcactgctgcaattttcttgatgaactctgcaatcttttgagaacaaccaacttatagaaccttctggttctaaggaacaatgccaaaccaaccaaacacccaccacaattaacagcagccatgatgaaaaaagatgtcatgaagcaatgagtgccagtacaaatgttttctgaagcttctttgtcgtatatatacccaattattcttacggaatatatataagatccaacagggctggctatggcaatggtgttgaaaatagtacccatgtgtcttataccaaatatttctttacagattgttggcattagtgaccactgtgcaccataacatatccccaccaagatggagccgacatacagatttccctgaacaccggatgctatgacaatgtgtccaacagccataatggcttgagtgatggcaatgagcagtggccttgcccagcctcttgtatggagcaaaaaatctgacaagtaccctgccccaagacggccaagaaaattccatatactccacagagagacaaaagatgttatctctagtgttgtatagccaaaagagttccccaattgattcatgttgtttatggtggccacaccagcacccattccactaaacatagccaaaaacaacaaccaaaagttaacagtactcattgctttcaagaggttcatctctacttcttcttcttcttcataatgttgcaaagtggaatctgaggcaaccttcacttgaccctgatcagaagtaggtagttcttcaggataatttaaagaactttcttcatgagctgaactagttgatgatgttgaagcgaaaaacttttcgagtagtggattagtatcggttgaagatgttgttgcagctagttttgactcctcacactgtgctttgattgctattccaaggggagagctcaagagaatcaaaagaagtacaaaaatagatatgcgtgaccacattgatagagttaagacattttccaagattattattatcatgagatagacaacaatgaccagagcaaccacagagaaagcattcagatactttctctcatctcctttatttgcttcgtggattcttaccaatgacaatagtaccatggagaccaaagtgggcaaaagagcaagcataagaagaaaattgcttggattgtctctgcacaatatgttataaaattgaacctgtattgcgccactaagaccaagaaaaccctgttaccaagaaacaaaaagtagaatcacatttcatatgcatttcattatcatttctacagtatgaattattcattaaaacaaaatgtagactaatcatgcaacagagcaaacaaaaggtactgtgctttaaaacaaaagggtaataaacatctgagacttctaacgaaaatcaaatatgtaacattgagaatgtccttagtgtgtgaaagctagaaaaactaaacacggcaactagagtcttgagatgtaggtaggtgtaggctgtagaaggataccaaaccaatcaattcaaaatggtacacctgtaactgtaagtatctaacattttctcttcaacttgcctgggaagaattttataacaactggtgcctggtggatcttaatccacaacctaattttctc

SEQ ID NO: 187215 - DNA, 6770 bp, Cannabis indica
taatgacacaacatgttcaaaataaagtcgttaaatcagtagcttattcacatgagttttattcacataaagaaagccacaactctaaccatgatgtttaaatagcattctactatgtgcaaaaagcataaacagtgcgcaatcaaattgtttgattttcgaagcatgaaagcatggtccatgttccataatgttgcaacactagcaactcaagaatagcacaaatggttaggtaggggatttgtgaatggacaatgaacagtgttcaaacagcataaatgtttcttatcaaaacctactttaaacattatattatcaaggaataataaaggaagtgcatagataaagggagacaacattataaagagaaattttaaatagcagacaaaagacatcgagatacatataaataataccaaaccatgagaaaaaatttaatttcagacctgccatactcatcaacaagcatgccttccatttctctaattggatcatcaacagcacgctcagctcgagatggccgtcttaaggtaaatccaacagttgtatcttcatttggaactccaatgtcatctatgtaacgccgaagcagtgtctcagaaaaaattttcctctcaagccacagtcgtaaaacctggttaacaaaatgacttaatgcatatttacaactgcccgccaaatctttaagtaaaggacaattaccttaagacactgacgacgattttcacgagctccagtaccagctggagcagcagcaccaagcaaacgaggcaatgctgcttgaactgtaggaatatatgaagctccagcaatacctacataatattttaataattagcaataataaaatgatgtgtagaaacatatctcaaactccaagctgaatcacctcgtgaaaaaatataaaggtgaactattaattgtatacctttttgggtgtgagagcattgggttatggaatccacaaggaaaaacaagtctactttacgatgataactgggctcagcttccaattttcgaataagtacttccacaacctacaaataataaaagaaaaataacacctcaatcagacttaaaaagtattattttgagttagaaattacaatcgcttccatatgattctctatcaaataactgtaagaggccaattgcccttctgcacttcacaaaattccaaaagaagtaattatttggtgtattgtgtgaccccagattataacatctcaataacctaaaagttgtttcttgtatcagcaaatccaactaaaattatatgtgtgaataatcataggagagcatgaattgccacagagaacatgtattaggaaacaaacagaggatattaccagctgcaaaatatatatttatcacagccacagactaaagccccgcccacccatgattcctccaaatctatgaaatgtttctgtacaatccaattcaaatacaccaaataatcaaaagagatagtacataatatgaagcctacctcattagcaataccatacttcgcacaatcaatggcaagacgagttgcacgtccaatgctttctttagtcctagacaaagtctctatcattccttcaaaagcgtcacgagcgacagccgcctcagtgccaccacttagtgagtttccaacaaccctatttccagaactagctctttgctcctcaagttcttcaacatcatgctgactttgtgaagcagactcatgaacattggttggtggagaacctaaagcagcggatccttggatatcaaccatcatagaattgccacttcccgacaaaaaatgttgaaccgcagtaggacttgggctccttccctggaaatcaccagtgggaaaagcagaagcggaaatgccaaaagaaaagctttgtgagtgggcttgcttcctcttagcttgtgcaactgcaataagatgcttcatagacttttcagagtccggtgtcctagaaccaatcatcaaactacttcggtcttctctgccagtttccactctgatattggcaccaaaatttaatgggaaacaacaaaatataataaaattagagggaaggaaatgatgcagaaaatgaaagaggttcaagcatgcacacctttgaccaggctctgttgacttttctctcacagcaacatcattgatccgagaatgtggtttctgtgtaggtttggacctttctgtagaggaagcaggcttacttctttgaattgttacatgattttgagaactgtccttagctgaaacagggcccttgctagacacctttttcgcactagcagaactagagactttagtcttgggttttgttgctttaatatgttcatctcctggtttgatagcagaattcatgtgtggggattttttaggagatatcaaaattggttttaactccttggacgacaatgcctcagattctgatttctcttccttttcaacctgcttttcatcgctacgaggatggacttcagccccattttcattactttgatggctagcatgctccttaacatcagcttgtaatttgtcaggtgatgaagatccattcaatttagaggactcttttgtaagactttccaaatgttcagtagaatccttaccatggtctagagttttttcacatttttcaattttcacatcaaaactcttgatatcatctgaaacatttgaaggagctttaataattgtggcggatcctccatgaacaggagttttaggctcatcatcttcatcgtcataaaggcaaacagccctcctctttttctgtgactgagttaccacagctttaacattattagaactcgacacatcattcttaacagcaacatctttttccatcttaatatcagattcagacatagcctccaatgctcggcgacgtcgctttgtcggaggcaacacagtttcatcaccagatgcattttgagattttgatgtgacgtgattttctgctttcactaatgaagttgattttttcaaatctgattttataactgtcttactatccatgacaataggactagtagaaaaagattttttggttttagagaatgttcctgttgatgaatcatctcttgaatccaaatgcttcgacttttttgcaggatgcaaaacttcatttgttgccacactaagagggcccttctttgttcttccatgaactttgtcctcgatatgttccttggagtccccaccagggcggcgcacatcatttggaacctttaaatgactttttgattttgagaagacttttgcctttttttcaccacacacatcagaatctgctttatcttcaggagtttcctttcgtctggaactagaagcatttttgtttttatgtacttcaacaccaccaacttcactcctctttgatccagatgtcatctttttcaacttgtgaccatttgataacggtttctgtccagaaccagaaactccctccaggtgaggtgaactatctgaagcagctttcaaaaccatctccatctttggttctatagcatcactcattttacctttcgtctcagaagattttacaggtgacaatatagcatcactcattttacctttagtctcagaagattttacaggtgacaggacatcactcgtaccaccaccagcagagggctgtacatcctcacagtccttttcacctcgtctctgtgaacatcgctccaacttagagcaagaatcatctacttcctcattcacagcttctccatcagaccctatgataccagtcccatcctttaagtcaccctcaacatcattatcatcagccccatcaactgatggagcctcacttccaggttccaatctttcactatcatccgtcaaattacttgatttttttttctgcaactcatcaaattcctcacagatttctttcacagcttgggcaaagtgctttgctttaccttggcaccgagcagataatttattctttgtttcgctagtaaatgcttgaatatcggcaggtgcaacaaatgctctgaagaggaaacaagtaacagcagtgataaaagtaagaacgtaacgtattgtagaattgcgagtatacaacagacgagttaagaatgaatggcaatggcaacaaagcacaaaaaatggaaggagctaacataacttattaattcaaccaactaagcacaaagtagtactaaacctaaaatatgtacacaacaaccactagataattattgaagaaaatacacaatcattagtaagagaactcacgcactatccaatgcaactttaacataaaaagatgaaacaagagaatttacaccatgctatttactatcataaaatttattattatttatttaaacaaaaacatcagtgcttgtattattagagtacaagatacttactaccctgtacccataatcaaaataatcaagcagaaaaccatatataaattccaagaagacagaaactaagaactcaagtataagagcatttacacaaaacattgccaaaatgcaaagaataaaataggcaccaaatatactgttttttttttcaattttgttggaaattttttgcttccggcagtctggggaatagaacgtcaaaacaaatgcctaccagcactttccaacactccccctaccactagaccatcccttggggttaaataagcacaaaatttactgttatcatctataccactaccacaaaaattgttttgcttgctcttaaagattaagtgtactagatacatagataacactgttacttcagtgtctcattacacactaactaatgagataataaatgaaaaactggtaaaccacttacatctcctccgttccaaaaaattgaacaaagtatttctttgggtcaggaggtttcttccaatcctcaggcctgctaatctgaaatccaaaaccaatatgtctacctcaaaacgatatgaggcaatacgaactcaacagaattgatccactcaatatcacagcctaataggacatgtttgatcaaacacaaaaacaaactttatccaaaatataaaagaatccaacattagtccaacataaatgcaccttaaaatcgtaaagtataaacaaaaaatatgtatttgaaaagcaaccaacagtggaaagaacccaaattgcaacagtaagtaaatgaacaaacaaacaaaattataaatgtaatcgaaaagtatcatagattcagactagtacacagcgagtgcccagtaatactctactccgaaacctaagtccactaatacatgagatttccaaaaccatagacctaatattccccccatttaatccaattaaaaatattaaaataataaataagagagagcgacataaactgaagaaagcatttttttttctttgtaaaatacaaaattagataaataaacactaaactactgaaccattggaaaagaatgagctatgatgccgaaagaaaatcccatcaaatataattaaaaattcatggaagtaaatggattaaagtaagaaatttaaaaagaaaaaagaaaaatggtagagaaacaataaatataaaaaaggcacaccttggcaggccaaaaggggaaccccttgaccttggcgagaacaagatcaccgagactcaactggcccttagccttggccttgttcgctccgcgtctacgccccggagccatggcgtcgacgcctcaaccgaagaaacaataccctagaatttcacgaacttctattacctcaatcgaaatcgaaagaagcaaccagccacaaaaaccctagagaaatccaccgaatcacagagacttgtatttttcttatttattttattataaaataatgaatcttaacccgaagcggaaggccggcgaaggtgtccggcaccggagatgctaggtcatcagcgaaggagggagaaaaggcaagggtcacagcattcccaaatcagaattacggaatcgatacagtgtgagaaagcgggagagagagagagagagagaatgaggcggtcgaagagagagaaagagtagattttgtgagagagaaaagagcttagagagagagaagggttgggctttggcaaagtacgggaagaggacataagtaggtaattttaggtatttttctaaaaaagtttaaatttaaaaatatattttagaaattgaaaataaaataaataaattgtaaaaattattgcattttcgaatatatgagtgaacttttcttagtataacttatttttaactctactattcactttagatataatgattttaatgacactttatgcattaattttaagctaaatttagtgggaacttaattatttatctatgtatttttgttattaagtttctcttaatataattcaagccaattattatttaatcaaagtgatcatagcctctaatgattttaattgtaacactactatatattgtaaaagggtacaacataaaatttattattataagtcctatctatataataagattgctcatataataaacactatttctttttcaatatctagagaaattatattttaatatttttatagtgtagttataacaaacatcttctcaaaatattatgaataatttagaatgttaaaataatcaattgcacatggttgtttgaatattattttcgacataataaattgtttaaaaaaatttaaaaattaatagaatatctactataactaaaattgcctacaagcccactctcaacaacttttccactctactctttaaaataccttattaaaattactattttctattttacctcac

SEQ ID NO: 187216 - DNA, 2135 bp, Cannabis indica
ttggtctaactaagtatcgggtcaccagtggtacctaataggaatgctcatattatatacctaactaactcttatatattaattactaataattactcatatatgtgtgtgtgtgcagacatggaatccaaagtccaaatctgagccatatgcacaatcagctgtggagctaacgaggttggctaaggaaacagtagaagaattctttgaaattcctattggaattactgaagatttagttcaagatcttgctgatggtttggagaatctcttccaagactatactacgtttgttgcctcatgtggtaatatatatataattaataacttcataagtatatgctaattaattaataatttcacattaattatatcttgtttgttgattattatttttaggttcgaaacaaagctatgtaccaacactacctcctctaactagatgcaatagagactcaaagttcctcaaactatggaagaaagcaagtccatgtggtacaaatctagaagaatcataccaaaatggtatcacaaatgaaggacaccatccacgccaatcaacaagtaggggaacacaacgcctttatataagactcaacaccttacactatctccttacacacatcaactccttagacaaatcactctccatgtccccaagaatcattccctcaacccgaaatcgctttaccaatactcgaaaagcacaagaaaactcctcctcttctaataccactccctcttcatcctactcttacttcgaaagggcacactcgtcgatccaatcggccggacaacacgtctctgaagtcgcggcatacagactcatcttccttgactccaactcagtcttctacgaaagtctttacgttgatgatgtcgcgaatgcaaggattcgtccggctctcagaaccctaaaacaaaacctaaccctaatgagcgctatgctcactgaccgggctcaagccctggccatgagagaagtcatgaaggcctcgttcgaggccttcctgatggtcttgttggccggaggaagctctagggttttcctccggtctgatcaggaaatgatagaggaggattttgagagcttgaagagggtcttctgcacgagtggaggaggcgaagggttgatcacggagggagtggtggaaagggaggcggagacggtggaaggagtgataggtttgatggggcaatgcactgagcaactcatggaagatttcagtatcataacatgtgaaactagtggaataggagttgtaatgagtagtagtaacaacaatggttctggtaatactggacttgtacaaaagcttcctatgcctcccaccaccggaaggtggcataggtccgatccaaacacgatattaagagttttgtgtcacaggaatgatcgaacggcaaaccagttcttgaaaaggaatttccagctagccaagaggagatgatgatgatgattgaattaaagttgaaaattgttcataacatgattttttttcccttttaatttatttttttggttcagtaatgtttggatcatgggaatataattgtatattggtgtgtatttcatttatttgtatcgatcatattgtaacaaattccgaaggaaattgaggtgggcattttttttttttgtatgggataataagttttgagtgtttaatttggtacattgtaaagatatatatatctcaacaaaatttagctgggtaacatatataatttattatatatatgtatatcattgtataaattaatattatataactattatctaactgtttctcacttaataaaaagtaaaaatatttaggagtatttcaagtattggtatatataattacaacatttgatcacatccttgcaaaactagtctcatgtttcgttttgtgtacagggccatctacgaggggcactgttgaaatagttatgcagaaaataaaggaatgaaattatcgaataagaatttgggttgagttgtgaattaagttgttctttttaagatgttcgcaacactgtctaaaattgtacaaacaaacaatcaaccatgtcttcctcatgacagtccaatcgaaccactatatcagacttgcattgtactacagagaaccgtgaaatacatctaaaaa

SEQ ID NO: 187217 - DNA, 1094 bp, Cannabis indica
ctacttggcaattgatcttatctatttgaagtttgaacttcaaatttctcctctattgaagtaataaacaattaatacttcataaaatatccagcaaaatcattattacaactcttcataactttaaattgcgtgtgtaactaaacaaaggaaacagtttctttctccactctttatcccatcactcgtcaaattttcattctaatgtttttttttaaagggattttctttctaatttagtagataacatttcttaatatgttaaccaatttcggtagagagtaatataaatatttaaatgaaaaataaaaaactaaataaaacaattatgtgacaagtgaccataacatgctctatctctttaataattcaaaactcaaatgtcttgaccgacatcatcagatgttttaaaagttagagtttctccttacccgaaagatgaactatcaaactttttagtttttttttttttttttggtaaagaaaaagaaaaagacatttatataataataataataccttttcaagataacatttatttatctatccaaagtgatacatttgaaaaatcatttgaatgagtgaaaataaagaagaagttggaaactttgaatccataaactacaagccaaaaccataaagaaaaatgaccactgtttcatttcatgtcacttttcactttacaaaattttcaaacaagagtgacacaatacacataccaaaatgtaacattagtctaggtaagatgtctttgtctccataacataatattttcctatgttttattatttttatttatatatttctgggtgctgtgacaactcaaactacgtgtccaaattttggtgatgtttagaaagataaggtaagtagataaaatatgtctgatggttttttgggactaaattggtgaaaggtaactcttcattttagttctcctaacttaaccaactttggaactggacctgcctatcttcatcaggcccacaagttttaactactatttcttttttttctttttaataatttatatcccaaagtttagtactcactacactaatataaactccaagtttataattaattaattaaaa

SEQ ID NO: 187218 - DNA, 3542 bp, Cannabis indica
ttaaggagcgaaaattgctcctttttcttgagttgggattgtttattttggcataaaattgaggtgtgttaatgttatgatatggatcaagtgagtctacattaggacttacattgattttatgggagcttctaaaattacttggtttctttggcttatatataatatgcctcactcacatattgaatctactgcagaaatgcttgaattagtttccagggaattttgaagaaagttttttgttatattgatatggagaatcctagatatgtaatatggttgacatatttgataagttattttctcttgttcttctttattcattcattaccgttgattggttacccagaacaaagcataagatccagcataagttgttaaagccatttatttaggtagtttgttacttaatttcaagtcttggctaatctctggactttagatacttattagtcctgtccaggttaaagaggtttgttaaggtttctggtcttggctatgagttttaaggtagaagagcattgttgttgaacatgtcacaagtgtttggacattagatacttactcactagttagtctaagtatcagtatgaaaaatgaccacatagcaatagttcataagtataaattttgaattggatgttttttttttggattttgattatctgaaatgaaatttcagggctgcagagaaaagggttcctaaggaactagaatcaaaggcttcaaaagaagatattcccaaaagagacaagcactagtgtccatattgttctggtggtgcttaatcattcactcattttctttttctttccttttttattttccttttctggtttgttcgaatagtcaccacttcttttccctttcaaatacagatatgtaactatctaataaattgatatttaattttgttaaacaatattatcttcaacttttgttactagcatatttctgtaattggaattttgggtggacaaatcatgtctattttggccacaaatatggccacttttgatgattatggattaatcactattgtattcaaaggtaaccatcccacatgaccaaacctaaattgtctttaagtagtgaatctgtacatacatttatatatatacatatttatatttataaataagttgatggctgacaaggattctcatcaacaagattgttggcccttgtgtggtcttctgagtaatgagctcagctatgtgtcaacatgctcatcacttttattattattattattattcaatttctgcttttgttttccaaaatttgctggaaaggtctaagcaccagctgttaactcatgcactgatcagaataatatgatcttaatcttgaatagcaccttcaaaaactgtaagtcaattaagctataattacttggtctgttttgaagatcaattttttttttttatttatttatttaacccaacaaggttagttggttagaaacatgtcactatttgacaacattaaagatattcggttaatgtcgttgtctgatctcttgacttttggtcctcaatcatggtttttgtgttgggttacatccactattataaggccacgattaggggacttatttgtaaaatgtaataacatattattgttgattaagaattcgaaactattttgtacaaggacaagtttcaaagagtcctaaaaggcaagtttacataagtagaaaaatcatatctttagcaagaatatcaaaagaaaagaaacgaagaccatttgttactagctaaaataacaacatttctttagagcaattctttaaactttttttgactttaattgttaatttatgttagttagtagtacaaatatacttataatttacacttggtgaacgaaagcaacttactttgtttcttatcaataacatttatgtgtctcaaaagttccgacacatgaccatgtatagcaaaagcaacataatgcaaattcatagcaacacaaaacatctcataattgagtttagaaaaagaaaaaccagttcttgtccaagtaactatgccaagttgacacattgaagctttcagagaaaactaaacttcttattagaaaaacagaacatataagataaacctcataattaagactagacaaggcaactactccaaagaaattggaagcatgtgcattgctgctgcagcaccaccattttccaagcagtcttctggtcccatcctcagcatcatattgccataaatatttgttttgttaacatcataagctgggaaatgatgatgatgatgatcgaaaggcttgtcctttccatcattttggtcaagaagctgaaatggataagggaaactttcattggtttgggcccctaagtggctcacaccagagagttgggtttgatttgttgacagaagatagagagcacgaccacccgagtcgatgggtagtgatatctcttcagaagacagtaaatggttaccccttccttttcctggtggcttagatgggtagttcccttgtttggggtcatttttctgcaaaagaaaaacccttttatcaactccattgaaggaagttggaagaggactttcctggttcttgttattagtattattagtattgacctgtaaccgtttgtgatgaggaggatgactgtaaaatccatgattctgttcctccatttttggtctctaatggccacaaacttttcataccattagctgcatatatatggggatttccgaaatgcaagattctgggacctgaacatccaaaagtacagactgattgtacataaaagagcgatttttgtaaagacgtgaaatttagctaaagatatgaacttgatacatatatacatctttttcttcaactcttaaggtataatttaaccaaagtttcaaactttatgagcaaaaactataaaaagaaaagttccaacctttgtaaccagaaagaaacccctttgaactgaagtagagaggttcaggctgtgattttctccggcgtctgttgtgtccatcaaggcgttttctgcaactcctcttgatttcatcaaactcacccaaagagtggaatctaaacaaacccaaaaataatattatttgaagaatgaaaatcaaagtgagctcatcacaataaccatcatcatatgtacagtacctactacactgttggcagaatcttttctcttctcctttcacaacaacaattggggttttcgaatggtgctcacagaccctatggcgcttgtgatactccctacaattgctgagatctgctctgcaaccatctactaaacatgacagcttttgagaaccccccacaatcccattaaccctctttgatgatgacccagatggtgaagacaccaaatttgagtcccccaaaacttggtttggtcttttcaatgagttttgctcagttgggtcattcatggtggtgaaagaacccaactttaagctctctgaagatggagctgtagtagaactactactagtagttgttgttgttcttcctgagctaatgaagtcaaataccaaatcatcatcatcatc

SEQ ID NO: 187219 - DNA, 2716 bp, Cannabis indica
atttaggtattctacattaaaaagattcaacgttggcatgactatgagtagtgtgactgtgcatatttagtgtgtgcatatcataacttaaaattaggagtgtgtgaggcataagtagttaagtacatgttgtttttgtgttgttgcaatttctttatttattttatttgatattttttttttctataaaacataccttcataaaactaaagtggtgatcacaccaccacccaaaagttcaaaaatacctaaaaacattagcatgggcttcccacaccagaagctggtgacaaaggtttcttgacaactaatgtgttgtactaattgcaagagtttgagcaaaataaaaaggaagagaaatgttgaggattcgatatgagtcaattttttttacaagcatgcaatcttcaatggaagtgtgcctccactgttgcatagaccgatttggcgtggctacaaacagttcatctagtaagctttgcttgatgcaaccagtttacaattttcgtgaaaccttcacacaatgtccaaattctttactgttcgagctttgtctcacaaatcgtcttctcgcctttgtcatgatgagattgtcttcaaagactttcactcgcgaaggtgatcgagttggacttcttgctcaatgcctatcccaactcgtgaaaacccaactattgtgaaaaagacattcttacttgttacattgattttaaacgaaaagttcacaatactctctgcctataaataccacttatatggtaggatttattctcttccatcttttgacttttcacattcgaacaaatattaccctgtctaacagatttatacatagtattatagttgttaatgtaaaatttagatatgagacaagtaatataatcactcacattttgcaagataagttatcatgtcaataagaatcagactatcaatttatggtttattaaagaaatgagtcaaagacagataaaatacacttttctgtttctgtatctactttggatataatacttacaaagtacaaacaaacaacaaatgtctcacaaaatgacaccactccaaccatattctgtgctttcttgattgtggcacacacattgcatataagtgttattatgtcaacattgttaatctctcatcaaaatacacagaatttggtatcaaacaagaaaggtaaactgacctcccattgtggattggtagtgttatgtgttcttatcatcagcctagaaatcagtgtcaaaacaagataccataaccttggataccatggacctagcaaaagggatgtagctcaaactgtacctgtgtcatttgattacaagaccaaattaatacacaagttgttagttactatctatatctactaaccaaaatacacataaaagaaagaaacaagggaaaagaaagagggtaatttaatttattaccagatcaaagcaccaaactctaaaataattgcaaagagtgtcaaaaacttgttatgaacctgcaaaacaagaagaatcatagaatgaaatgatgatgatgatgatgaaagtaagataataatgtatggtttcgtttggtacccgtattaaatcgtattgtatagtattatattcaactatattgtatatcgtttatttaaggacttctatctaatttcgttcaattttactaatgcagcgattgtctctatatattaaatcatgcctcaaaactttaatatctactaaattgtgctcccaaacattcacatgtaacaaatcgttcaattttactaatacaacgattgtctctatatattaaatcatgcctcaaaactttaatatctactaaattgtgctcccaaacattcacatgtaacaaatcgtgccccctaaacattcgtatatgtcagactttcattagtaaaattaaacgaaaatttttaaattcaacaattttaatagtttgggaaattattaacaaagagtcatgattcggtacatgtcaaaaatatcaaagtttcggcagcaaaaatcataattagccaataaggtaatatggtgtaataaactgagtcttaatatatgtaaaacttacatagagagcacaaaacaaggcaattataatactagcaaggtatatggccgtggcatagatacgaacagggtcaagcatcatggtcacctgtcgtttagggcctataagaaatcctgtgctgcaattagaaatgaaaatgaagtgaaaaacacaaactcattcattcattcaatccaaaacactgtaaagatcaaagctcatcagttcagctcagctcagatcagagcaagcagactaaccttaattacttaccttcctagcgcaagaagattaccaagagtaaatgcgattccaaacttgattggattaaagaagacaagcattgactgtcaaaatctcggttagttagttaatcactctcagtgtcagtatgagcagaaattggatttaaaaaatggatttaccagaagagtgcaggccaatccagaagccaaacaaattgcgaatccgtaaaatctctgagagaagatgagatctggttatggcgaaagtggattgaaatgaagaaagaaagaaaggttaagtacctgagtggtggacaaggtgcaattgcgattgaaatcgtcaatgaaggaatcagattgttgagcagagacttcttcttcgtcgacttccatgcctacaagcatcttcatcctctccactg

SEQ ID NO: 187220 - DNA, 1987 bp, Cannabis indica
ttctttgggtgattttaagttgttatgcagatgggtctaccacattgagtgagaaagaaggaatggttttgcttttgtttcaagtgtctctcatttgtcttataactttagccctcagcttgccaccaaactgcccatatgaaagattggaagtcatgaggtttggtttcccactttacctctttaaatgctaaactagacatgaaactttataaaagttgtagactttgtatttaaaaaaggttctttttttagggattgtttggtgatactgagtgaagttgaagaaggcttgtcagtagttgctgggtcactttcaatcaatttgacattctctaaggctctaatcagttataaggtaagccacttgattgctgatttgatgtaaaatgatgttaagttgtgcatggcaaattttggtttgcttacagttgctgaaatggcaaaagagaaaatcattagtattgttgggtaatcaccatctgcatttcattgtcatttgataccactgtcgagatttgaggtcactgtggttgttcaagtgttgtgaccattgatgctatgctcctcattttttctttctaaaatatgttattttatgagattaatttacttaaaatataagagatgatgaggtgtgttatcatcatgattaattaaatattagccattaattcaaaattagttgagaagtttcatatttatttataagaaaaatattagtttggtacacgtttatttaaataactttgttctgcacctgaacattttcaataatttttgttttagaatataccattttagtacagcatatattaaaattaaaccctttttaatataatatggtatgatcatttgttttgccgatatataaacttaaaactttttctagggtagtactatttgcctagggtttttttaaaattaaacttgcactagattttgatttttttttttttaaatggcaagtataaaaaatactattatgctcagttttctttattttacaaaaggaataaataaataataatatcaaatttaattatacgcttggttctggttacatttgtctaaatgtaattattttacttttagttaaatgaattaaaaaagaaaaataaaatttaacacttttccttcccatttatgtagatttaatttttaaaaaattaatttaggtttagtagaacttttgctaaattgtcttttaattatattgagaaatttaattagagtaaaatattcatgtttaaaagttgaccaaaattaagcatagtactattttaataaagtcttagaaaacaagttaaccattgaaacttttctaaaataaagagataaaatggagagcttaaaactttttttaattatgaatatttagctaaaatggagatgatcaaaataatatatttttaaatatttctatttttatcaaatatatcagatagtttacataagtatttaacagtcacattcaaaatactttatccaaaataaaaatatgttttgtaaaacaaacaaaaaaatattattagaattttcaatattgatattttaagtgcagctaaaatcaaaagaactaaaataatattgatttgaattcacttcatcttacaaagtgaagatcttatctgatttttcaagggatcaaacttttgtatccacatactctcatctcgtaacaaataaggttaattaagatttccgcctttaaccaaaaattagattttatcctgaattttcaagtcgttaaaaaagttatttgaactagattcaaaaacttctgtccagtttctgttcaatttgactaacatatgcctaaagtagcgattgtccatatatcaaagcgtgcctcacaaacttctgttcatattaggcccccgttaataaaattgaatggtattgaatagaagtctataattctaataatcttaatatttcaaggggaatttttaacgacttgaaaaatttgaggcacaatttagta

SEQ ID NO: 187221 - DNA, 4763 bp, Cannabis indica
ttttctctctcaaatgagtgagccttggcactagcagtttccaatttttcactcaactgtttgatttgcagcttcgttgatgccatttcagcatcataactatctacttttgatttagcagcctgcaccgtcatagccagttgcaagcattaatgttaagcataaaaagctagttgctgatcaaaacaggcataagtgagaagaaagatgaacaacataatatttattgatcatgtgaaaaaatacagcttaccttcaactctaattttagtgtagtcaagcactgctcagcatattcaatcttcgacgccttatccttcagttcttcttcctgtatatccattaacaaatataaaaaaaaaattacagaaacagtatagaaactacaaaccacaaaaaatcagcaccctgcgaatacaattgttaactatgaaaaatttaaagagatggaagaataaaagagctcaccctctcagccaaagtaattgcaaactcttctctaagagcatcttctcttttctgtgtttctttgcttgtgcgctcttgaacaacagcagccttttctagagcagctttagcttccctaacagcaacatcatacttccgcttccactcctctgactcctcctgagctgactgagcgtgttccttagcggcagctagccttgcttcagcagcactgctccgagacttgagaactgcaatttcagaacttgcttgatcttcctctgccttctgctttgataagatctgctcatattttctttgccagtctacagattcttgctttgctgaatccagtgccttcaacaagctagagcacctctcacccagtgaactgcaattactctgtaagtttgctatccgagccatatattcatcagctagctgcttcttctcgccaatagattcctcataacgcttcagatattcagactttgacttatcacttgcttccagctgcttgttaagcaacgcaagcttatcttcaattgatcggcattttaatagaagagtatttttctctgatccaacttggtcaactaatctcttggtgagatcaagtattggaccttcaaaactgggattttattgaattcaaaaggcatgcccttacacacattattcacacacaaaacgaaattaaaacaaaggaaaaatcattgcaaaccttttctgtaagaacatggccagcttctgccattttccaggaccatgacttgacttttcatactctgatacaagaccatcaaggacctagaaaacaaccaccactgaacacataagataagtttcccttctaactttttacaagaaaatgaaggtcaagtctacatacatctatcaaagaagattgcaaaataaaaacaaatcaacaaaggactacaatttatatgggaattgctagatgtgccctttgtgactccaaatgaaaaacatgttcacacaaaattaaagcttcaaatagaaaaaagaccagctccactcacaactccaaagccaaaggtttccacaatagctaaagctctatatacttaatagcttgtttctggagctaaaagctccattggttgctccagagtagatatttcatatgcaatttacagggtgattgtcggctgaaagaagattcagagtggttcattcactagactaatttgcagggcataacatggtttcttatacccttggaatttcatttcttattcaataattattgcaaagaaggggggcagggatgaggaaactcgataaatttcgacacaaaaaaaaaaaatgcagtctgagtaataaaattgatacattgttgaaactacacttaacaaagaagactaagaaacacacttaccaaaaatgcttaccttcacaacattgtcgaaattagcagcactagcatggcaagctgttctaagcttcctttccatgctttgcaaagcatttgaacattgcatttctgcttccatataagcactcttcttgtaatcctgtgtgtttagccaataaaataattaagtatgctaggtgaaaatgatcaaacacatgagcatgtatacagagacagccactgctgcctaaaataggtagatattcaagagtgctactgtgctgaaagtcatccaagaactacattcacatgattgctggttgttgaagcctgtctacatttagtggtttttatgttcttaggctgtagagtgcataaacctaattttaaccattgagctgaagtatttatttgataattacctcaaacgcctttttgaagaacttctgcaaagttccctcatatttctttcttactgaaccagcccctacagcagcagcattgaatgcagccaatgatttctgtactgcttcttcatgagcatccctcagcgtatcctacaaaaatgtgtttagaagaaaataatagaaacctgataaacaagaatactgtatcatcacttacttcttctggaggctttgaacggtcaaatgaagacatataaacctctgctgcggaatcatacgctctccgacactcagcttcttcaacactctgcgaaggatttataggtacgcataaaatgatgatacaaaaactctaaaagtaatcccaaatgatgtctcacaactcatgcttacaacaatagttaaacaagtgcaaataatatttgctgattaaaaaaattggggaagtgaactccaaatttattgcatgcactcattaccacattggctcaataagccgtgaataacattatttaaaagtgaaagcagtgattcaaaatagtactttagctgattagactgagctttggatctaaatattgacatgtttcatacccactctattaatctgttgaaacttttgttatcttaatattagcaagtttatataccccacttacatgacaagacaggcttaatatccttttgggcatctctgctcacgtcatatcttaatttgtacaaaagacgttattgtgaggtggtaaggccatctccaacccaaacattattttaaagctgttcaacttcactttatcacctttaattactatttcatcctccaacacgctgcttcaaattacttcaagaaagaatattcttctttttattcctttttatcatcaataaataatttataatagcctataagagaatataaatatacttgaaatatattattaaggctattgtaggtaattaattctgactatataactagttttgccttcattattgaagtcaaatagttgatttcttcaaaatagagataaagataaagctccattactaatttttgtttcaaaataaaagtggctttagtagagccacagttggagatgcgttaatgaaaggcctcaaggcttctaagcgtatgcctccatggggtcaggtgctgactcaaatggcccctaactgtgccttctggactcatttctaacttggttgcttggccaaacactttaatgggttcagtaagcccaatagtgattttaatgcaatactgacagcccaatctaaaattacattgatgtataaccaaaaaaatttccttgcactgtagattatattgctatagaaaattaaaaataaaatagaaggcttcatttgtttccttaattgaaagttttagatagcttgtgggacattttatcctatctttgagtatgtaatttcaattttactataaatttctagcattaatttatgttaaagatttattaattttgattaataatatttggcactttcaggtagtttactggtacttctataattaaatgtttgagacttacacctcgcctcaccaaaacaaaatacatagaagttattttgcaaagtggttattggcataacctggtggtactacatctctcctcataaagaggtgtcaagttcaaattccctctcccaagtgtcaaaaatgtgcttttcaaaaaaaaatcctccacttattttgtaagtacatggtttaggaaagtgttagaaatttatgccttataaattaattctgttgttctgagtcagcaaaaaattaaactttcgcctcaatctatcaaaagtgtaggtttcaatactctacattctgaaacacggggtttcctcatttttattgggcttcaaatttattggatttaattaaacaagtttagtcattaaatttaaaagaaaaactaaagtctggtacctctccattcttcattcaagccgtgaagagagaacataaccaaacgcagacaaccagcacaattagggcttaaaagacttattttaaagcttcaaaaacttaatttaggacaaaaaacttgatttaggacaaaaaacttgatttaggacaaaaaacttgatttaagactagatttagactaaatttaaaatctagcatgattttctaatttgaagctttaagttgtcttgaccctgtgtttacttattacgttttttttttcgatgaattaagtttatgttctgttacgaatattgtctgctttcttaattttcataaaattcaagacctccaatattattaaacctttgtaaccactaactttctagtcagattttgaaaatgatattaaaataatacaaagaatacttctaaccacacacatgcaagacaaagaatccgattcttaatattcattcaagtgcaaaaggttcaaggtagtaacctgccatgaagaggatattgttggcactgcacccttattgagtgcttctagataagactgcgtaataccaacaagaattggaccagtcattatggttgcccc

SEQ ID NO: 187222 - DNA, 1525 bp, Cannabis indica
tcagaataatcaatgggagaatgtaaattaaaaaaatttatcacaacaaaaattatctacagatgcagaaattaacctccccaaatgctccccgtccaatgattgtcaagagttgaaagtcatcaacacccattttatgtctttgaaggcgcatgtactcagtctccttcttttctagatatttgagaatattcatttgctcttcctcagaaacatcagcatcggcaagtcgcctctccaagacccaccgtctatatttgatagaagttaaaatgaaaaccaataatatgggagaacttcaataagcaatgttgtaagaaaacacagcaaattctagggaatatgcagtacattaggcaacaaaagaaaaataaattgatagcatgtacactattaaacaacatagccaaggcagcatataagctcttgtaaaatgtaagaaaatcacagttttagacacaacaaaattacagcaacaaaattacagcaacagcctctccaaaagtgttagttgaagttaatagtgggctcattacatactcttttttaaaatgatctctcgtgcatgtaaatacttgatgcaagattcaggtgcacatcgaaaagtaacaaacaacagctttaataagaaaaattttcacaagcacctattgtactattttaatgatagatttatgctaattaaatgtacgcttgtcaacaatttaagaaaaatgaggaggcatctagaaagtagtaatatttttactttaggcatgtccaaaagccatgaaaaagagtatcgttgtatcttaattcctttaataatttttagtaaaacaccaggatatcagaaatttttagtagtgctgcacaatatcttttttatcagtatctcataaccggagtcatcaaaacttacgaaaaaactaggaaaaaaactaaatacatcttgcagttagtaacaatacaatcttaaaaaaatattacaatccaaactgtagttaccacaaacagcatgagtttttatagtcacacataaaacacaaaaagaatgttatatgaagagaaacccatggaacagctccagcagccaacacaatacttgcatatacatcacaatcatctccaagccagataatttgcatatatgaatggttaaaaaaaatgagaaaaatagtgctttaatttgacacacctacctctctttcctatcttgcaaacacttcatttgagatttgtaatgattctctatatactgcttagctgcttcaactttttgttttgttacatttgaaggtgcatcatcaataggaggcttgttcgcatcttttaaattatctgcacccttcttttttgttggcacaggctttgatctaggctgaaatttctgaaaccaacttcgtgctgaatccatgactatgatttaagcccttaaacacaaatgagcatattcttcgtgactctatctaaaaagattcattgattaatgtacatccaaaatccagacactaacaagtaaatgccaatataaaacactagagaa

SEQ ID NO: 187223 - DNA, 1035 bp, Cannabis indica
tattattattattatttacaaaagagattcaaactacgacacccacactgcaaagtggaagcaccttaattttctaatcatgtgtaataagtattttctttattttatttttcaacatctagtttttcttttaattttattgtaaatttgaagggatgcactgcaatgataatattaaaggaaagtagtttgttaggaacagctggaaaaaggaaggttttgaggaagaattagaaggaaaaaagaaaaaaaaaacattgacaatgacattgatgtcaaagaaaagtaagtcatctaggtcatatggtgtgggcctacttgataaaagtttgggtttggtaacacagttaaaagagttttgggcccaacatcaaggctaatctaatcaatgttttaagacttatcaaaggcaaagcaacaaagcaaaattacttattaactttttccagtttgtataaacactttattggatcctcttctccacactcatcatgaaatcacacaaacatttttcttttcttcgtaaaaaaagaaaaaataaataaataaagaaatggtttccaaagaataaaaaaaatgagaaggatggagggataaaatatgaatgtgttaactattccgtcaataggctacatttgtcatttggggggacagcttctgcaaacttatttgaacttttcttgtttttcctatcatattattgtttgtattttttcttggtaacaaaatgatttcctttcacctttatagtcaacaaaaccaaagagaaagaaagtagaaaaacaatcctcacatatgatgatgacccttctcactaactagtcaagtttttgttgttattttccacttgtatcttcttcttcctcaacctctacttgtttttcttttttactctcattgtgctctgaccaagtcaatatttataactttcgcacttcattagccactgcttattaactccattctctcgtagaactgtaatagttccatccttactatatagatagatcacattcacataatatatatatatat

SEQ ID NO: 187224 - DNA, 3069 bp, Cannabis indica
aaaaaaaaaaaaggaaaaatagatagaaagagcagagaagagaagtagacataacatgcattattgtttagttaaagctggtgaaatgcaccatcttccactctattccattataccttttttctcaatcacttatctcacaaaaagtaaaagctgatcttctcacatgccctttctttctctttcttttgctttaaaagtagtcttattaactagtaatagcattatagtagtattagtagttggtttcattttagacacagctacccaaacagaccatttttatttatgtatatacagctcatcatatctttaaaatctcatactaatccactatctgattctgatgctgtggtttcaactacccaatttcatacaaacttatactaaatttatattaaatgtactcgtacacatgatatatatatatatattgctttaagatttttggatatgatcatttataatgatagctttataaagctttacaaaactctagtgcattctattatacagctaatgaatcaaattaatgaaattgtttgtttgtacttaaaatagaaagaaaagaagagaaggaactcattttaggccaaacaaaacgttgtggccttattaaacttgatttggtgtatgttgaaacttcacaattagtcattattaatttgaccactaaattatcagagattgaatcaagttcttaagggcgcatttgtggcgttgtagttaaatttgtgtgtaatttgacatatttatttgattatgtaattacattataattgtgtaatttgaggtaattgaggggttttattacacccatcaatttttatggccccataaaaattgagtataattacacggtataaatactaaaaacttttcattttaaatatttattagtaaaaataggctaatttagatttttaccccctaaactttgacatataccaaatcatactctctgaacttttctggttgttaaaaaattcctatcaaactattgagattgttagaattaagaatctttgtctaattttactaaagaaagtccgacgtggttaaaaatttaggcaattgatcaatacatgttacagttcaaggagaatgattttataaaaatcaaagttcggggggaacgatttagtatatggacaatcaacatattagcaaaattaaatgaaattagacaaaaattcttaaatcaaacaattttaatagtttagagaatttttaacgacctaaaaaagtttaagagcatgatttgatacatgtcaaatttaaaaagtaaaaatctaaattttatttttctacgtaattaccatctattttgtcaaataaaatattgtgaaatcaatatataattactatctaatatttaaatatactttatattttaaaatacaatataattactagactatataattaccactctaataattacactaaacacaccctaaagaaaacaggaaatttgaggatcaataaattaaaaatttaataaagtaaaagaactaataataactagctaaaccagtgaaaaaagaaataaattataataaaaatcagaagaacctgaacacattgagttatcatctattaatataagtttatagaaatcataattaccaccaaccaactgtaataaaaacatattcaaaccagttactaccatcattatctgaattatcttccttttattatcttttgggaacagtttggtattaacccttttttaattactattattattctccataactttctcctgaaagggttgtttcttttccttgattttttttttttgggttgcaagcaataatggctgtttcctttctcatcttcaccactaaatatatttattattattatcactcttcatttccctcaatgtggtttttattatattctttaatttaatttgccagagctctattaatgtccttttagtacagttagttcaactacaatataataccaaaagtaattcttttttattttatttttttttctctttgtgagagaattagtatattaattatatcagctttcttcattctcaatcattttggttgttgcctgtctcttctctgttctttttttctttttaactgtgaaaattagctgtaacttttgctcaaataaatctcttgagcaaatatctgaaactcattatattactcttgtcctactcaactcaactcaactcaactcaactttggttttgttcataagcttaatcacttatcttggttttttctctcttgtcctactaagttcaatcaactcagaaatagtaacaagttactagttactggttactttctgttattctgttcttggaaaatgcctccaacatattttccattaaggtgggaaagcacaggagatcaatggtggtatgcttcaccaatagattgggcagctgcaaatggacactatgatttagtgaaagagcttctcaaaattgacagcaaccacttgatcaagctcacctcattacgccgaattaggcgactagaaactgtttgggatgatgaagaacaataccatgatgtgtccaaatgcaggtctcatgtagctagaaagcttttccatcattgtgaatcaaagaaaagtaacaagaactcactcatcagagctggctatggtggatggcttatctacactgcagcctcagctggtgattttggttttgttcaagaactacttgagagaaaccctcttcttgtttttggtgaaggagagtatggtgttactgatatactatatgctgcagcaaggagtaagaattctgatgtttttaggctcttgcttgactttgcttcttcaccaaggttcatggctggtaaaggtggagactttgaggaacatattggtgatattccttctgtttacaagtgggaaatgattaatagggctgttcatgctgctgctagaggtggaaatttgatgattctgaaggagcttcttgctaattgttctgatgttttggcttatagggatgttcaaggctcaactatttttcatactgcagctggcagaggacaagttgaggttagtttaaat

SEQ ID NO: 187225 - DNA, 1551 bp, Cannabis indica
cgtgaagcacttacatagatcccatgtctcgtatggcagttgcgctcttgactatacatctatctttggccatagcaagagctcctttggctagacatgtgttcacaatgagaggaagcatttgaggagtgagggcacttgcaactgagattccaaatagaaaactaccactcaggatgtgacacgaaaggtcagcagttacaataatgattatgactaccccaagaataacagtaaccacaacgtaagatatgcaacatatccctttctcaaagtcatctggtagtctttgctttcccatggttgaaaacatggtactcatgtatgtcttggatccagttgaaactaccagacctgtgccgctacctgatattacatttgttccctgaaatatgtcatcataattcaagattctattcaatggtaagaaataatgagtgaatactaagttacactattacaaaatgaaataatttattcgagaatactgaggccacaatggatgttttgtttaacaccacatgctatgtcagtttgttagatgtaaaagaagagtagaagagtaattatacctaccatgaagcaaatgttctttaaatccaacaaaggagtggtaatatcttccttgatatcagctgtcttctcagttgtataagactccccagttaatgaggcctgactgtacaagaagtattagaagagtcagtggtttttaactctaatgttttcttttgagagatagcaacgaaatgacgtgaattcccatctactgaatagcgaaagttatcagaaacaaataccttacaacgagatattttgaagataacaatctcacatctcctggaaaaagatctccaggctcaaatatgacaatatcaccaggaacaacatctctttgatcaacctgtactactaattctgtttggacaacacggccagcacatctttgaactttgattggacaccttacaaattctgaaagtttcatagctgcttttgagctgctatattcctaaattgagcaataacaatattgttataatcatgccttattaatagaaatagaaacaaatagtttcatctgttaatgaagatttataacaagcaacaacacaagacaatatatacctgataaaatctgagagtaacactaatgaataccaaaaccagcataatgcatccatttgggccatcactggctatgtatgagagtgcagacaagacaatcaaaatgatattaaaggggtgaaagaaagcaacccatagaagatgccaccagcttggaaatgaaaagtcaatgggaacatttgggccagtttctttcaatctcctctgagcttcagtgaaactcaatcctgtaaataagtaattgaatgttctatgttgagatgactttactgaacttgacaatatataatcaaataccacacatgtaatactagcatttcatcaaacacttaaaaaaaaaataagaaccataatgttaagaaaagttaaaaataaataaataaataacaacccacccctttcagtggattgaacatactcaaa

SEQ ID NO: 187226 - DNA, 2103 bp, Cannabis indica
caattacaatcatgagaaacaataaaaacagtgaaactcatcttgcacacatatatctatttgagttaaacagcagtagaatcgcaacatttcaaagatcaggttagagataattcaaaacagtaaacaatcacccagtaggtcaaccggtttgtccatgaacagtctgacatattatgagtttaagactaggagattgtatcttgaatgtggtttacatactaggcactttagtaggtcagattaacccattccattagaagtgaaaatctaccatagaagatgttctatatgtggaaacaagaagctaacgaaaacagtaccacaatcaatatgtgttaatcagactagaggaattaataccattttttaaatattcaggaggcgtataagcaagattagtactgtaactcttgccatctctactatttttcatcaagccgaaacatgaaaggcgtggatcaccatcctacaaatttagttaaacgttaaataatgaaatcagatcataatagatgcaaaatcaaagttttgggataatatttcaattgtagaaacaacacctcatcaaagagaaccctatatgcattcaaatcatggtataatggatgacccccagaactacaataatccaaggcttcagcaatataaagggccactcttaaacgcatggcccactcaattgtttgattttcccctgtcaagaacaaacaaagccccataaagaaatttgagataaacaatatccaatgccttcttcataaatgtgaaaccaaaacaacaaaagaaaagacagaaaacacacgcacaaaagcctacaatctaggaatagacggcaccaaaaaaaaaagtgataaacaaagagaaaaatatcaaaaagagaacacaattttgtagaactaaagagacaacattaccacattcacattaaaacaattcaaaactccatcaaatcatcacccttaatgcaaaccacgataaagagagattgaagataacatgaaacaaatgtgcaagcttttatctttataggagttattgatacaaaagataattaaatttcagtagtagttcaaatcaaataataaaaaaaaaaggaagagagaaacttacagtgaaaaagatgcttagcaagagtatcattgggcatgtattcagcaacaagaagcctttcatcaccctcacagcaatacccaatcaagttagctagtctccgatggcgaaggtttcccacgctactagcttcctcctaagaatcaaaaacccagaaaagattccaaaaacccacataaaaaacaaaaacgcaaacaaaattacctaattaaacagctcagctaccacaacgaccaaccacaccccccaagtcccaaccccaaaaacgaaaagcaaaaaatatacacaaaaaaagggtaaccgcaaaactgcttgggatcaggccaagcgatcttggtaaacttctttacagcgatccatgacctgttctgaaagacgacccttgtagacaacgttaggggctttctcaccgctctcggagacgatgaattcggagctgaagttgttggtagccgctttgaggtcggagaaggagaactcagtaaaaggcggggcaaccccagttagtggctcgggcccaactgaaggaggagggtgttgttgttgttgttgttgttgtagatgttgggtcgggctcttctccggctgagattggctacaacaacaatgattgacaacaacccatctctctctcttacctctggtttcctttgtttcactgtttaaagctgcttattagccaagccaactcagagaaaccatgaatgaatgaatcaatgaattgagtgggtgggtgagtcagtgtgtttaagaaaaaaaaatgaaaagtagagagagaaagagagaaagacttcaaatttcttccccagtaaaatacactaaccagtattctctcttattattattcttaattatcttccttattagtttgttctatgttaaagttagttcctacggtaataaatttaggattacaaaaatcattaatcccttcactgtctacagtttttctcgttaaaatgttttttactttttcattccttaattaac

SEQ ID NO: 187227 - DNA, 1718 bp, Cannabis indica
catcatcatcatcatcatttgttcggggaggaaagtaaatagcaggggaagaaagatcaggctttattactttctcaggtgaaccagtggagatagccgaccaagatttgagaaaattgcttagcattgcaatgtcgttattcttgtgacccaaggaaatgccgagtgcaattcctccacaagagaatatgttcaattggaaggcaattatgggaacgtagtcctctgttttttcatgggaaaagggttgaaatgggactagttggttctgtaactcattttctccttggaacaactcagacatttgacatttgactttggcttctatgaaaatcacaccagtggagaattcatctacgtatagattatttttggttttcccagaaagtgggtagtacaatgtgagtgtctctgacaaggatttcttcagttgggttatggctttggaatggtctgtggtgaggtctttgggatcattgtggatagggtagaagagaatgatggagagataagtattagggatgagctgatcgaaaaggcagaggttgtaacgtttcagattgtgagtttgtgaggatggcttgattatttcttttgagacaatattgagctccattattaggatatgtgtaaaggaatcacttagagtgtacaatatgcagtggcttgttctaattctagtacttatcccatttatttatagtgttattaataatttgacaaaaaactttgccaactgccaacaaccaaattaaattacattaaagatggttgatgaatgagataaggcattagggtatttaactttattattgctattgatctaattaaatattaaatcttatataatttaatgtaataatttttaaaaactatcactaactaatcgcgaaaagaaatatctaaaaatgcgagatgctctaataacaatattcatagaaaaatcaatatgttgaccatgtggttaacatttaaagttatgaataatgatacatgacaaatacttgtcattgcatataaatgccccttattacttgttgtgttttcagtggacatagaagttatgaattgtatcatcactacttttcagtggacgtagagttatgatcgtatcacggtgatgaggcatctatattgttatgaattatgatcgtatctttaagttttcatttcctatttatgtttatattgaaaaaaaaaatatatagtgtcatccaaatataaatatggtatgtagatcatgttaagaggaagagatgtcaatcatttcttctgttgtgaatagtactgcgagcaaaaattttgacaatcttactgagcatatatatatatcaattaaaatttttctaaaatgaggctaggtttttgaattttgatgtagattataatttgagagttcattcgaattggataagtttttttgatatgattgtcttggttacttattaggactgagttaacatttatggcaagggatcagattatatataattttatcccaatttttaaaataggtgtgaaatacaatatataattttaaattttaaattttctattgataaaactaactaaattaatttaaaataataaaaaagtttttagggttttcccaagaatactctccaattaatgcatgcatgttgtgataagacttaataacaaatatgcctaatatttaaatgtttttttttaattgttattattagatcaactacgag

SEQ ID NO: 187228 - DNA, 1636 bp, Cannabis indica
ttgaatctcaattaataaacattttcttataattctttttcatgtagatgtagatttagtggccattctctctttgtggtgtaaaaggaggtaaattagagaaggaaacaatggagactaatctatgtgatgtgaatcatttggattctgatgttcttttgcctcctcgtaagcgcctacttgcaggcctcaaaaaacagagttcagatgttgatgcttctttgcagctgtctctagctgcttcctcctcttcttcatcacccgccttggctcccaaacccggctctcctgcatttccttcatcacctacctcggaccaattcaacattcgtctgagcaatctgttgagctctcataataatgctaatctatctcctgatgaaatagtagatgcttcaaaatcagcagcggcttctgcagttaaggcagcggaggctgctagagctgcagccgaagaaaaggctgcaatagcagcaaaggcggtggctgctgcaaaggcagcattggatttgattgcttctttttctgaagaagctgtcaacaaggaaagatatctgaaaaagaacaagtcaaaaaagcatgtaccggttcagctattgtacaaaaaataccaacctattcagaattgtaagaaggatgaggaattggcgcgtaatttgcatagagctataaacagctcaccaagaatatcaaagaactctcctagtcccgaatacaagggtcataaacacaagaaacttaaagccttatcgagttctgataaaactagagattcaaatgacaaatactacacatctagttgtaatggacaacgagaaattgcaggcgaggttgattttgaaggtcctggcagagagttatgcgaaagtaaagcagatgacaaggtatgtacatatgataaagctggacaatcagtagatattggagaagcagaaataggtcagccaaaggagaaaattttagatgatatttgtggtggtagtggtaaaaagagaggaagagtgaagctaaagaagttgcctttaagcatgtgcaacttcagggagcaagctactactcccaaaggcgaggtggatatacgaaacacgcccttgactgatatgaacatgggaaatcctaaagctggtaatatgtctttgtttactactactgtagagtcttctggtgagggagtgatgccaattgaggcgaaatcagtttggaaatgtcaggggttcaaggcacctgaatgtgtcaaacaaaataaagtggtgcagtcataataattatatgtccaactcctccaaaccccattgttgtgacataatatggattccaatccaagatagaagtttgatagctgaggtaggattcataatcataatgatgctcttcttacagaaaaagaaaagaaaaaaaaaagaacggctttcgtttgatcttttttgtttaaaacttgtcttttgtaatgggacatgaactgaccaagtgtaaatttagatgttaaattgctttgtatccatgtttttacaatacaggatttgccttttgttcatttgacggcagatcatcaagttgagattataggggttgcaataaatgtgtaaggttggttgcttagtagagtcaagagtgtacttcattgtgcctttttttt

SEQ ID NO: 187229 - DNA, 701 bp, Cannabis indica
ttcagtcttcactctctaatgttctagaggcagtgcattgtcaagtttaactgcttcttttgtcaatacacaagcaaagctaaagcttcccaaaaagttagaaaacattttatttacttcatacacagggaaagcttatgaaaagaaaactttcttcattttgtgtcatactcagtaatacatggatggattttgtgtacaggaaagtcaagaattagattgaattggattcaaaggctaaaggtagctcttgatactgcaagaggcttggcttatcttcatgaacttgtcaaccctccaataatacacagggatattaagtcaaccaatgtcctcttggataatcgattgaacgcaaaagtggctgattttggtctctcgaagctcatgggtgatgatgagcaggatcatgtcagcactcaagttaaaggcacaatggtaggtttaacctttgaatccctcgactaaatcaaaatagcatgtgtgcgtacgtgcataatgtttgtgttacacttacagttgacttgaataagtttgcaactgggccttctaaactaaataaaattgtttagatgcacgcttgaatgcttaaagccagatcacacatttttcctttccttaggtaatttcttagaaggaaataaattgtatcttaaaatctgcatttataatttcacatttatcattgtgagaatatattt

SEQ ID NO: 187230 - DNA, 2696 bp, Cannabis indica
cagtcttactattaattttttattacaatcttttagttaatatttatgctcgaaaacaaatgttagattattttttttgattttttttatgatggtattcgttaaagttacaacatcaactttttgaattttactttttgaataggttacattgttgaaaataagtttaaagttttttaaatacacgcggtaaacttgaatattagaactctatttctaataccgtaaattattcaaaaaaaaaaatattcttatgtataattgagacgtgaacattaattaagagattgtaattaacgttgctccaataaaaaaagaaaagtggaaaaacatatacaagaagagggaccatagtcaactaatcgtggcgatttgatgatagatattttgtcggatccacacaaacaaacccaacctaacacgtttgtaacccaaaaaaaaaagaaaaattaaaaaccaaacctttttccttgcagtgtcctaacctaaagaaagcataggataccctaataattttgttgtacaccattttaaaacccttttctctttttctctctctctcaaagcaagaagaaagaacccaacacccttttcataaatcctgggaaatgccctggaatagttctgtcatgggatctggaacttacttggttttcacctattaccaatattatatgggcaagttgtagcagatcaaacctgtctttactatgattaaaaacacttgtattagtaagtacactaagtaagtagtagtaagtaagtaacattaatatgtatggggtatttctagaagggatcatcaatgtatgagaattcccatgtttcttatgacatggcatgtgaatatcacatgcactgaactaagactaataataaagagcaaagcaaaaggaaccatcccaccgtcactactagcttgcttatatatatatatacaatatatattaatacattgtaaagtgagtaagacaaattctcaagtcaataaggcttaatagggatgagctgtgatccaagagggttttctcttaattgtttcctctttgggaaaaacatattagcattgattatatagtggaaatatcacccagtttttcagattaagtgtcaccttgttgctataatatgtgtaccaaaatattaagactatgtttggtagaaaggatttttgagtagaaggagaggaatggaaggaaagagttggaaagagaataaatcatgtgtttgttgtagaaaggaaaagataaggaaaattaaagataaaatgatacatttttttctctaaatgtataaaatttagtctttctatatttgaaaagaataatattgtaattttaataaataattatatttttattctttcaattttacttaaagacacttgttatcatttttttaatggaaaatttagttttattaaccataaaattctgttatcaacaatggtaacaaattagttcgaacagattttaaattaaaattacaatcaagatagaataaagaagctctaccaaaattataagctactttatttgttgatcgcttaataaaatagataacaacattaccaagtttaaaaattattgaatgtgtaaattcataatagatatataaaaattattgtctgtcaaataacattaaaagtagtagtttcaaaaaataaaatgtctaataattttttacccagagaacttattgaattgttgcgagcagaataaatgaggcatgctttgaaagaaacaatttgttaccgaactatattattgaaataacaaaaaacatctctaaatacttaaagtttcatatccaaagtaaattttcaagaaactctttgtgttttagcaaaagttacgttactatttgcctaataaatacaatctgctaatagtaaaattttatatgaacacatattttacatctttcttaaattgtccctctcaccaaacatggtgtaaaacattgaaaaaaggcgaacttttttttttttttttactgttgaatagtctatggctgctcttatagtattgatttatttcataaagaaaataaatactctggtcccttcacctgacctctgtcaccaagcctctgactttaattgtttttcaaattatatcatataatatatctctacatatgaaatgattattaaagaaagaaaaggaatctcacactagcaaagcaagactggaaaatagtactagtgagagaagtgcttcttcttctttagctttggttataagttacaatacaaggacatatatatatatttatatatgcctcgtgtgaagacatgatattagtggtgacgtacaatgtgatgagtgaaagaagaagagatagataaactagtttagtccttttgggggtcaagtgggtcgagatactagctattaagtcagatattggtcagtgagccatacttttatttctaagttaagctgtcaagcaacacttgtttactttaaccaaaccgccagctaatactactactcacaactctctctttctatttatactgaactctgcttctctcaaaaaccatctcaactttctcccaatggctctcaaatcttttcttctattggttactattctcttagtaactacagaggtactatgaacctcttcactttcttacattcctttacttattccaatacatgtggaaaaatcagaactttattttgttt

SEQ ID NO: 187231 - DNA, 4018 bp, Cannabis indica
ttcacccacacttgtcaagtcgacaagtctgtctagctttagtattaagtgcctcatcttataacattaatgttggtttattatgaaacctaattttctatgtacaaggaaaataaattcatctcttcacattggttaattattttggtgtgcagtgtaggaaaaagaagtggtcacgtaccctacagagactcaaagcttactcgcatattgcaacattcacttggtggaaatgcacgcactgccattatttgcacattgagtccagcactgacccatgttgaacaatctcgaaacactctcttgtttgcctcccgtgcaaaggaagtaactaataatgcccaagtcaacatggtatggtatccattagtttttccctctttttctttaggagacttttgtttatacaaattaattatttcttatatctatgtttgttatttttaggttgtctcagacaaacaactagtaagacatctacagaaggaagttgcaagactagaagcagagttgcgaacacctgatccagcaagagagaaagatatgaaaatccaacaggcacaattccagatactctctctctttcttgatttgtttttatattattggtatggactctagattttaataatattaattatgtgattgattattttattcatagatggaaatggaaattgaagaactgagacgtcaaagagatcttgctcaatcacaagtagatgaactgcggaaaaaactcgatgacgaccagcaggtttctctctcattctctcacacacgctcacactcatgtagcttatatatatatatcatcaacaaggccaatcatgttataacattcttacttcagggctcaactctaattgaatcacctcccacctccgtgaagaagtgtctttcctactctgaggcattctcaagaaaatctgattccaaggttctaggccgtgttgataaagcaagaagtacaatgttaaggcagtctgtgaggcaatcgtccgctgctcctttcacactaatgcatgagattcgcaaacttgaacatcttcaagaagcacttggagaagaggcaaatcgagctttggaagtactacagaaggaggttgcttgtcataggcttggaaatcaagatgcagctgaaacgattgcgaagcttcaagccgaaattcgtgaaatgcgttctgttcgatcagccccaagagaagttgatgttggaaatgttattgctactaacaagagtgtaagtgctaatctcaaggatgaaatcactagacttcattcacagggaagcactattgcggaccttgaggagcagcttgaaaatgttcagaagtctattgacaaattggtgatgtctctacctaataattttcagcagcctaactttgatccgtccccaaagactaataaggagtttaaaaagaaaaagttacttcctttgtcttctagtaatgccgttaaccgtcaaaccttcataagatccccctgctcacctctatcgacctctgagcaagtttttgagcctgagattgaaaacagatatcctgaaaatgatgataatctgtccattgatactcttccagagtccgagaaggagactcccacaaagagtgaaggaggagatatttcatcaaaagaaaacactccaggcgggtatcgacgttctagttctgttaacatgaagaaaatgcagaagatgttccaaaatgcagcagaagagaatgtaagaagtattagagcgtatgtaactgaactgaaagaaagagtagccaagttgcaataccaaaagcagctacttgtttgccaggtacatttagagaatgaccgaattatttttcatcaaattctgagatccctcccttttgcttatttttatcttgaaatgcccataggttttggagctggaagcaaatgaagcagctggttacagcatagaggatgatgagaacgaatgtgagccagggatgcctcaggtttcctggcaaattacattcaaggagcaaaggcaacagattattgagctctgggacatgtgttttgtctccattattcatagaacacagttttatttgcttttcaagggagacccagctgatcaaatctacatggaagtagagcttagacgcttaacatggctacaacagcacctgacacagatgggaaatgcaagccctgctcctggccctgggggaggaagacgccacagtctccttttcatcaaggttctatgttcatcccatttcctttatcatccataatcataataatgtgccataaataactatactattaatcataggagttttcaaatcaagattattgaaagattgtgtgttgtttgttgtgtgtgtgtgtgtgtgtgcagcattagagcaatacgacgtgaaagagagttccttgacaaaaaggttgacttcacgcttgaccgcggaggagagagacatgctgtacatgaaatgggatgtacctcttgaaggaaagcagaggaaaattcaatttgttaataaactttggacagatcctcatgatgctaagcacgttcaggagagtgctgaaatagttgcaaagcttgttggcttttgtgaaggaggcaatctctctagggagatgtttcaactcaattttgctcttcctggtgataagaggccttggcttatggggtggaaccaactttccaatcttcttcatttgtagtctctttctattttattcattttttgttgtaattaatttcgttatttatttatctattctatgtaaatggtgaattttggagtttcctccaaaatctcatctccatagtgtatgtgattgataactggggatgcttttgtaattgataaaccaattcaattagttgaattccaactgccaccttgaataactgcggatgcttttgtgattgctaaatgtgttcttctcgtttgacattgttaagttgatttataacttatagatatgtcacatttccacttcacgaagtactttctctctaagaaaatgttgatttgtaacttttagatacgtcacatttctacttcatcttgaagtctcaaaaaatgatattccacttccacatgctacgcaatgacgatggcactaagtagtttagtttgattggttgttgtaaatcttttaacaaatgtgtcaatattgtgctttgctgctccatactttgcagcaccatcaaattgttcttgttccaatcttcttctacttattcccttagatttcttattgtttttagcgcatgagattttcctttcaaagaaatccaaagatacttgaataggtcattcataattgtcaccgtgtagcattccacttattcaagattgaatgacttatccaaagacaattataacatttgaaaatcttttgtttatttgtccaattattcttatcataattcttttcagcttccctgattgagagctttaatgttgttgtttatatgacttctcaatactttcggtcgctcgggcctcttttttgttttgttgctgaagagtacttgatcttcttcactttttagtgaaactcttgtcatatgcttagataaagattctcgaccaaccagtaagttgtcaaactcgacgagagaaaggttatgttgggcggccttgtactgcaccaacaaaacttatttattttattcttatttctagcattttagaaataggctccacatttcaagaaaaaaaaaaaaaaagaaaaaagaaataggctccaaaatagaaatctcacgacaatgagattttactttgtgaaaaatattattcgattgagtaattgaaatagtatcacaagtttttcacttcaacgtagctttttttttcctccttatctctttaacattattggtcttaagtttcccttctgcattattggtcttaagtttccctttttgcatgaaattaaatgaatggtgtattaaaaaagagtggttgatttgttatttatctttattattattagtaagagaattaccttacatattatttttttaaattta

SEQ ID NO: 187232 - DNA, 3049 bp, Cannabis indica
tgtcaactctcatctgggtaagcttggtttgttttaggcttttagcttttcagagttttgaatgttggcaaagatatttctaatctatttgaggaggaaagggaaataaaagaaataaacaaaaagctatttgagctatcaatcacatcaactccttgttatggtagttgtttggatccttgagatatattcctatgtagtgcctaccttgtcctacctatggctatattttagacaattatttactggcctaggctttccaagcttaaatttatttatgtttcgtgaatgccatactttttttcttaacctatataggttcttatgttttccagacatgtgtttatcaagcaaatcagctaaaaagcggaaattgacccagcgcacgcttcttcaaatgaacttctgttcgcagtccgagagtggacacataggaaatgacatattacttgctagttgtgatgagaatataggaaggaatgataatcatgtattggataattttaagggtgttgaagaaaataacagtgtcctttctaattccgtgctgcgtctaaagtctgcatcgcagattcaaatagatgatgtatcaaagaacccaaactatggtaacaatacagatgatgctatgattgacaggcattcaatatctgtcaagaatgaggcctctaacacaaacaactgttgtgacgtgcacactactttggatgacatatctggtgttgttcttgaaactttcattgttggtcggaagtttagtgatgaaaaggaaataaatgatagggcaggcatacttcttcaaagagaccctcataatgtcaaggatcctaatgctatcaaggttcatttccattttctttgcttctatttgtgatttagatcttactttttgtttctttgattcttatgctgaggccttacatatttttcttggattaggttatttctgcccattctaatgactctaaagtgtttggttttgttcctcgagaattagctcaatatctatctccgttaattgagaagtactgcctaagctttgaggtaaatgtttatcaagctggatgataattctgcactcctttttcacacaggcataatatcaattgatacaagagtaagattagttggatagataagcaggaatttttttggcaaagaaacataattttaaaagaaaaagaaaaagaaaaaaaaaaaagaagctgtctttgagcttctattgaatgtgtaatactgtttagccaatataaacataaggaaatttatattttgacatcttctgagatatactgatcagttctgttacttctgtatccaatatctttaatgggagttagattatttaaatataatgaatactttaaccaacatactgcaggaacatccttcaggaaattcatctgttattgtacttctcaatagaacatgcggttgttttgaacatccatctttgacccaattagctaggagcctaggatatttgactttttaatttagtagtttcccttttgttattcataatccctttctcttcttgctaaagatacatggaatttcttatagggacacgtgactgttgttccaaagcacacccttgatgctgtaccaattcagattttctgtcacaaggctctatcaaatgaaatgctagaggatgataatgttgagcttttcagatatttatggagaaatgttcaacaagtaattggatccacaaagcacggtcgatctggtacagcaaaataccagcaaaacttttgtgttcttgtgcaagaagttttaaaaaataatcttcacctcttcttagatgatgaaaaagggtttttaggtactaaactagctgatttggtcttcaagtcattggcatttacttgtgtgtttttcttagtgtttatgttttttgttcaattggcagagtcatttaattcattttctgatgacagccagaggctttttgttcgtctctacacaagaaaaggtttattcctttttagtagacttcaaacattatatatttttagctgcttattttccagatgcatgtctggttttattatacaatttatgaaaaatgcacctccatttttctctaaatgctaacttattctattgtttttcttgctgcataggcccatggtttcgaatgtcaaatgtattctattcagaaatattggatttagtgaaggcgataaaagagctatctggtgatttaacatatactttttttgtgtgtgttaacatattttgccaaaattttaagagtgagaccaatttaaatctgtttctttttcctcagcatcaggttatttctgttcatttgaagatacaaacgaactgctttacgatgatatgaattatatattaaacttgctcaatgtatctgagctacgagaaataatgtgcttacttaaacaggttagcttctactgatgtttgcttatgatgttgtattgaaaaatgatctgtagtgaatcatgtgttaattgtgtttgcaaaatcagtagttgacatacaggacattacatctcaggcactgccttaaaagagacggttacactgtttttatgtggaattatgctctggtatgctgaagttcattgaaagagattgataattttggaagataatttgttttaatttcagtttggcttatgagctaacctaattgattaccacaaagataagaccttacaacaaaggagcacaaaaacaaaacttcattttctatagatctagacattttaagacagttttttgaataattttcttagaaatatccaataattcaattgtacttggaatttggagaattcaaggttggggatgttttagaaactttatgaggctgtggcttttcacttcaacacaagccacacggaacatatttcaaaaataacatttcaaacttcatactgtacttgaacagtttctgatgcatttatctgtggctgttttgtaatatgagcttatgtttatgataaacaataggtggaagtaatataattttctgaatattgtttaggtaatttatgcaaacataagtctc

SEQ ID NO: 187233 - DNA, 2080 bp, Cannabis indica
gtcagcgaaatctccatggccaactccagtgagtaactctctttcatttccataactgttagtccttttggtggcttgggtttttgttatatcttcatttggatccggattgtgttgaatccagtttttatggagtacttgtttagctaatttagtttcttttgtaggagaattatttagggagtaatattgagcattttggtgtatattgcttaatgttctgagatgagagatttatgttttcacttggttcttagatttgattcactgatgattaatttgaaccagagattttgcccttttattttcattttgtgatgttgtatcatgtttctgatgtaattcgacattggtagtttcattagggttagtgatggtctaatgtgtttttaacataatgatataagttttaaattttagggtctttcctttgttgattgaagatgcatgtagcaattttggtttctgtggttaaacctttttgactaccattttgacagggcaaaatgttaggaagcttgttaaggatggtttcattcttaggaagccaaccaatattcactctcgatctcgcgctcgtagaatgaaggaggccaagaggaagggtcgtcattctggatatggtatggtttattctgtcctttgtttcctgcattaatttaagttgagcaacattttgagaagtttataatttgcttattgattgtttctaggtaagcgtaagggtaccagagaggctaggctccccactaaaatcctatggatgaggagaatgcgtgtacttaggcgtttgcttcgcaagtaccgtgagtcgaagaaaattgacaagcacatgtaccatgacatgtacatgaaggttaagggtaatgtctttaagaacaagagagtgctcatggagagtattcacaaatctaaggctgagaaggccagagaaaagactttgtctgaccaatttgaggctaagcgtgctaagaacaaggcaagcagggagagaaagcttgcccgtcgtgaggagcggtttgcacaggtaccccaattttgaaaaccaattactagctattgttaatgtttcatcaacttgattttgatgctcctattggctctgtatacaggagtagtaattgctgtattgctgcttgttaatgaaattaacattaggaccttattgtttgtgttctaactcttgaccttattgattcgaaatttgtgttggattcgacagggacctggagaaaaggcacctgctgcacccacacctgcaccccaacaaacagagtaagttttcttggatatgaatttggttatattatctattttggtgccaagctaacaatggtcttttactttcgatttttgtagggtttccaagaaaaccaagaagtgattagtgaaagtcacccaaaacgcccttgaattttgtcagtagaagttttctttttatttactagtttattttcatgtaaaccataaaacttaatgaggtctggtaattttgtttttgttctcccatttgctggattatgtgttcttgatattttaagaattatatggattcttcatttgtttattgagacctatatagaattaataaccattgtctaatgaggtaggtagaactactttggttttgggattttatttactagtagttgaatgataacttactcagttgtgactttgggggacgattctgtgagtagagggaacctagactaactcaatcatcctatactgactagcaaatgctttagtttttaagggaaaggttaacatgacaagtttcttgtttatggtcgtaattcaattgtgatattacacgccaaatcattttcggttttgtttctgagatatttattcttttgtttttctcaaactagttttagtgttgccaaattcgaatccctttccctaatatgagaaaaccgtctaatgtgaaatggataaattggccacttagtaatgtcatcttttaaactatggagattgtagcggtagattcaggcgtacttcttcaacttctcacatttttttaggaataactgtaactttaattgatataattataacaataaaatctcct

SEQ ID NO: 187234 - DNA, 2999 bp, Cannabis indica
tttatttttattattttatttttggcgcgagcaaaatattcctccgcctatataaacatattctctctctctctctcactcagattcttcatagctcaaacttcctcaactttctctctcttcttcttcttcttcttctgtgcatagagttatcaaatatcaatggcggacctcaatctcacctccaacgggaacctctcctctccgtcttccacgccccgatcgaccttgatatttctcggcaccggctgttccagcgccgttcccaatgccaggtgtctcatccagccttccgatcctccttgctccgtttgttctcagtcattgtccgtttcccctgaccaaaaccctaattacaggtaatgcctgagttttcgatcttgaatagtagtcgtccaatgcgtagatctacctctcttgtttttgtggcagggagagatgtttatgagatttagggaagaaactttaatcaagatttggaaaatgttggatttgagtactgatctcatgatcatgacttgatttctaggtgcaatacatctctgatgattgattattgccaaaccgagggtaaacacagctatattttgattgatgttgggaaaacatttagggagcaagtacttcgatggttctctctctataagattcctagggtggattcggtgagtcatcttttggttttgtctactgattgctctaattttttgtgcaatagtttaattgcgttattcttcttattcaaaaacgcatatacgatattattctggtcttagtgagagctgttttattgtaaagtgttcgtggaacaatactatatagcaactgaattggaaacgctaatcagatgatggcataattgatttgttttttcatttgagttttctagataataaaaatactttagactccatggcttgtgaaaggccaatcaaattacggcaatcggaagtgattttaatgtaattgtgctgcccagcgtaggagtatcgtgccttcttagttgctcgtgattttattgtttgtgcaattcttcttgatcgctggaactgctttcttattctagttgtactgaagctagttttaatgaactgcagattattttgactcatgaacatgctgacgcagttcttggtttggatgatatacgtgctattcaaccacatagtccaacaaatgatattgatcccactcccatttatttgactcagtatgcaatggacaggtattaaaactgtgggatgaatatgtatattgctattatcatattccacttgatcacttttagtatatagttatgttccttacagaattcatcacaaaattgtgtccatatggtactaaaatgtgatttttgttacctgcttattagagatccagggttaaattatacatgcattgaaactgaagttaaaattctgacattgaagaaaatatagagactgtaaagttgtagcttgtatgtgctttaatacactgccgttaactattcctttgttaaactgatagggtactttttatgttatattaaagaacctcttatctgctctgcaactttaagacccacttgaagtgaacacatagataagatgcatagaagagatgtctgaatgaaagctagtataatcagtatgaacaagaacttctttaagaattcacttgagacgatgggaagtgagattattagattgggcacagaatgatgttcaaagttgaaaaaaaataaaatgaaatattggtgttgatttatgatatcttgtatgtggcaaatccttgtcatgatgatttggtatgtatattggatctgtgccaaaactaaatgggacgttctcacatattaagctataagttgctttaataagagcttgtttgtttattccattgtttgagcgtttgtatttttcaaacatattattgtcttttgcacttctaactgtgtagcaaaaatgcgaatttcactgaaattttctagaaccatttcttaatgttcctgaaacagcattgcagagaagtttccttatttggtccagaaaaaattaaaagaaggccaagaagtgagacgagtttctcagcttaattggactgtaattgagagcagctgtgaggcaccatttgttgcatctggcctgaaatttgttccattgccagttagcctctgcgaatccttttgccttaatgaattatatgccattagtcaatgttatcgttttcttatggttacttatctgatgtaggtgatgcatggagaggattatatctgtttgggttttctatttggtgaaaaatgtagagtggcttatatatctgatatttcacggtttattgcaagtacagaatatggtgagtgtgcactcacatggcaactcttgcagagttcatgaaaattgttgagtaacttgttatttaattggtatgattgatctcaattaagtaaatgtctgtgtgcctgttttttttttttttttttttgttacttgtaatggatgtttgattgcagttatttcgtaaagaatggggcgtggacgaattggagtttacttcatattggacacgcttataaggttagcaagtaggagttaatactattcggcaaaaaaagaaaataggattagtgttctctcttgatattagcagggacacataatactattcaacatctaaaatcatggtaattataaacatctagacatagttctagcaccaagagtggtctttaaatatcaataaatgcatctgccactaattaattcaaacctgtttagttaaacaatgcctgttatgcttatgtgtatgctttttatatcatggacttattttctctgaatgcagacaggatcccataatgttcacttttgccttccacaggttagttatacacactcacttacacagtaactttgcaatatttaaatgctgtttatgtcaaatgattagtggtttctcagactcttgaagctttgaaacgaatttgtccaaaacgagccctgttaattggaatg

SEQ ID NO: 187235 - DNA, 1172 bp, Cannabis indica
tgcactggcgtgttccttccttccctgggcattaagtcccagtaccagagcatgggtcttattgccttgcaaagccctccttggtggattttttgggtgaccttgccctagggtttagtaagctcttcctttttggaggtttacattatcgtgcgcatgccttggtaggagatttttcttctaggtgtcgtcaactacgactttcctgtcgtttccaagttgtgaaggtctagctccacgttggatgaaccttcctacagtagctggcatgtcatcattcatttaaaccccaaaaccataaccttggttgctaggaggaatcttcgggtaaggccttttctactatcatgtcttgcatatacaagagggtctcttgtatttaaaaggtagccttttcttgctccaccttcttttcttcttggtctaaaactatatgtcttagttgtacaacctcatgatcttcctcatagtctttgccgtattcttctttatcatcctctttgccatactctgtgagaggatattcatcatggcattcttcatgttgataattatttcaaggattttgacctcttgcaactgatgatttatcgtctcctacagtggtttcttgagcattcgctggaggaggtcagtttatgccatcaaccacgggggcttctatgttgttgcgagcgagtgggttgcatggtttctcaatcaccattctagtaggtaccatctttgtagatgacaaaaatggtggaaactttcttcagctgtcaatgaaagcactaaaatgtttaccaagttttttagaaaccaaattaagaaaagattgggctacagaaaaacttattaataaataaatgggacaagagtttttacgtggtttaggtattaacgaaccttagtatgtgagtgaatattattagctctaaagttagagtatttttcttacaagccttgccaaactttctaaccctttgcatgaagggaaaatgtcgtatatataggccatatatcgagttcccaggctaatttgagccaactagagattttttatgagaaagtaagcccagtgatggggtaaatacatttgaatattgactactgggttgagtaggtgagaccaacttttgtgtgtaactatcgtccgtaggggatggtactgtttgatagtgacagttggg

SEQ ID NO: 187236 - DNA, 1285 bp, Cannabis indica
tagttaagaaaaaaagttattttaggtagtgtttttagttttttatactttttaaagtcagttttttttcttctaagatgagctataacagtcttaaaatatttattatgcatgcatgttgctaatataattaatttagacgattttacggacgacccctttgtatattcttcgaaatactttgaacatcgatattctacaagtatgaggaaaggttatataatttataaatatatgtataaatataaaatttatattaatatttagaaaaaaaaagaacatatataatggtgagaaaattagtatatagttagaaattaagaaacaagtgcttttgggtacctgcaaatgactcttgacatgatagatggtcaacatctttgagttcattagttttagtactcctcttggggttgcctctttcacaacataagctttactagtttagctccaaattaattaagtttgaattttcaatttgtcaaaaagataagaaattaaaaaatgaagaaataaaaactaaggactaactctttgttctaatcaaagttttttttttcttaaaaaaatattctcatttggaatgcataattaatatatctttaaaataaattataacgaaaaaagttaaataaataaaatcaaaaacaaaattacataataaaaattaaattatcttcttgatcttttaatttgtcgtgcattaatgagtagaaataataattaatacattagttttttttttacaaataatatttttgttttgttagctttagttctagatttgcattttatttatttatgaccaatatccaaaagtttttatgcctgaccaaaattatattgctatagtaataactttatttatttctagataatacatttattatttaaatagtaataatttttagagagaaaaaagtcacatgtaaaagtcttgcttgacaattctgaaaaatctgagacggtcttgaaataaactaattaagttgagttgtactaatgaatacacagttaaaagtaaattgtgatttaagggaataattacttactttgagcaccaccaaggcgatttacacattccacaaatcggtgatgaagatcttgagtccatttcagtcgttgttttccactacttttttattatcccacttacattttcgcaagataattcagaagaattgaaaacagtttgatctgctgatgagtagtactgcttttgatctttctgctgtgagtacagtctccaccttctgattatcttcttcatggactctcttgttaa

SEQ ID NO: 187237 - DNA, 1341 bp, Cannabis indica
gagaacataaatgaagactattatgagcaaccaattttctatctgatgtgaaaaaggtaaagtaacaattacaaactttgtgttaaaaatgttttaaacagttgtttaaattgaattcatggtgacccaaaacaaaccaaatgtgtacaaacaacgttatgatgacaccgaaagcaaaagagggccaaggcacatggctaccaaaatgaaaagaaagaaagaagaatgaaaaataaaaaagaagacaaaagaaaaaagtagagaaagtgcatttcatttcagccctttttaaggcatggttggtttgcattgcattgcatgccttatgtgtgtgtacattacattcttgccattggttggtgtgtctgtgtgtccttcctttgtaccagaaaaattgcctgtatacagcttggtccaaaatttattctgagcttacataaatgggtacattttacattttacaagtacctaactcttttctttcatttccttggtaaatgatattgatattttacttactcaaagtggggttaaaaaaataacactaatttggctaactcatttacttcacttttgaaaagtgaggtggtaggttaggtccaattccatgaatgcaaaagaaaaaaaaaaagacaaaagacaaaagacaaaagcaagaaaccaataaatgagaagaaaaaaaacacatacatacacacacaaccctaatgtataaatctaaaatttgtaaaattatataacagatttatgtggttggcgttaattattctcttctcacaagtgatttttagataggtagcacgaaaacgaaatattccttaaatgttgttaaacaacatctatgaatgcaactaggaaccaaaaggaggttgaaaacacccaatcttccacaaatttataagcgcaaatctaaatatgagatttaatgtggttagaaccaattgttcttttttcaagtgagtttccatatctaccaaaaaaatattcctaaataaattgttaatcagatagaggaagggtcaacaacaagtggccattaaagtttttagtgacttagaatgttattctgctatgctccaaccagcctcgttggattttattctcccactacacacactcacactcaccaaaaggaataataataataataataataataataataataataataataataataataataataataataataataataagtatttttaggcaaagaaaatatagcagatccactataagatatgatcatttggttggaagacttaatttacctgaatcacatttgaaggaggactatgtctatgtgccatcaatcaaagtattattaggcaa

SEQ ID NO: 187238 - DNA, 3957 bp, Cannabis indica
gtatcagttgtcaagaatcggttgagtatgaaatgatctaacaaaaatgtttggacttttgagagtctgtagttatttctgaaccacctctttgtgttcttgcaaggtgagagccgcatcagtcacatgttttgcgggcataacttcctctgtattcttctctcttacgaaggagaaacaggatttcattctttctgctgcggtaagctttattttttatttgtttcgcttgggaaataattatttgcagacaagtttatgcattataactaagaaactttgcagatttatgcagccaaacaagacgaggtgccttcggttagatcagcttcttgtcgagccattggtgtcatttcatgtattcctcaagttttccagaggtgattttaaagttttgtcatgcttttaagttctttgagctcaaaatgcagacagaagaattactagaaacttaaatggtatagtgcagagatcctaaacaagttgatccacgcagtggagattaatacccgtgacccctcaatctcggtatttctcttttacttgctgtttttacttaataatgctgctctttaatttggtcataagggattgatacttttctgtacatttgttgttgcaggtgcgaattactgcttcctgggctttggcgaacatatgtgattctatccggcactgtatcgatactcttgctttggaaggctccaccggtacgttctatgttacagaagctttttatcattttcaagtaacatatatttgaaaaagttattgatgtactatactttttccttagattatactgcagtttctgaatcagtggcattactaactgattgtgctttacgactatcaaatgatggagacaaggtaactatttatgttagctgtttttcatttagaatatctgtagtttctttcaaagttgcattctctttgacttttgctcagttcatagaactctttaatgtaagcggggacatacttcccttgtttgcttttacttcttaaattaaattaatgtatactatcatgtttcaaagcactgatatgatttaagtatgataatttacttttggtgcctaaagtaaacatatgttttgaaatacctataaaaaagttttgaaataccttccatttcttaacatcagataaaatcaaatgccgtgagggctctgggaaatctttcaagatttatcagatgtacaagtcaacatggtttttatggaaaaataacagataaaaccaccttatctccgaagaccaggggctctatggatttaccgtcaactagtgattgtagagatagtaatcaaggtgcatcaatttcataccatccagcttcttttggtgattcacgctggtttgagagaacagtgcaggcatttatttcttgcgttacaactgggaatgttaaggtacttcattatctttatgtaacttgagtatatctcagaacaggttccctctttgttatatttgttttgtttttcagtacttaagttgaaaagttgttctacaggttcagtggaatgtttgtcatgcgttgagcaatctatttctaaacgagacattaagattgcaagaaatggattggtatgtttcattttaatttatgtgtttgcatgattattttgatagtttgtatattttatgattccaagtcctatacgtcttgacttattctttcttcatctctccctctttcctagagttctgcctaatcacacatttgtttttgtagggcttcatcagtcttcagtattcttctactattattacgtgattcttctaattttaagatcaagatacaagcggctgtggcattggctgtgccgtcatctgtacttggtgagtattatactcttgtttatatgttagggtcagactcatagctatgagttaccttcatcattcactgtcacattatggtcgtccaaagataattctttgacactattttatgaggtttcattgattaggatgttgctgcatctcaacccttgtttcattatattggaccgattgtaatagtagctaagttaattctgtctttgtttcgtttcagcttatggaaattccttctccgatattgttaagggcctggttcatttaatggaaaatctaggttcaaatcagatttcagcaccatcgagtttcaagtatcgggttgcacttgaaaaccaggttaagaatccgaatttgtttgtttgctttttataggcatcttcttgggtgtcgtggtcaaataatgactctcgtctcatttgtgttgtttgtttttcattattcagttgacctcaactttgttgcatattcttagccttgcttcgagaagtgagcacgagcctttgaaagattttcttgtaaaagtaagttgtttagttggtaatattattgtttgagatttgaatccttattgattgattgtataattattaatgaaaaatatcggtttggtttgatgaatagaaagcttcatttgttgaggagtggttaaagggtgtttgcacatcatcatcatcgacgtcgtcatcaagtagtgaagcttctttggttggaaaccagaagaaagagatgatatgcaaagcaattgggtcattaattgagttgttccaaggtataaaccagtatgcaattgcccacaaatttcaaaacttattggacaacaacatcctaatccaataattttttctaaatcctaattaattatttctttggggatttttgtgtataatatacagtacagattattattaggtcaaaaagttttgttttcttttgttgtcatattttgtttattattgtaacacagtaatacagtagtagtaaagaaatttttatctttttttttttaatgtgtatgaataaaaatgtataattgaatgagttaaaatgattacgaatgtgtcaatagaatcaaattatgagaatggtgattaatttgtggtgtttgtggacaagatttgatttggatggatttaaaagttgttaattacttcaattacatgtaattttattcttaaattactttagcaatatactacagatcacttcaaaagcgacactaaaattcaagtttaattataagatcataatcagaaagcatagaaagaaggattgaagcgaggtgttgcatgagcaaacaatggcgtagcaattaatagagtgttttcctcttcttctatcctcaaatccatcttcttaaccccttttggaatcttccacgcgaaacattgcaacagtcttcccaaaagcataatggtcatgttcgtccccaactccattccgatgcaccctctcctccccgttgagaagctaatgaaccgtagatcggtctccaccaaatcacgtcggttctcaggaagatgacggtcagggttgaatcgcaaaggttgatcccaggcagtagggctgcgaccgaggccaaggcgactgatgaggatgtgactgcctttgggaatgaagtagccagcgacagtgcagtctgcgatagagagatgtgggaggttgaaggtggaaacagggtggagccgaagagcttctctcgcacaagcgataaggtaagtgagttgagggacatgagactcttggaggagctctgcttcattgccaatcactctatcaatttcttgtgttgccttttcaagcatttctggacgcttcaacatttctgagagtgccgactctgctatggtatgtggattgttcactactgctataaacaattcctgcttatgtaattatatatcaactttaagtatatcaattttatgtaattataatcataactataactaagaatgcatgcagtactcaccgtgagttgtgcttggatttcatcctcacacaaaagtgggttcccatcagaatctttgagggagataagaacatcaagtaagtcttctactttcttattatcactccattctctaatcctctccttcactaaggagc

SEQ ID NO: 187239 - DNA, 1878 bp, Cannabis indica
ttgttggtcattttgcccaagtgaactagatttgtctgtctagatagtcctggtattgctgaacatcacagattagtttcttctgtttcatcttcagcatgctatgctttgctggttattaaagtgcttcttcttttctctacattttgagattgttgcattttgattatctgctgcaatatatagattcattgatcaaaaaagattacactttatatttcaaaagttctatcttcattcctttcttcttggggttgcatttgttttatctgtgattttgattttagtgtagttgactctactaacctgttgaactcttgtgcatgctttttgcgaattcttctttgagaaaaatgctaaatgctcttttttttttccctatctcattctttgacactgaattgtattcataatttgcaatgttgttgaaatgtagaatttaataaaaatacatgtcatacagttatgagagttagaaaaaaagattactgttatcacttcttttctcctaaattttctatcaagtaaattagtagactcgagaatattaacgaatactttgttgtgtatgtgaatcaggaatctatggagttgggtgatgatgtgaagttgaagaagtgttcaaaagaaaggagtaaaatgaggaagaggttcaatttgtttgctgggtttggaagtgaagatgcagaagcagaaatggagagactctgtaaagttacaggtagattagaaactataaagcagaaactgctaaagtttcaaaacaacaaagctaaaaaacccttggaatgaaccctctgtgatttatgttccagtagcagagctaaaggaaaagtcttgatgctctggaatgtttttattttcttactatttttcttttttctgtatagaatattttacatatttaaaacatgaacagtcttggggtcttcccaagtgccaaattaaatgtatcttttggtaactaacttatattaaaggaaaagaaggttataaattgatttcaagtatacagataatctcctttagttactttttgtcctggtttatatatttttgtaacaagttagtctcatttttaaagaattacaatcaaattgaataaagcaccataatttgtttgctatgtacaataacctacacctccttttgtgttttgactgttaagaaatgaattaaggagtttaattgtcattgtatagaggtgtacaggtgtcataacaaatagcaaaatggtcccctcaatgcaatcattgtcctatcattctattatgattttattccctttataccgttgtaaatgatgaggtcataattcttctgaatattctagaatatttctaacattcttgatatatataaaagtgtagccaacctcaaagttagtgagctgagcttttcattttactcctttatttctctgttttcaaacttggtatcagagcttgaacatcggtggtgatcttgctccatggctgaacaaactcctactcacggtagtggacaaggagatttaactggttgtagtgtagccagtgttgttgctcagccctcagctccatctgttgtaattcttggagctcatgtggccagtactctaacccagccgtttgctctaaagttggacaaaaataattatacgtaaataatgaagagaaataatatttgtattatatttcttttctgtatattttgtacaacctagagctcatcttatatagagtatttgcaaatcaaataaagaagaataaggaaaaatcccttaaagtatgaaacaacacaaaattaagaaactaattaatgtgatttgatttcccatctgtcaacactccccctcaagttagactatagatattgatgagttcaagcttgttaact

SEQ ID NO: 187240 - DNA, 7391 bp, Cannabis indica
gtaatagatgaaaaaatggagggtatttttgtaaattggagtccagaatggcaacagagttggccagaggaaaaaagcaaaaagggaaggactgtaccctgtttagtgcaaaatgcagagagatagagtttagtttttagagagagaaagaagatctgagttgggatcactgagtcgcgggaacgagttagatcactccttttctacctgagccgtcaaacattcaaaaaaataaaaattaaaaattaaaacaaaaaacaaagaagaagtaggaagaagaggaagaagaagatcctggccgttagatcccatctcggataacctatacctacctttcgattctgcacctctcgctttctctcttctctgcgaaagctcaattttgagcttaaacctaagattcaaaagaatcagagggagagaaagagagggctttccaaaacccaatttgttttcttgtagattttcaggtactttgtcgctctcttcattttcttttctattttttttttgggttgctgggtggggcggtaaagatggtgaaattctccagtcttatttgttggtgggttaaaagtgtgagaacaatgtgtggaaaatatatttagattagggaatcggttttttggatttttattttagatcccaaaattttatattttcttttagggaagatattggatttagaacagaaaagaaatttttggtgcggaaagattgtttctttaggtttatctgctgaggaaagtttgttgctcttcttttaatggtggtttttgaactcatttttttttgttttgttttgcagctttgaagtactgtagtaactcgactacttggggatggagcttagggtcaggtggcgaaagtgggtgtcagtgattgagcagcagaatagtttgaagctttggcaatcgtgaaggattcttgttgtaatttgaatttgaactgaatcttttttgagggttggcgctaaattcttttgtaggttagtttctagggcttagatagtttaaaaatccataattttggcattggtctcaaaaccccagtaagttatctttggctcttgcaagtgtgtagctgaagatagagtagaaacttttccaattaagagttcaaaatcttgattttcatagacgatgatggaagtggcttttctggcttagaaacgaagaaacatataaaaattaaacagaatcaatggaagatttatcaaagtatgctcatagtccagttcatttagcggtggctcggcgagactatgccgctcttaggcgcattatcggttctctgcctcggcttgccaaggccggtgaggttaacactgaagctgaatctcttgaggcagagattcgagctgattctgtttcgtctgtcattgaccgtcgtgatgttcctggccgtgagactcctctgcatcttgctgtgaggcttagggacccagtttcagctgagatactaatggctgctggtgcagattggagtcttcagaatgagaatggttggagtgctctccaagaagcagtatgcacgagagaggaaacaattgccatgaccattgctcgacactaccaacctcttgcttgggccaaatggtgtcgtagacttcctcgtattgtggcgtctgcatcaagaattcgtgatttttacatggagataacgtttcattttgagagctcagttatccctttcataggccgaattgcgccttctgatacttatcgaatctggaagcggggttctaatctccgtgctgatatgacccttgctgggtttgatggatttcgcattcaaaggtctgatcaaacgtttctgtttcttggagaaggctacacttcggaagataacaatgtgaatttggcacctggtactctaattgttcttgcccacaaagagaaggaaattactaatgctttggaaggagctggtgcccaaccaactgaacaagaagttgcccatgaagtggccttgatgtcacagacaaatatgtataggcctgggattgatgtaactcaggctgagcttgttccccatctaaactggaggagacaggagaggacagagatggttggaagctggaaggctaaagtttatgatatgcttcatgtcatggttagtgtgaaatcaagaagggttccgggtgctatgactgatgaggagctctttgctgtggatgatgaagaaaggacagccaatgggggtgataatgatgagtatgatgatgtattgacagctgaggaaagaatgcagcttgattctgctcttcgtatggggaaccctgatggtatttgtgaggatgaagaacatggggctcttgatggccaagaaaatggttcaggaggtgcctatgaaaacggtgagtctaatggtatgtctaaggagaagaaaagttggtttggttggaataagaaaggtggcaaggctaacagtgatgattctgaagattcgaagaatttgaagaaggtctcaaagttagctacagaaggcagcaaccagaagtcacttgatcatcaaaaaccaacatctgaatcatatagggaggatacgacagatgccaagaagggaaaagaaaagaacagcaagaagaagaagaagaaaggagtgcctggtgaaattaagcacgagagtgagtacaagaagggtttaagacctgtattgtggttaactcctgatttccccttgaaaacagatgaacttctgcctttactagacattttagctaacaaagtcaaggctgttagaagactaagggagcttctaactaccaaacttccactcggcacttttcctgttaaggtaactaaatatttgtattttttgtaatcccgaacacactttgatttttatggaccattgaggtgtcagttaagcattgaaatactttcaagcttaacttagaattaaaagaacaatcatgtagtcatttttttttttgtgaattcattattttattataagcacataaaaccagattctttttattaaatagaaggtttgtcgtgtccttctttttcttggttagttcatgtcacttgtagcgttcatgctgcaatctgcaggtgttggccatgtggttccagcattttagaatggctgaaattttattgacaatttgtctcgcatgattttaaaaatgcatttggtcttttgatttttggatcctgttacacccgaatgtgctaagaattgttttatgacagtgagcttctctagtaacggtgtagggactgattttctattacttgagacacggtttaattatatcttgatagtatataaaaaattgttttatagtatttcatactgatagttctctcaagaacaaatattctctatttcgctatttgagtgttgatcatgactttctttcccctgccttaggttgctattcctatcgtgccgaccattagagtcctagtcacttttacaaaatttgaggagctacagccaatcgaggagttctcaacacctctctccagtccagcacattttcaggatgcaaaatcaaaagattcagaagcatcttcttcatggatttcatggatgagagggagccgaggtgggcaatcaagcgatggcgaaagccaccggtttaaagatgaagtggaccctttccacataccatcagattatacttggattgacgccaatgagaagaaacgccggatgaaggccaagaaagccaaaaacaagaagcataaaaaacacacagcggccagagccgctgctgatgggggacaaggacaacagcaggtgagtgaggatgtggaagagtaattggcattaaagacttaaaatttgttacttttaccaaatacccaatttgaagagctgacaacaggaaaaggaggtaaaaatagaaagcacattcattgcccacatctgactttataattcttccctctgagtttgtgttggaggatttacaggagagaaagaaagaaagaaatctctttgggtatggatcagttggcgttcattcagaaaagggttatcttattttgttgaattgttatgtgatgtgaaatttgagaggaacaggctcctcctcttttattaatagcttattgcgtcctgatttttttctttctttctttcaacacgaatcattgtatctaaagtttatcatttttgtgattgtcattctcttcagtttgttattatgcgactcaaaattggtcactttcatctttcactttattttttattattatacccctcttatgaaagatttaacgttataatattgagtcggatactgccattactttccaaacaaaaaagattgataggattgtcgtattgtcttctaatcattctttaagcaagatatagattagtaaacgacaaagattggaagaaaaatgattaaaaaatcaacacaaagattcaattcgtacttggaaaaaagcttggcttttgtgtcttgtagtgcaggtccacacatttgacagattgtcaatcttgttgaaaacttggattttgttgctttgttttgctgaagccaccagccagtagccaccactagagtttactaagaattgacagttttggagttactctcaatgatgtttagataatatgtttaatagtagggacttcagaacttgtgggcattaacatatagtacgtgtacatgttttatgactctaaaattgttgaaaacaggtgaatttacttcgttagttcttgcctggtaaactaaatttcccctactctttctaagtaatgatttatgcaaataaaatatgcaacaattaagtgaagaattcatcacgtcattgtaatattttttatgtgcatgttactattacatttttttcttcttgacatactagaaaatatttgatctgtgattgagtttgtcctcagagtaggcactgctgctgtttcttttattttttcttttagtttttcttatgttttctttaaagatgacataaaaccatgtgaacaacagatttgaagcagtcaacaataacatcaacaaggaataatataaagagattttcatatttaccatcactttagattatggacaacaaatcagtaggccgttacttataacagagctgttgagcaccctatttcttcattttgtactattaattgtataacagaatgtgattggactaaagttgatgggccgaccaataatggttatggtagaatcactagtcaaatttacatacgtacatacctacctaatcttctcttttgaatctttaccaaaacctatccttgttgacactcaagtatccagccatgacttttcccccagtgttcctcattccatctatgagaaagcaccaagtggaaccaagtgccccaatgaaaaagtcagcttctattgccatcaagaagttgacaattggataatttgtactagtttccctaccgagactggcttcataagcggccatggacgtgttcccgacttgtcttctcacattggtgtagtagaagttccagtgagagtatcctctggacttgtcaataacttcctgtaatccatacattttttctaaatactgctaaaacaatgctaagggaaataagtttgaaccaactatgtacctgcatttcagtggagatccagacgctgttgaggtgtgggaagcgccttctgatgcggtcggctagactcatgtattcttcgaattcaacaaccttcatttcgcatgctttgtctcccattctcacatgcatgctcagtaatggccgagggatccagggcttatgatttgaccatacaaactcttcaatatctgatcttttgtcattcctaacatcctgcaaaagaaaaggtcttcagattagcatcttggttgctgcacaaaaggaatgaattggaatgaggtgttaatggttagaaatctaataattttattcatcactaatccaatcagacccaattttcatataattagataggaatttattgtaagttaggccagtaccaaagggtaaataataattttgattagttcaaaattacacaagtccaacataatcataagtcctaattaatatataaatttattctagttcaacatcaattaaacaaacaataactaggccatcagaccatctgcaccaagagcaattaaaacaagtctaacaaaatattaaatattcattatacaaatccatcaaccctaaatcaacatatatatagaattgggttggtcaattttattggattccaaaattatgaatccaatttttgacaatcggttatgagaggactagtcaatttggtcagttttaattggatatgaattgagacctataatttctgtgtatctgtgacaagaaagaaataattaagacagaaacctcttatgattgtttgttttgttcaactaccaatacagagaacaaggactagaatttccaaccttaggccactctccagcaaaactcttaagaaccatagcggcagcttccttcccgaatgctgcatggcgagcattgttgagtaagccgcatgtgtactcactttcaaatctcattaaatagcgtactgcctgatgcaatcaaagtatatcaacttatcatataatgtttctattttttttaacatacattttgactagatgttccagggaattcattgaacaaaaactcttacttgtgctctccaccatctccgatccattttgcgatgatatgccattaaagttccattaatttctgtagttggctgcagattattccaaggatcaccccatatcctacatttagtaaaatatttaatgatattaattaagcatgatatcattggtgtaaactcaatcaaaatggttttgtatgcattatgaaaaaaaatgtctattttcaccaattgtactttatctttcttaccttggagtatgtccagcccatatttgcttagagctataattttgttttactcttacaattccttcctgccatgcttgtttactctcaagaagctcaagcgctctgtctcggcaatcttgggatgtttctgggagaaagtagcaagaccagctggagcgagaggagcctgtgaattcagtaaacatatcagagataagattgcagtttaaattataagaaactagtatattcgttgccatgatatgttaagacatactacctttgcaaccatcatggtcagctcggttatagaagttggtcacaaggactcgtttttcattgattgcaagggcaagaataccagccatttcagctagctgagctccaataccgaacccgggttctctttcccaatcagctacaagaaatctcacactaggatctctgcagtttaaaggatgctgatgaagccatatgtctctttgcacttttctagtcaaagggtaattatcttcatcagacccggttatctgcagcagaaa

SEQ ID NO: 187241 - DNA, 4432 bp, Cannabis indica
ctcacatacttccttcgagtttttgttgatcttattccttaatctcagaatcgccagggtttaaactctctgcactaggagtgttcaacaaggaattctttgagactccatttctctctacgaaccaataagtgaatatcaatcattacttttttgattaaaatctctttgttgctgttatctcgatttttcccacctgacgtggcatgtccacatgagagtacaactcgccaacaaggaggccaagccatctactcaacacttcaaccaacgaggggtccgagtactgaggagggatgacgacatgcaaaccagccatcccaagggggttggccgaccacccatggccgaccctatgcccagcataggccgggcagcttccaagcactgtgtggccagccagcctgtacctcgcaggtgcatggtcaaccagctttttcctggcaggcctttagtgtgcagctttcatccatggacatcaagttaagcagcgaattgggccttgacaacctacaaaaataggggaaaatattagcaacttccctatttttgagggataattaattaagttcaagtttattacgtaattatgtaaatataactttatttacctacttttaatgggttattagtgatgtaagctctactatataaagagcattagttaaatacttattccttatgtcttaagctctcagttctaactctcaagctctaagtttaaaactcaactctcttctctctctctctctctctctctctctctctctcttttattattattattatttttcttcacttttccaattttggtttattaaatttaaagcttcgattctcttctttctacagctaaactggaacaacttttctttttattaattatttaattctactaattttttttatatatactgattagttattactatttgtagcgccacattgtgaacatacaagcttcttcttcttctaccttttgaattttgttttcttatctcaataatctgaaacaaacaaagggggggagtttggatgataatgatgatgggtgactgttttttctgtcaaattcttctttcttttctttgttttttatttttaacaacaactagttcttccgggaacagtgaactagacgtactattgaagctcaagactgccatgaccggacctaaaggttcgggtcttgaggattggaaaccatcttcaccgtactgttccttttctggagtcacgtgcgacagcgagtcacgtgtgaacacactagtcgttagaaacttacctctctttggttacttaccaccagagatagggatgttgagcaagctagtgaacctgacaatcgcctgtgacaatctcactggcaagcttccggcggaaatggctaaccttaagtcactcaagcacttgaacatctccaacaacgccttcagtggtattttccctggagaaatcacactcgggatgacagagcttgaagttctagacatttacgacaacagtttcacgggtccattaccggttgagattgttgggcttaaaaaattgaagcatcttcatcttggtgggaattacttctctggaagcataccggaaaactactcagagattcagagtttgatgtatttgggtctcaacggtaacagcctcacgggaaagtttccggctagcttagctctgttgcagaatctcgaggaaatgtatgttgggtacgataacaattacgatggtggtattcctccagaattgggttccatgaactcacttaaattactggatatgggtgaatgtaacctcaccggcgagatacccgtaactctgagccaattgaagaatttacactctttgttcttacagataaaccgtttaacagggcaaattccgccggagctttctggtttagagagcttgatgtctttagatctctcgatcaatcagcttactggagaaataccagctagtttctctgggttgaagaatttgacgctactcaatctgttcaggaaccgttttttcggtactataccagagtttataggtgagcttccacatcttgaggtgcttcagatatgggataacaatttcacgttttacttaccggagagtcttggccggaacgggaagcttaaggatcttgacgtgaccaacaaccacttgactggactcattccacgtgatttgtgcaaaggtggaagattgaagactctcattctgatgcaaaattctttcttcggaaccattcctgatgagctcggacagtgtacatcgctaactaaaatccgaattggtaagaatttcttcaatggcaccattccaactgggattttcaatttgcctaacgtaagcattatagagctgaatgataatttcttttctgggcaacttccgtctcgaatttcgggagattcgctggggattttagttctttccaacaattgggtctccggcaaaatcccacctgcgattggtaacctcaagaatttgcaaactctttccattgaacataacaggttttatggtgaaatccctagtgagatatttggtttaaataatttaactaggatcaatgtaagtgctaataatcttagctgtgaagttccgataacaattacgagttgtgcttcacttactgccattgattttagccagaacagcttggtcggtgaagtccctaaagggatatcaaagctaagggatttaagtattctaaacttgtccaaaaaccacctcactggtgaagtcccatacgaaatcaaatccatgaccagcctcactacccttgatctctcttacaacgatttcattggccatgttccagtagacggacagttcatggtattcaacgacacgtcgtttgttgggaacccaaatctctgtccgccacgtcatacctcctcaacatgttcatccatggggaacagagtcggaacccctagtggaggcaacaaggtcttgaacccaaccaagctcagcataattctaatcttcctcgtcactgcacttctactggttctcctcacactctaccgaatacgcaagagaaagcttcaaaaatcaagagcatggaagctcacagccttccagcgcctcgatttcaaagtggaggacgtgctcgattgcgtgagggaagaaaacatcataggaaaagggggcgcggggatcgtctaccgtgggtcattgccttatggagctgaagtggcgatcaagaaactgtacggtcgcgggggttccgatcatggattctcggctgaaattcaaacgctgggacaaatcaggcacagatatattgtgaggcttttgggttatgtttctaataatgatacgaatttattactgtacgagtacatgcctaatgggagtttgggagagttattgcatggttctaaaggagggcgtttagagtgggaaacaaggtacaaaatcgctgttgaagcagccaaaggtctgtgttacctccaccatgattgttcgcctttgattatacatagagatgttaaatccaataatattttattggactccgatatggaggcccatgttgctgattttgggcttgctaagtttttgagagacgctggtgtttctgagtgcatgtcttctattgctggctcatatggttacattgctccaggtttacttcttttacattaccttcttaactaacttttattattcaacataagcaataatataatttattaattttatttataatgacagagtacgcttatacgttgaaagtggacgagaaaagtgacgtgtacagtttcggagtggtgttgttggagttgattgcgggaaggagaccagttggggatttcggggacggagtggacatagtgagatgggtcactaagaccacctccgagctagctcagccgtccgatcaggctgctgtgctggcggtagtggaccccagacttcacaatccttcattgacaggtgtcattcatctgttcaagatagctatgatgtgtgttcaggatgaaagctctgctaggcccaccatgagagaagttgttcacatgctcactaatcctcctactcctaggattgctccaactccaatccgtttcagtctttaatcatcctattatataactatccaatctttttcttgaactgcaatactatataatatatatagactacttttttccttttttttttgagtaaataaaatgcaaaattaccaaaatgtattataatattttgtccaaaaaaatatatgttgcatttgtaatatctagtttgttttaaggtaatcaaacaatttacagcccattggtttggtgtaatcatttttggaatggaatgaaagtttccaattctaatgtttggtttggtttatcttttttaacttttgtaattttttaacaatgtaattggtattacactactcatttgaatcctaattacatagctatat

SEQ ID NO: 187242 - DNA, 2626 bp, Cannabis indica
ttatttgtatattgttttttttaatgttgtttagatgttgttttcttgttatttttatgtagttttcttgttatttttataaacactgtaaaaaaattcgtaaaatagtaaattttttaccgaaaatattagtttatgtaaattttccaatttttttacaaagacgaaatctgttcaaactaaaaaggaaaattggaagcaatagaggtgctcccttctcttggaaaaacttggctagaccacttagcactcttagctaaaccatcaactaaatcattaaaacaatgactaacatacaacaaacgacaacttttaaagtacttaatcaaatttaaaacttttaaaaacaagttccaaaatctccaatcaggtggacatctagagttgttgagagccttcaccaccactttagcatccgaaaagagggttacttcttccatcatctcattctttgcccaaagaagagcttgaaaaatagtgtgagtctctgcttccatggtcgaggtcgtgttactcttcagcagcttaattgcccaatgaccgttatttctatcaataaagactgctgcaagaccagcaactctcttggaccatgagacatctgttatcaagaaaggcttaacaagattgatattaataacagttctaccattttctaaactcacaacaattgttgactccaaaaatttgagagaactcttttagaatagaccctgctaacaatgtcttttattatatcaaccttacatgataatcttaattggtttcattgaaactagatttcattaaaagcacaagatgaaaaatttagaaccttaattttcttcttaccactcaagccttctaaaatggcttcaaggaatttacacatgctataacctgggaattggtgtagaagataaggatatgaacctgagaaccaaagagccctaaccaaagaacatcctttgaagatgcgtaaacaagtctcttcgacagcctcacagaagaaacactatttgttatttaagaaaggaagctttgacttcgacttgctagggataatctcattgattgagcaccaaagcatcatagccatacaaggatgaaaaccaggctttcaaatccatttctatttatccttaacctctttaaaacgatggttttggtctaagacatatgcattcttgacagaaaacggcccatttccattatttttctagataatgcagtcttttgaagataacagtgaggaatttcaagaattttgtttccatttttccccaaagactcttttgacaacatcttcattcataacattctcgataaatagctctgagaccctagttaaagacaagttatttagtctacaaactgtcatcaactctttgaattcacccaaagttatccatggaatccaaggctaattccaaatgtcaactgaactttttgacgaaagtagcttgcaagatcccataaccacaatgtttaaagaatcaattttttttttcacagataggattcaccacttctttgttgaactttccaaaagctctagtttctttagtatttttgaagcaaacaatcgacccaaggcttgtcctctctttcagctagactccaggtacttttgcaagaagcgcacagttcatatcttcaaatcttttaaagcccaaaccatctgaaaacttgggttgacaaatgatatcccaggatttaaaggccattaatctatccttttcgacattacccaccctgccaccaatatttcctaaccaaagcgtcgagtgcacgacaagtagaaagagggattctattggtagacatggcataaatgggcatagtagcggctaccgaaaagacccatatttttctgtggcacaataagataagatccgtttattgaaaagcacgaataaatatgtgttggactaacacaacacgcacaaacttacaatagtgggattttgtgccctaaatagaatccatttcattagatttactaattaataaaaaattagaaatcattttatgttgcatggttcatatgatttatttcatgattaaatgtttaatgtataaattttattaaattcagaacatatagttattcatgactatagtgttgtcaatagagtgcaatataatcatgattatatgtttcaaagtttatgtcccatgatttgtcagtacactgaatttagactgacatgataatcaacgattacttacaccttggataagtgttatgtcttttccaggatattggcaaagtatgctaggatcggatgtatggagtatacatcaaactggattgatattaaacttcgataagatatcataaacttaccgttatatctatctaagttaacatcagttagttgatcttaggtcaatatatattaatccttatatggttaggttcgatctcaactgtgttgtttatgttattagagttgtttgttaaagttgaccaatggatcagcccaatacttacatcttgggaatatagtagtacaattaagtgggagcgctaatcatagatttgaaatctataacttctataaatatttggaagtgaaatgatgatttccttgagcttgccttaacagagatatatgactgaggtctcatttcaataattata

SEQ ID NO: 187243 - DNA, 3774 bp, Cannabis indica
taaacaatggagctagaatcccagctgttgggcttgggacatggcagagtggtggagacctttgtgttgaagctgtgaaaatggcattgtcagtaggttaccgccatattgattgtgcacatctttatgggaatgaggttgaagttggggaagctttggctgaagcattcatggggtcacttaagagagaagatgtttttttgacttctaagctttattgtaccatgaactctctcaataagattgagaattatgttagagtttctctaaagaatcttggggtttcttatttagatctgtatttgatgcactggcctgaaagttcagcctttggtgatgccactgatcctccatccaagtctggaagtgagtataggcagttcttgaatcggttgaagaaagcatggaaagccatggaagctttagttgaattgggtctggttagagctattggagttagtaatttcagtattcagcagattaaagagttgcttaagtttgcaaagattgtacctgcagttaatcaggtatgcttgttcctcttatcttgtttatgttaattataaatatatttttgtaattaatgtttgtttttatatttattttgctgaattggggaataaatctagttaagtacaactgctcaattattgttttttgttttttgcacaatcaataatttaggttagagagacatacatcctgttcatgataatgatttaaagggctgtagagttgttgtttttggatattggatgctatttattcatatatatatataattattttttgcttctttgatggtttatatgcacttttggtctaagggttggtatgattaataaaccaggttaattttcattattaagtataacctagaatatacctgacctggagtattaagatctagatggtggtgtttgatatattacaatccaatgtcatactggttcggactttctactattcattttttccagtcccgacttgttataattttatgtatttaactaatgctactgcttagataatggcagtgttgtccttcttctataaaacatgttttaattctgattatctcaagtgtgattgtggggtttcgaggaaaggaacctttcatcatttagagttgggaaatggaacctatccttaaaatgaaccaaccagcagggccctggctcatttatggcccctataatccattatgagcactgagcacaccttgattcttgccttgagattttccttttcgttaagaaaacgaaactttgcctttccctgaaatcccaaacttatagttggtgtgaattgactcaactatttcaatttgtaaaatttcatcatctgtatcagagaactttttccattgtttcttatttgaatagaactagtcagcagacagtgaggcaaattaaaaatattattgttttattttaatccttttacacttattattttgggttggtgagggaatgggctgtgggtattttaaacacccttttccttgttagagcaggtgacctcaaatttaagtgcttatgcctatattgaatgacaccgtcatggtataaattcatttggtttcttttataactgtatgccaggagcatagggtctttaaattgtcttactcgtatcattgtaaactgatgggattgtggtaaccctttcataggtggagttgcatcccttttggaggcaagatgaacttgtaaagttctgccaattaaagggcatacatgtatcggctcacacacctttgggagtaccttctttagctcctggaccatctgatagcagttctggtggagaagatgaacctggaactcctcgcatatcattcaggaggtcaagatctgtgcatgggcctatgctgaaattatcagtcgttgcagagatagcagacagatacaagaaaacacctgaacaggtaaatttgaactcacgttttctttttgttgaaatactacttatttcttcatttctgtctttaattctgtcaataggaggcatttggtaaagttaagccccattatgatcactttgacctccatggcatattaactttcatggattgcaaaatggggtagtctgaaatttgctaaatttgttcttgatatgcatgcagggagttttgatatgtttgtttaagaagtattttctttttcttagtaaagtagagaggtgattttttcaatgcttcttatatgtcctgttaaaagatcttaatcactcatagggttctagacaccacattagatcaaaaaacctatacttcactggcttcaggtttgatcaagaaaacttaagtactttttgtgtcaggagttaacatgataaacttaaggtgggaaagtaacaaactgataagattagcttgtatccgcaaaattcttagtactagaattactgaaatgttgtttcttgacgttgtatgcattgaccatttgcttattcacacttggattggacatcattttttacaaacagtaaaaatgttctattcagtaagtactactaagctgccagttttctttgtaggattcaaacttttctagcataatcacatagttgtgttaaggttcctaaatgccactgtctgccatgttttcctgattcaactgcttaacgttgatttttagatagaatcattgctggtttgaggtgttttaactttgttaaatagtggaatcatgccgccacccatagacaccctatatgcgagggatgcctagtattgtcacaattactatttggtctcatagtaaggtcccacatagggttctacatggcgatgtcagcaatgacttagacgatggatgtaagtgatgacataatcaagttgaaaatattttgaatattttgttcgaaattttaggaatagacattttcagaattcatttttttcatcctaaaattttgggagtgatcttcactccagattttcaatactgattagaggtttttgttttccttattttcttttatatattagagtattgtgactacttttattttgtgagagtaagacacctttaagtctatactagttgctatgaatatatataatactattcatgtatataggatttggattttttttcctgttcggggacaaattccgttatgtattttggtcttggtttatgaatttaagtttagatttgatgtactttgtactatgtacttgagcataaattgtttgacactaagcccaaaacacattaaatctaaacttaagtgcaaaaataaactaaattgaaagtacataacgggatttgttcccaaactcgacaaaatccagttaaggacatattctgtttacttgtggtcagcttaagaaggcttacatccaagattatgctctatgatcacactagcaaatgaatcattacacacgaacgaatagtactatatttgtgtgaatgttaactagcataacgtccatcaaagctgttgtcttacaagaaaactattacgcgactctaatatctagagagaatcttgaatatgagatagaataaattaagtaacagtgaataatgaaaatctagaatgaaggaatatgaactgtcatgacctttttttttttcaactttggatgcatagcattttggattatatattcaatcttcaatagtaatttgattgtgtcattactttcatcattgagttaactcttgcatcgtcgcttgtgggtccaatgatgtgggatctatagtgaatgttaaatgtgagtaacagcttaggagttttcaacttacccatcaccaa

SEQ ID NO: 187244 - DNA, 2025 bp, Cannabis indica
tatatatatataaatacatagcaacgaaaaacatataaaattcaagtaataaacaagtagttgtcaaaaataaataaacaaatatcaattgccatgtgaagaacaatgacaatatacctgagtaataataaaatttgctaaagatttttattttatgtataaaaaaaatataatactatacacacacaacacaagtattaaaaggcggctcatatcctacgactccgtggtcaacaatctctacttttatttttatgttaagttctttccctactccttcctttcccactttgccgtttatatataattcattcgcaaaacaattagtctacctttagatcgctttcccacacactccaaatctagctatctaaaactactcctaactattttaaacatacacacacaaaattaatttaaaaaatatatttatacaaatatatggaggtagtgataccaagtacaacacaatccatggatttcgagttcaacaatattaataatagtatgagtgtagtaaattccccatactcaacagctccaccatcgccgaagcgcttcggcgagtactacttcagcgctcccacaagcccgtctcgcgtgtccgacttctatagagatttcgaggaattctctacagctgccggcgccggatcagaacgtggttacggcagtagtcggtctccgcctatggtttgatggtgatgatgatggtggtggtggtggtgtttcgcttttgatttcagcgaagacttggaaagaacttctctctcggctgaggagctcttcgatggtggtaaaatcaagcctttgaaaccacctcctcgtcttcaatttctcaaccaccaaccctcttcttcttcaaatggtcaagattcaatttacaataacaagaagaacaacgaaagggaaagagggagagaaagaaatataattactagcatgggagataatttattatcatcatcgagatcgagtcgaagagctacgagatcgttatctcctttgagagcttctgatcagaggtgttgggaagaagaagatcatcaacgacagccaataaataaaaacgacaacaaggagaggtcatttactgctagttctaatgttaataataatccaactaaagtgtcttcttcttcttcttcttcgaagaaatggagattcagggattttcttctgtttcgaagcgcatcagaagggagagctaatgagaaagaccctttgagaaagtactacatgaaaaaacacgaagatcttaagaacgctagttttaggtctacggacagttttggttcgaataattcaggcaggagaaaaggaccaccagtttctgctcacgagcttcattatacggtcaacaaagcagtgtcggatgatttgaagaagaagacctttctgccctacaagcagggtattttgggaagattagccttcaatccagcacttcatgctcttgcgaatggctttggttctctcacacgtgcatcatgatgacatgagtgagatcatttatatgatggaccaaaagaagaagaacaattaagggtgatgagccgtgaacacacatatcttttttaattaattaatttgtttcggtgtaaagttttgtttttataattattattactatatggaagtttctctttatatttaccaagtgaagaatccgaggagatgtgagagcttgatgatgctgtctgcaatgcatgtgtacaataaaaacgtacactcataccaaagtatctataaatatctatctcttgtttgatgcttcttcgaaaactgaaaacataattctttattatttgtatatctaaatacaatatcctcttattattttgaagttttgcatcaaaaagagaattaattttcttttctttaatttcgcagtattatacttctccacctttgttacaaacaagagtcgtctcttaatttacaacaagaaaatgcttaaaaagaaaatgtgtcacaggccttgttgataaaaataatgatattttaacttggttagaaagaaaa

SEQ ID NO: 187245 - DNA, 4113 bp, Cannabis indica
tttttttatgatgcattgtaatgttttattctctgtttcatttatatgattggtcaaatgtgatgcagctattccatatataaagaatccaagcttggatcctgagtttcgcacctatttctctagagagtggtttgaagccttgcatctttctgtgaggaacttctttagtgtgatcttcaatggtactcatatcctttcagaaaagtttttcgcaggaactttccttacgaaggaaaatgttttatattattagtgatttaagcactgttcaccacacaattaaatttttgacgcatgaaaacatagtctattctagtcagatgaacatttgatatgtttcttggtggaaatcaacctttaaaaatgagtacggtacatgtattttttgctctaatattgttttcattgaagttactactagactcattatattataatttactattgataatagtcaatattcaaaaatatttgttcccatttatgacagtttagtactaaatgagatttgaaaaatgtttccttgactaagccacgcatccctgccttattgaaaatcagttcagagaagaatactgttaaccgtctaaagaaagacatcaagcaacttaatcttaagttgtcagaacttcaggctttattagaggaaaaggaggctcagctaagccatcgaaggaggtgtatatatattctgttttttagtttttgtgttttcccttacagactataatatgtattatatgtatgatgtaatgatcttgtgtttgccttctggagttcagtaatgtttcgccgtttactgatgcaaactccgatgtagccaaaagctcatcaagttttgtgcatgaggaaaatgttcttttgtcgaaagacactttagaagcctattttcccgccactccacaaattgatgaagcagacttacatcaagaggtggttgctgctgcaccagtaggaaatcaacacgaggtttccccttcaaaatctggctacaacctaagctcttcatcaaattttcatgcaagggatagtgggactagtgatagcaatccattgttagatggttcccatgttggtatattacctttcttcattaatttcattcacttgtgtgttgagaatgttgttgtagctattttcaactacacagctaaaagttatccacagttgcactgagtgctgactatttgttttgttaataatgtactttaaatgcagtaggatagtttgagaagccaataggctgttaaccttttatgtttcttcgatgagtaataattgagtcttgttgtggcagaaaagggtggggatagccatggagaagaattaccagaagtgaaagttgattttcaggtaaaatggcttataaaggcatttgcatctacacaagtttatctcgtactttccgtcctttgcatttgcagattatttttagattgaaatattatttactttgctagtttttctgtgtttacttaactttttggagataatgatatgtaggagacatttttgggtcacactagtcctattagtcgctgccgcttttctgcttctgggaacaacatagccagtgcttctacggatgggacagtcaggtacattttgtaaagttctaatcgtgagagaaaaaaaaatgatggcattattaactaagatcaccgtgaaaaaaataaatattaactaagttcaccaatatctattgttttctagtctttatcatgtacgaaaatcttaaatctaaagggtttttttacaagtatgtacagtatgttgaatataattcaaacaataacttagaaaactcaatctattaaaaataccattaaaatttaaatacccatatcagtaataaaatgatataaaagctcacaatgctttaatgggtattcaaacattattgatgagctatattttgtaaagtttgaacattattcttagaattataatcaatattctgtatagacatgtaaaatatttgtagttggttcaattgatggttctggattgaactcatgcaactgtcccacagttttgactaggttattacttattattatagaggtctagagaaggcgtaacttgtcattctattttaaactctgaatttattttcttagtaaatacatttttaatgattgctgtcccatgtcaaacataggatttggacttatgactcatctaccccagcatcaagaaatgcaacaatttattgcggagcagagattatgtcacttgactgggaatgtaaatctgaccgattggtatgtaaaattggaattttaaactaaagtctatctatgtttaaacatcagaaagatgatgtaactattttaaattgaaaatacctttattaagtgttgtggttcttcttgacaaaagcttctcataggcactgctgatggaggcattaaagcatggaatgttgatgcaaagagagttgtttgtgacctcaagacaactgaagcatttccaaggtcctctccgaaatcaaacttatgtatctaactattaccaatgcttctaatatgtcggctctgcttactcccactctgttgtctgttgcagtgtcttggatataaagtgtagtcctgtagaaccaatttttgtttctgcagcagcatcaagagggtatgtattttctttaagtacaacactttaataaatgacattatattgaactagatatttatttgggttagtagttttgacatttttttcatcctaaaattggaaaggttgaaatctaattgttttatattttgtattcaagtggtgtgatgaaataagggacattgtctttttgtagatacggttcaagctatgtagataatttgggttttgcttcgttaactgtatggaacatgaagacatggaaggctatggtatgtgtttgattgaccgagacccttgtaataaataacgaatacatttaactttcatttttgtaatgcatgccttataatcattggttgtcatgaagacagttcttcctcttggtaaagatccacctgccattacatccctaagtttcaatcacaacgggaagattttagcagctgcggcaactgacggaatgattcacatgtttggtatccttattgcttttgttttgtatctttatataaatcgtaaaacttttttttttctaattagtattttaatgtccgggacattctgaataggcactttagtgagttgtaacttgtagttatgtgtttgaggttgtttgctttattctggatagttacataaaccttaactaaagaaagacatgtctgcgggtcttcaaattactgggtggcctgcacatgattctgccataagctctattctctttggacccgatgaaaccagcattttcagtttgggagcggaaggaaaggtaagtatcatcgtaactgtgttgaaaaataatgatgtcggtgaatccaagtatgtacttaaaattttccttttttaaaaaaaaaaaagttttaaccttgtagttttggctttttcatgccagattttagaatggagcttgcacaatcaaggtcaagtcctttggtcaaaaaattgtagcaggtcctccatttcttggcacaacataaccttatcaactaccttgcttattttacaagatttgcttagtaaattttgtgtgctttccttgtgtaggttctgtgatcctgagatctcaaaacagtgtagacatgaaatggcattagatgctaatgggagaagactattgacaacatctggtttagtaagagcgcccatttatcaggtcaatctctttacccttgtggttcctttttaatactgttactgttattagtattattgttgttgtttatgttccataaaattgaatcaggttcgagattacacaaatgggttaagaactcttgcccacacttctgctataaccacagtagattggcacccgaccttgcccattttcttgactggatcagccgataactctgtacgggtaacatctattctttgaggcttgtcaatttcatacatcgatctttgtatcgaagaggtaaaatgtggtagatttgaggttgtggtgcagcacaaattttagcttttggcatgcatgtgttttgggttttattg

SEQ ID NO: 187246 - DNA, 1551 bp, Cannabis indica
tttattatatttaaaaaaatcgtctcatcgcattcgtgttaagcgggtcgtatcgtgttggacccgtttttatttcgtgtcaagttgtgtcgacccactttcgacccgcgtctaattttttcaaccctaactcataaaattcgtgttcgtgtggcgtgtcgaaaccattgacacccctaattttgatctttatttagtaacgttttattatatatattattacatggatgccaagtaaagtaagagcattcaatacttgtgattaaacgaataataatggtaattcctgaattcctacaaattgaaaattgtgtaaacaaaaaagaaaattgtgtaaacagagcatgactttagtttagttgcaacttgcaagcatgatcgtacagttgagtcttggctttagaattgaatgagtattagcaagaaatttaagaggctagctaaactatataattatactgcatcgaaagaatatatagttgtggactatttttttcagaaaacaagaatagatgatgcttgatgtgagcttagagggacaaaatatttatgaaaaaataaaataaaattcaaaaggctctgttattggttgtgagcttaattatcaaagtacaactcaagggtttgattcatgtatttattgttacattatggctaatttcaatgtatatgttggtttttgtgtgtaattattacatgtgagcatacagatttttatcactttgccttgtagtttcctaattgtgttgtatattttggctgcagatgacagactacaatgttcctggaggttgggattgtgcaatttttataattaaattgttgaggcaaaaataaagagttctccaaaagagggtgaaaatgactcaaaaatattgttcaaaactgcttctgatgcagctctgggatgaaaatgagagaaaattattgtttagaagtctttactgatgcatctcttgggtgatattttatgttgcagggaaattaaaccgaggcctatcagttatcgacagctacaagctgttgaaaggagaagagttgactgaagaggagatctttctagccagtgctcttggttggtgcattgaatgggtacgttaagattaattaccactctcctccttggctatcttggttggtggagcctggaattttatgaatgagagataactcgagaagcttataataactatgtcactataacgttttgcagctgcaagcatactttctggttcttgatgacattatggacaactcacacacgcggcgtggccagccttgctggtataaagttcccaaggtttgtacctcattgaataagtataatctcagttaaaaataaaataaaatcgctgttttcatgtggctaaagaaattaatatgtgaacttttatcatcaaggttggaatgattgcagcaaatgatggggttttacttagaaaccatattttcagaattcttaagaatcacttcaaggacaagccatactacgttgatctgcttgatttgttcaatgaggttattcacttacgtacattttgcctagttcca

SEQ ID NO: 187247 - DNA, 540 bp, Cannabis indica
gtgaacgaccttgagttcttttactagtacccgtggggaaagatatcgtttcagaagttgatgcaaacttgcaataaagattttaaagaaatgaagaagcatttggataagaaaattgagaagaagagatccattcagaaggaggcaaagtattccacatataggtttgttgcaatattgcagtattgagcttatgagtccattccagagttgagtattgattttggtgtcaagaattcgcatgcctttccaagaatagtgatctagaagaaaaatagcaacgttgagataaggaaattaaaaaattatttgcgagaaatgtaagttttaactcccttgaacttgccaataatattttgttttgtatttgatttcaatcaaataaaattttgtatttattggcagttgtcagtgtactccatattatgttgttgacctactgaagaagaatatttgaggaccgttaatggaactaaggtgacattgtttgtggacatggagcaactggtggtgggcaatgaaggacaacctacacaagaa

SEQ ID NO: 187248 - DNA, 1328 bp, Cannabis indica
agcgattacgccaaaagacaagacgggacaacttccctgcttactaaatgcattagcagatcccataatgtaagcttgcagctgaccctatcaaacaacataatacatgttttcaagctaagtagttaatctgcttcatattggaatgtcaaagaaacacaacaccaaatatgtttgttttgtactaacaatagtatgtggaagtttgaacattgttagtacaaaagtatcaatttcaaatctatattaaatccaaaactttaaagggaccttttcacatgtaaaacaattagcctgtaaagctgtaaatgaactttcagtattgaatatatagaatgtattatgtatgtgaatcaatgagtgatatgtttacatagacaccttctattacttgcaaacatagcttctcaacgttttttcattgaactttgaataacctaattaatgaattttattaaaagaaagtttgaaactttttcgcaccaaactttacttagacaatcatagagggggattatcaatataagaatcaattctttcaaacatttgatacattaaggttttctcttacacaaaaatactgtgctaagatcacaattaacataaaaccatataacctttaacaattaaccagaacagtttgtcaaaaaaaaaaaaaaactagtcgagacaaatgaaaacccaggtgaatgaaatcaactcttttgacataaattagaataaagtaatatatacagtaaatttcagattggtaaacaatcaatactatgaaattcgtaccttaaaaaaagtgagcaaaggtgaatagggatgtcgtgagagtggttagttgaagaatttgaggtagtaggattacaatcctatattcctggtctcggcaacatgagaatattggtgaataaaagagtggtggtaattgggtttgggttggtgaatgaatgactgagatacccctcagtgtctcttctaatcacgatctagccttctattagttttctcattcctaatgccgacagttcttatttttctgctacggtaataaagggtcagcgttttatgtagggccaaactgatcttccaccggaaaacaatcactgtattaataatcttaaatgctggaaaaaaaaaccctaaaattgaggcccttcaaaataaaatttcaagattacatttttttattggcaacaaagatttagaataaattggttaaggacaggtaataaaaatatttaaaaatttcataaaaagccactagaaccatcaaagggctaatttcaaacttttttgatgattgtttcagtctcaatgtgtggatcctgatgctatat

SEQ ID NO: 187249 - DNA, 1436 bp, Cannabis indica
tttgaatttgacaaatactttgtgagaaaaagtgtatttactaataattacacccaattgatataattaactttacaactaacaaatttctaatagtaatactataaatctttaaatgtaccatttagaaatttcatttggttcacccccaataacaagatcagtaattaggttgattgaataatttttaatttagggcactactaacggtaaaacttaaatttgatgtcaaactaacatacaaaaaaatataatttaattttatattaattgttttttctttcaaatattttcgtcagtatatgagtacatatgttaatttcaagaatacattattaaatacaataatgagaagcaaaagatacataaaaattcaggtcgaagtataatatgatgaaaaacagtacaatatgattattagattgaaaaaaaatatacatcttaaaataaataaataaataaataaataaataatcattgtcatgaaagggttagattttttattttattttattaatttttaaaaatctagaagaacaagttggaaatttgatagggatcgacgtggttgaaattctttcaggaaaatccaagtgatagagaacaatcaccattatatatatttatacatatatttcatatgaagtccttttgttgttttgccaatattatacatttcataaaaatcatacataataattattagacatcttggggaggacaattgtacaccctattcttgtttacaccactcttttttacttgattcatatatagtctcaattctcaaaatatatacataaaaattaatccaaataataataagatacaaacatttaaaatatcattcatgtaaatataaagaatcacactaagaatactcatttgttctagatatggctcctaccctcaaacgaccattttttggaatttcttagttaagagtaatgatattaatacctatttcttgaaaatatgtccacatcatatattacacacaattaatgttaattgtcttctaattcaatattctaagtatggagtcattacaacgattgtcacaaatactctgataccatttgattgtgacaatcagtagtctcatgatccggatgtcttattttcaaaaaataggcatttgagtatgagcatcgataggctctattttgtataaataatcaaatattgtagagggtaaaatctataattacagaatttaggcaccaacaactgtcgaaaataaagaaagcaataaaagttcaattgggagcaccggtagaatatcagccaaaaggactcctacgttcaatctattaaattgtcgataaataattgaaataaatctaaataaatgaataaataatgatgaatgagtaaaaagtgattgtctatgtaactctctattgggcatcctcccacgaacttatgactcttat

SEQ ID NO: 187250 - DNA, 819 bp, Cannabis indica
tacgttctctctctctctctctctctctctctctctctctctcacacacagtacatctatgaaaggaatgagtaaaaattattccataaaagatctatccacgtcatcccataaggatatatcttactacatatgtatgtataggtgtataaaaaagttgacattaactttgccttctcttattggtttctacttacttgtgtcagttccagtactctttcactacattacaacaatgaaagtgcatagagtacactgcttcttcttcttacatacattattacttatctgttgttcctcaatagttgcataatattaggtagaaactagaccaagtgcaatggtttttaaaacaagtgaaaaaaagaataatatcaaagatcaatcatgctgacactacttttattattattattattattattcgtttggttttgtaatgtggaagaatggaaagtgttaggacagccaaccccacatagagaataacatatacagtcgaatgttttgttagtaacaatagtaaaacacataattgattgattggtcattccttttctcaaaaatatcaaagagaaatttggagatgagtagaattaatgatatcctttttttaaatcttaacgaaaagttaagaacttgattgttattgttagataggttggaaaaagttggatggagaaagaaagataataagggtaggagatgatatcataatataataaaggaaacaagaagtgacctaaaaccaaagttgaagaatgagttggcaaatgcaaaagacatatccaaatccaaatccaacaaggtgagtgagtg

SEQ ID NO: 187251 - DNA, 12085 bp, Cannabis indica
ctctctctctctctctcttagccaccaccacacaccaccaaccgaaacaagccaaaccaccaccgagcacgacctcagtcgcgcctcaaccaggaccacaaccatactttgccggacctctaaaagcttgattttcctcacaaaaaccttcattttcctcacccaaaagcaatgggtaaatgtttcttatacaaaatatggttagtcttattgtattgcatgaatctatacattatttgttgtattatgttatttttgtgacctgaaatgaaagcagagtttgtacccaaacactgttatttattttttttttttctgaatttttcaaatttttgcgattttgtacgtcattgtgcgattttgcgtgtgatgccaacataaatcaaaggtcaggcatgacttgtattatttttggcgacattggacgatgtcttggcgatgtttcacgattttcacggttctgcatttttatgcgatatgcttacatcattatgcgaaattgtttattatttttaatatcttcttgttgtgtatatttgtgtgccataatgtaatattatttttcttgtgcaatatttgtgtgatatttatgtgatattgtttttttattgtgcgatatgtcttgctaatgtttaatttatttacgtatttgtttgtggtttgttttggacagatttaactgtattagtgcatgtactatataatggtgtttgggctgtagagggtttcaactgggtgttctattctttaacaagtaagataatgatgtttgacattgacactacactggaaaaagtgcatgaaattttgtatgaagagttggatgcaaaccctttggtgtataaattaaaattagaagtctgttacatgtacatgaaagacaccaagtttctactggaggttttagtgaaagatagttaactacgagtgttcttgagcatgaaggcaaaaatgagtgttgataacttattgccactatttgtgactaaggtgaggaagaatgtaaatttggagcatactcccccagctgctccccttcgaagtattgttgggacctttgacccaaaaactgatctaggggttggtttgaatgagcaactccccaataatatagatgatcacatatccaacatcgcatttgatcattcagatgagttcgatgctccattttacaacaatgatcttgtggtagatttgagtgcggatgatgatgtggctatagaagtacctcccttgaggatggaactaactccaaccaaccaagtagagtgacaaagaagaccccccatagtgagaatcgccaaacaccaagaactagtagcagtcggtcaggtccttctattagtactcctgcaactaaatttggagtttctacgaaattcaaacctcttatgtggacaaggaaaaagatagagaaaaataatgtatatacaacatcccttagtggtacgccttcgagggagatatatcttggcaagttgtaaaaaaataagaaagaattgaagaatgtagtgggaatgtatgcattgaaaaacaattttgagtggatggtaagtaagtttggcactgatgtgttttacgttacttgcaaggatgaaaattatgaatagagattaaaagggaagaagaaggcacgttgtgacatgtttgaggttactgtgttccacaacgaacacacatgtaacctggattctaaaaattttaatcaccgtcaagcagcaccgtgggttattaggcatattagtaagaacaagtacacatcagatgaaactaactaccaggagaaagacatttatagggatatgtttgatgagtatggcatgaaaatgagttatgagaaggcttggaggtgtagagagaaggtagttacgtagaagacaaagtatgggggcacaatgttagttgttgttacgtacgatgtaaacatccaattatttttggtagcctttgcaattgtcgacaatgagaatcacgactcttgaaagtatttcttgcgaaagttaagagaagccattgggaaggttgaaaaccttatgttcatatcggatagacatcaaagcattgaacatgttgttaaggttattttcccataagcatgccattgtgcatgcttcaagcatattactataaatgtcgttcacaagttcaagactgatgtatgtaacaagcaaatatgccttgtagcttccgcatggaacaaggcggaatgtgatagacattttgaggtgctcaaacgaatgaattctgccattgctacatacatcaagcaaatagagttcgagaagtgggctcgcccttattgtccaagaaatcggtacaacatattgacaagcaacgctgttgaaagcttcaacaaagtgacagaagagttaaaaaaatatctaataactattttggttgaattcatcaggttcacacttgaaattgatttgctgatcgtctcgaaaagccaactaagtgtactacccctttggctactacttttgaagatgatttaatagcacaacacaaagatgataggttcaggagtgtccttcataatggtgcgcaattatttaacgttggtatgggtcctaaaggtgagagaggtggtgatatggacttagtggagagaacatgcacttgcaggctgttccaatcgctcaaaatcccttgtccccatgcatgtgccacatcaattagttagaatccgagcctatatgcactttgctccccctattacacaaaagaaacgtggattaagacctacgatgcaacaattaatgttgttggcgaggaggatgagtgggtactaccggaacataagtgtcggggtaccagtggagaaaaaatcggcaggtcaacctaggaagagcaatgtgggtagaagaccgacgaagcgtcgatcgtctaatggtcaggtggtagtggaacctcgtcattgttcgctctgtggcggttcagggcacaacagagctacatgcaaagctcaagttcgaaccttttctctaatagtttcttaactatctatattagttgcaaaacttgagtttggatcacatttatgtgttgtattgctggttgttgtttaacaggattgtgtgaaccatgttgaatatttaacaggtgccatgtatttttttcttactttttgcgatattgtgcgacatttctgcaatatttcttcgattattttttataaatgtgcaacatttgttgatatttgtgcgacgttgttgcgattttatttttcatattttattaatttaccacatttatgatgtttatgtaaaatctatgcgatatttgtgtgattttactttctatattttttgagttcttaatatttttcatatattaaaatatttacaatttctatgcgatatttgtgcgatattttttagatttaatattccatacttagatctaaatatttttttattgttttcatattttacgatttctaagcgatacatttttaaaattgtacaacgtctgtgctagtttaaacaaaagattatgtataaatgaagtaaattacaaaaatactactgttgtaaactaatcccaaaaaatatgctatgcagtcaactaccaggtcaaattttagtaaaataagtccacacaccacctatgtctaaaggtgagcatgttatcatctgtaaaatactcaagcgaacgatccaacatgcagtgctcaatgtattcaacaacatacattccacaatcgccactacaaattaaaaaattggaaactattagcaacaattaagttaagtaattcataatggactacaaaattaaataaatagaaaaagagagatttatcttattttcgtttgcggaacaatttcggaggtagctcttctataatgcattggttggagctgactgagatcacctaaattaactggaagtacataattatttaattgaaaataaccactacccgcaataaggatgcaaatagctcagtataaggcttcaaatatgacttcatgctctcctcagtcgtggcaccgatatcaccgtcgtatatgacaatctttcagttctcaatatctacctctatagccacccaatggtgttctttgggaaggttcaacacaaagtagatacattcttggttctcccaacgcggcaagtatctatgctccatccagaccacataattaacaatcgattgatcccatttgaacgtgctcccatcaccatcatgaaaactctagtacatttggaacatctgtgaagcagatgtgtccaaaaccacacttctgagtgtacacttcaggaaagagcttccatcttcttctcaacaagtgggtcatgacatcaacttgctgcattacaaataaaaaaagtcagaaaaaaaatagtaccaacgtcgcacaaagatcgcacgaattaaataccattctgtgaaatcgcatataaatcacacaagcatcgcatataaattgcacaaatatcgaataaaataaatgcaaagtaatattatatcgtaatcacacataaattgcacaaaaattgcactaacttaatttccaaagtgtcacattgcacataaattgtagaggcatcgcataaaaataacacaaatatcaaataaattaaatgttacagacacaaaattcatattggcaactcgcataaaattgccaaaagattgctcaatgtctcagacacaaaattcatattggcaactcgcataaaatcacacaaatatcgcatacatatcgctcaatattacagacacaaaatccatactggcaacttgcacaaaatcgcacaaatattgcataaaattgcttaatagcacaaacacaaaatccatactagcaactcgcacaaaatcacacaaatattgcaaaatacaaacacaaaactggtgtacaacacataaatcacttaatatcgcacaaacattcaaaaacccaaaaaaactatatcccctaacctagattctttctcatacacaaaaaattagaaactgaaagtttaatcaacaatatatataagttttatcacagattctgaatttaaatgataaatttaaaaaatcaatttaagaaaaaaaaaacctagttcaagtgttcgagtgggttcgtggacggtggcggggacggtaaacggagaatggttcgaatgggtttcgtgggtcgctgggttcgagtgggtcttaggtctcgttggttgcgtgggtcttgtgggtctcgttggtcccatgagtttcgtgggtctcctgagttgagtgtcgctgtggtcgagttgttcgaatggagtgggtggtttgaatggagggagtggttcgactgagggggtggctttggtgcggtggtgaaaagacagccgagattgaaagagaaagaggagagagaatgaagttagaaagattagggggaaatgaaatgaggggtacttttagaactaaattgaaactaaagaataactaacttatgtttattttatgagtataatataagaccatctgtgacatttagcataaaatttaaatttctcatataaaatctaaattttcttaataatactcagcgcaccacatatattgatattattttttaaaaattaattaaacaatgtaatataaacttgctaatcgctttttttggtaaggaattcttattagaatttggatataatcaaattgtgtttcattttaatttgtcagtttgaatatggtctatatgctaaatacattttaagtttattttcacattttaagtttattttcggatataatataaaaataaataaacatgtaacattacgaacaaagaaagtactatactaaaatttttcaataataacgaacaaataatgttaacattgcgaagaagactttctttaactgaaacaattataatgatactaatgtaaaataaaaataaataaataaaaaacaaacaaaacccactgcactatcttcagtagtgtgtactgtgtagttacgacaaagctaataacaagggacgaaaatcgagcgaacaacaattctaatatgaagccgcaatatatgtaatgtcaagttgtacagcgctcacccaaaccattatccctgttgtgtatgtatgtatacgtatatgtgccaaagaaaagggcaatggtgtcgatgaaaaaatggaggagctgataaatcaaaagaagggttaaacaaactgaacgtgaaactgtacatgatttgtaaaatgttgcccagctctttaaattatcataagcccatgtgatcagctctttctctatctcagtgatggccccgtcttaggacggataagaatcttccagacgtcgacttacgtcgttcatctccttcatctgccacctgttcaagaaatttactttcttttaaaccagtttaggaccacaaccagctcaaacaaaaaatcatgtcatcttaaatctacgtcaatttaatgacttgattctgttctactcattctatatattacaaaaaggttaaccataaaccatgcatgcattgcatacctctttggatatttgttgcagtgtatctataatctcagaaaagtcaggcctcaaggctggatctcgttcccaacatttcccaaggatttcaaccagctttggatgagtttgcttcgggataggaggccgtagaccctgaaaacaaaatagataacaagtcaatcaacagatgtggtgtggttccttctgtttgtcaaatatactagattagaattaagaatttaagagttgaggaattgtcaatgtacctgttggacaactccaacagctgcttgtaatggggttaagaactcgtacggaagctgccaattgaaacagaataattttttttatatattttttaaaaaagagaagaggcaagaaaaaacagccgtgtcaaaatagaactgtagtggtttgcagtagcagtacctttccagtgagtaattcccatagcacaactccaaaactgaaaatgtcagccttgtgatcatatggtttgtgttcaataaccttcaatgcaaaataactgttgtaaggaaatgacatgataagtgcccttcacaaaattcacttagaataattgtgaaaacaaatctgaataatgctagatataccaattatatactagataaggaacatagaagggaacatatttttcttttttgaccattcatacaggttcatgtcacaaactgtacttatattattatatctgacatttcatcaggaaacttcattcacaatatccttgcaacccagaagaaagacatggaacgttaatcaagtacactgctgaaaatgcagaacaaataaacaatatcaaacaaataaaaatagctctggctgcctacaaaattctggacatgaaacatagcaatctggctatagtgcagaatccaacaatattacaatatgaaagagcataacagctaacattaagtttaaactagtgaaggaagtgtcatatgattgtgcaagggtattgttatatatgttatatgtatctataattttattttcaatagaatgtaaaaaattaacatatgcacacgagcaaaagatcctgaaaacccaattaataacacatagatttaacgaaatcagctcacctcaggagccatccaccgataagtcccagtttctgctgtcatgactccagactgagcttgtactctagcaacgccaaaatctgcaaccttaacaacctgcaaggaaattatgtaaattattaatctcatttttttaaaaaaaaaaattctatgttctggaaaattttgcacaaagacagacaaaaataaattgaaaaatgttatggagaatatacagagaaaaccacttacaccattttcatccatcaacagatttgcagcttttaaatctctatgtattatgttattttggtgcaagtagttcattcccttagaaatgtccgttgcaaccttgagcaagtttggaagcttaaagaaacctcttttcttatgcaagtagtcatacacacttccacccgacatatactctgtataaagccagaaatatatagatttttaaaaaaggtaaaaacacttcaaacagaacaaagaaactttcagaactaatgtgcccttcagataatataacagaagatatcactattcacctgtaacgatacacatgcttggaggcttagtgcacgcaccaatgaactgtacaacattcttatgtcgaactttcctgaaagttaaattaggaccgagagaagaaaaaggcttgattactacaaagtaaaagaaaaagcacaaacacaaagaacaataaaaagaaaatattcatctacctcctaactcagatgcctccaaatccatctaaaacaaaaaggaaaaaaaaaactgaggagaagactagctaaggtttgatgacattcttcataaggaatttggcattgaaatgccaaacatacaatacaagcgttggcatccaaatttagttctattcatctaattattactctatagcaagactaccacctacattggttctgctacaggtcaacatgacaaagcagattagagagccatgcttagtgtaagagtacaaagtatatcatcttatgtacctcatgataaagacctcctgggcaaattctcgctgcatatctgtatttattcgctcaggcttgaggattttaatggccacttcctgactacagtatgtacctttataactgatttttttaaaaaagtatatgttaatgctactgtaaatgcttaaggaaaaataataaaaaaagcatatgtaaaccaggatttttacttacagatcaccataggacccagatgcaaccatcttctcaaacttcaaatgtttaagatcaatttcccaaacatctgttccatcatcaggtatagtcaaatgatcgggttcacatttgactgttgaatgatcagtttcagaaacaggagatgtctgacacattggccagggctgtccctgcataaccagagaagaaatttcatgtagaattttggaaaataaaatgccatcatagaaaggagagacctaatcagcaaacatgaaagtgaaaacacactgggtatcctttatgaacataaatttttctataaggggtgaggaggctgcaagaattacctcgattttcaatacttccatttctaaagcatctttgagttgctctgttccctgtttcaacgtaagtaaatatgtaaaatggaaagtcaatgattttgccacacatactaggaacaaggagaagtcaatagaataccagtgagagtcatgctaaattcattgagtacatcacaagaaaatttaaaaattttgttgtcagtaaaagtttatatagtggccaagcatgttgaccattctcttggcaccatattattcacagatgattagtttatttgcagtagaaaaactgtggccagcagcttcagttaaatattttaaaaatgtatacacatacctcgtaaggccagccatcaacaacaaaaacatccaaagagtaaccatcggtagttgaaaatgcatgtgcttcttggatgttaagacccatctccgcaagcaaagaagtcaactacataatagcgtaagatcaccgtgtgattaaaagaaaaattactggttaaaacatgaagattgaactcaacaaaaccaaatgtaaattcaagctggcacattagcctaatatggaagatacatctatatgaaatgagtcaattcagcagacattaacaagtaaaatgttccattcactaacagaaaccaatcatgtacattgcattgataataagaaaattagggagtcacatgaagaaaacttggagtttcgcttatgtttatgcatgattagtacctgactcagtaactttggcttgtcatcagttgacaaagttatctcatgcatgggtctgcatcattaacaataaaattagaattgcattagaaatattccactgacttcataaatgaaagaagaataatttcctttaaccgatgataaaaaatcattataagcaagttaaaaatatttaggttaagtcaatggttcaattgtcaaaaataaggaagatgagtattttattatattattatttttttttttgaaaaaaataacaaacaaaacatgtaagagtttgtgtttatacatgcttttaagaactatatccacgagattccaacattgatgctgaaagagaaaggaggtaaggaatgggaaaaaggagaaaggagaaaggagggcctggacctggtcaatgatcacataattaaaataaaatcttacttttgctcaaaaataataggaagactaaggtcgaaactcccagacattcaaaagaaacatgatataaaatgcagcagcagccttgaataaatttagatagatagataaaattactgatcaataaaaaaatcgaccaattctagattctaacatcaaagaagtataacaacaagatctttggccaaagagctccagtaaactaatccagttaaaacggtttagggaaagtcatacaaaaatgctcagatatacagaaacaaagaaaatcaccgagcatattgtgtgttggcatgcacagaaccttcctcatcttgatcatcggaattacttgcttcaagtgcaagtgcttcaaggtttggagatgatccaaaggcaggtggtggatgtacactgatatttgaaaaccagtaagagttgtcacaattgttgagagcaagataccagcataaattaatgcgagcaaatgaagcaaaaattactgtctatttccattcaatatcaattcaattggattggatgatttgtctaagctgcagttttaacaacttgaataacttaaaagggtatataatacctttgtctcgcagtataagaactttgcgcaacatcttcactaggcgaacctggaacgattggagaggtagaattcccatctgaaatgggaggaacctacacaaggtgaccaacacccagaccattaagcttagaaatattaaaaagggataaaatcaacactagcagctttcatctatggctaataaattttcgtattacagtgtgtttttggatcaactgacctgtacaagtcggacttcaatggcaggtctgttagcaggattatgagccaaatgcagtaatcttttatgcacaagaacgtcttcagccctctccacattcacatctaatgcatacctatccaacaaaaataacacaaacaattactatccaaaacgtaaacaaacaataaatttggcattattaccaacataactctggaacttctgccacttttgcgcttatatgaaaatactactctatactcgacaaaagtagaacagaactaataaaaacaaatctattccctaaactcaatccaaagataatggatgtataaacatcatcagacaagtaattacagtttacagatgataattaattttaaagcaagcgattacgattaaaatcattacacaactaattttccatacagatttcagatcaaccaaaacctcgttattgaaaatagtccataaaacatacagtgttttatgcagaaacatgcatagaaaacattaaaaacaaaattgaaaaaggttaaaatagagtcgagagaaagccatgatagggtaaagttaccgggcaggaaggcgattaaaatgagcccaaagttcatcgtcgaaaccaggttgaatagcctcatcgttcttggaattcttgagacgacgaaggacttcattgtaaacctcgagtttctgtcgttgttgacgactcctaacaggcgacgacgacgtttcgtgtactctactcccgcagctctcgttatcatccattaccattgaagacgggaatgcaagaaagtgagagaaaaagcgagaaggtgaagatcgtatggcggtttacgtgaaatcgtttgccaaaggaaaaaaactacataaccaaccagtgagagagaggattccagagaaagagagagagagatttagagaaaattacagcccttttaaactcgaagattttattcctaagaacaaaaaatgataattttacttaaaaaaaaaaccaaatattattagtatttatatatataaaatctctgggtttctttttctctttctttccttt

SEQ ID NO: 187252 - DNA, 3814 bp, Cannabis indica
attttttaacatcattaaaaaatactactattaaagatctacttagtacaattatttatgaggtatcatatattttaatatattttattttattagattgctaatcaattgtttaaggcaaacaaaaaaattaaaggacaaccttatgtaaaaaagtagtgagcgtgtgtttgacccaagctcaccaatcaccacgtgttaagaaaaaaaataaaaacaaaattatcggccaccgaacaacactgaaaaaagaaataaaaaatatcactgttttttttaattcattttgaaagtctaatttggtttttttgataaacaattagaagtctaatttaagctctccaagtcatcgatcaaatcgaaatcatgatccaaaatcagaacaatcgaacggtccatattaagtgtacaggtaatcgtattatccgagtacttactttcacctaaaatattctcttttaattgttcccaaaaataaataaataaaaaatataaaaaatttgttccttcctttatttcgggaacacaaaccaaattaaactcattatagcaatctctttccttaccggttctgcggaaatatcattctgacgtggtccggttctgtaagctttatcttcctcacttctctacttatataaatcttcctctttcatattattctctctcacttcaaatatcattcatttcccataatacacacaaacacaatcaccaaatctccacttgtttcaggtatgcatcaatcattttttctttcttcttcaacattttcatttacgccgccattattatcttttgcttggatattttggcgttagatctgtaatagaacatgggttttttttttgtacatgggttatttcggattatgtttgtggggtactaattgagctaacaattgaaaatgaatgtaggtttctttgttttgtattaatcattagcttgttgtaagtataatttttggacagtagtaaattgagttgtgttgttgtgtagttcatatctgaatattggatctttgattttgtttcatcaaatttgaattcagtaactgatgatgtacttcaaaattggattttgacttcactagctgatatttctttacacaaattgagggtggatatcattatccttgaaacgaatttagatttgtattattgcttattcatatatgatctattttctttatctttacttttgattttttttacttcttggatggatcttagatctgaggtagcagttttaccttttctgcgaagataaaagaacaatctttcatttgcttatattggtacagttaaaaatttagtcaaatgctataattttaggtgttctagtgctttcgtggatgagatttgctatgcctatcagaatcattattattgatctaaagtcaattttcggttatcaatgagctgaccttttcttttttccttctttccggtgtatgaaggtggaaaccattatcaagaaaatggaagttactggaggctaaaaccatcttggttttatggcactgatcggtatgttttcctttttttaagactcttaatctccatcaatactgatgaatttatacagcttttatttatttattatgctactgtgtttgttttaataggactttggcaaatgtgtggagggcgagacgctactgttatcttacaaattagtttaaataaaagaacaagaatcagtttttctaagagcagaacctctggtatggaatttgaatcagagcggaggaaacacaagaaatcgttggcatttaccactgaagttattcgttctgcaacattttttatggcttggtcttgtagaatccctttaggagatgcgtatcatgagtttctttaattgaaggtctaattataaaatcattaagtcatcctttgagagctaaagttaaagtcaagggtgtggaatcatctagttatcaacaaccctcttgatctaagtagcttctcttacaaaaatgcctggttttctgagtgaaaacaagagatttaaacaaccaactatgagtttatttaattcactcaaacaggatactttgattcgctcgaaaagttatcctggtttgtcttctcaacttctagatgaagttgacagtcacagccccattctacctgggctgcctgatgatgtggcaaaacattgccttgctcttgtacctcgtaccaacttcccaactatgggtggtgtgtgcaagaaatggaggtcatttattcaaagcaaagagtttatcactgtaaggcaattagctggagtgcttgaggagtggctctatatcttaactgtggatgctgaatcaaaggagagccactgggaggttttggattgtgtggggaacaaaaatcgcattcttcctgccatgcccggttttgctaaatctgggtttggggtagttgttctaaacggaaagcttcttgtcattgggggctatacagtgatcaatggagtggcctttgcatcaccagatgtttatcaatatgattcttgcctcaacaggtttgtttttcctttggagtggcctttgttttttaattggttcggggtagttgctctaaataagctctaccttaatgatctcatttattaaaacaaaaaaaaaaaagagaggagttttttgctttaccattaccaccatgcttactgctgcataaatggtagtgaattagcttaatagtttgaatatagtgtgcagacttacaatctacctgttatgctttggacatgtactagcatttgcattttgcttctcactttttaaaatatgcatccataagttcttaaataactggtatacaatggcctcttttctaatagtactacttcatgaggaatgagttgctgcaattttttgagtttgcttaacatgtgacttgttttggacccgaaagagtatgtagtgttcttttgctaattctgtgatacattgtgttatttgcagctggagcaaattaacagacatgaactttgctcgatatgactttgcttctgctgaagttaatggaaaagtttatgtagtcggaggctatggtattgatggcaacagtctatctagtgctgaggtatacgaccctgaaaccaattcatggagcatcatagagtctcttcgtcgtccgaggtggggttgctttgcttgtggatttgaggggaagctctatgtcatggggggaaggtcaagcttcaccattggaaattcaaagtttgtggatgtctacaatcctgagaagcaaagttggtgtgagatgaagaagaatggttgtgtcatggtcacttctcatgctgtggtggggaagaacctcttctgtatggagtggaagaaccagcggaagcttgctatttttgattcggctgacaattcgtggaagatggtgcctgttccattgacaggtagtgctagtatcggtttccgttttggaatattagatgggaaagtcctactgttctcactagagaaagaacccaattatcaaactctgctatatgatccgaatggtgcccccggatcggaatggaagacttctgagattaagccttccggttcatgcttgtactgtgttaccatcaaggcctgaaagtttattcttctatttgctgaacttcttttattcactgtattaatattttaagctgttaactctttttttgaaagcaagctgttaactctttgttgtactgtaatattagacttatcatagataatctgatctatgaacttaaaacattattgtcatggatgttagtttaaaatactgtattgtgtggttccggacaaactaagagcttcaaataaatgata

SEQ ID NO: 187253 - DNA, 7541 bp, Cannabis indica
aaaaaaaacataataattgaagagtatagaacacgtgtgcacttatcacttctttctttctttcattcttcattgtttagaagaagattaggtttatatcttcatccacccaccctttcttccaaattcttgatctttgtaatccccaaatcgatttacttttccagtcccaaaaccctagccttttctgtgtcctcttactttacgactcgtcttcggatcagttacctctgatctccgaacataacagctactctccaccaccgcttcccttactgggtcgtttctactgattctatttgtaagtatgcttagacttaatgattttgattttgatttgggtttatattttttttagttacgtgttttgctattttgttctttgagctgttgctttcatatctgatgtttatgggatttagggttttggtttttgattggtgataaaaattgtctttatacttttcgtgaaagtgattggtcttctcttaatgtgctcatggttatggatgcatttttgcctctctttgatataggttgacgagttctgatttgttcttatgtttctcaaatactttgtaatttttttgcttgtttgcaatttgaaaaacttcgcttaggagaacgatagatctgtttaagatttgttatttcgaagggtcatgataatatattattttttaagtcatgagaatttcttagaaatgataagttatgggagttgaaactttttatttcttcaattttatatatgtaaatatatttatatcttttcttacaataacaaattaagaatctagtcaacaatcttgtctcacaggcacagcagtttacaggaccaagatccaaggtactcagctggaacccattacgaataatatggagtcatccgtctctgaaatgcaaatgggacttgttggctccgtaggatatatatcaagtcatcctgtatcgcaccaactaatttcagataatcccataccccagagattagaatcaatagaaatgcaaatgggaaagaatgaaaccagagctaatgaaactctgcaatcagatcaatttttaacatccaataatcaaataggacatatgggatctatgctgaatatggatcaaatgtctgcatcctttaagcgcaaggcacctatggaacctatttccattaactcttcatcagagcagctgtcacataagcgaatggcacaaccccaacatagaccatggttgcagcagatgcctgcaccgaataagagaactgtgcaattggaaaccatgccaaattctccaggctcacttaattctccgacttttaacaagaaaatggtaaagatggattctttttccaataaatctggttcacagcgaacaccgagtcaaaaaggtcaaagtgcacgggtacaaccaccatcaaaagtttcaatagaatcgtctgaatctgtaagatccaagatgagagaacagttagctgctgcattctctttggttaatcaacaagagaccaaaccttcacataatctaaatgattgctcgagtcacgatcaacctggtgatcatgttgaccctgaaactaaagcatctcatgaaattatgtacgctgggaataaattgtctgagcagaaaaatgaggacgagcaaggtgactctcacaatattctggctaatgcagaaaatggtgattcagcactaacctcaattggtgatggcagcgaattccaatcgggtaaccttatgtcgtataatgatgtgtcttttagtgagaatttctttgtcaaagatgagctcttgcagggaaatgggctttcctgggtattggaatctgatatagagatggttgggagaaagaaaatgcaaaacactgaaaaagaggagtcaaaccatgaagaagtggctgataagctggaacaaacatttcaatctcccgaaaatttggcattaaaaattgaagcagaattattcaaattatttggaggcgtgaataaaaagtacaaagagaagggaaggtctcttctattcaacttaaaagatcgcaataacccggagctgagagaaagagttatgagaggggaaatatcgcccgagcggctctgttcaatgactgcagaggagcttgcttccaaggagctttctgagtggcggatggcgaaggcagaagagcttgcacaaatggttgttttgccagattcggatgttgatattagacgtttagtgagaaagacacacaagggtgagtttcaagttgaggttgaacaagacgatagccttcctatggatatttctggtggttcaagttcagttgctcaaagttggccaaaagggaaggagaaggaaatctctacttcaaaagctgatggagataaaggtgatctgaatactttgagcgatcgtagtgcgtcatgcacatttactattattccttcttgtgaagcaaatgatttaattgaagggctcatggttgatgatggattgaaagatgcagagtttcttcctccaattgtctcgttggatgagttcatggaatcccttgattcagagccaccattcgacaatttaccattggatgattcagagaggacacctgtatcagagaaggatgactctgaggttggctctggatccaagtcattggacctaagtcccaaagatgttgatgcttcctctgaaaaatgcgacaatacaaacacagatgatgtttcgaaacctattgacagtgaagttgatttaaaatctagtggttatcgtgtcgatgcagagtccagagaaagtcttgttgatgctaaatccaaagaatgtcatgttagtgtgaaatctcgtgacagtctcgtgaaaacggaaaaatcattgtcacccaaacccaagggtgagcatgtatggggaggtttggttcagttgaacatctcaacaacagcacctgttattgccctctttaaaaggtacattttcttaatacactaaatgtcaaagttataatgtttaaaatattttcttgacgctaatgattgtctttagatttatgttttcacttagcaacggcatacttaacttttgagcttgcactttgtgactgcatgtcgtgtcttttcaaaatacatattaattattagtatgtagtctttatgggcatctttctcttttgtggtgctgtgatcgtccctctcattgtctttaacagatatgaggaagctgatactatttagccaggtagtttatatctacttcctacattgaccactttgactggtgcctcctgtgtaacatgtaatttttaccatatggctctttgaatctgctttaacacgacacccacagcccctcccaccatgtttaacattgttttgaattgaagattttgtataacgccagcacccaacaggttccattgtttaatgtaaatgaatttgacttgtatttaatgactggtaaaaaaaaaaagagattatatgtcgagggttttgtgaatcatcttccgatataaaactaggagagattagtagataaattttaattcgactttgttatgcattggaccgaacttgtgggaacaaagtgaatgtggcatagtgattactattgttggtgattgatacgtggtataaacgtgaatcttaatattttgttttttttccccttcttgctgatctgatctttgctgttgcagtggtgagaaaacctctgctactgagtggcctgggtttcttgaaatcaaagggagagtaagactagatgcatttgagaagtttcttcaagagcttccactatcccgtagtcgtgctgtcatggtattgaaagtttatttctgttgtacaataaaatttgagtaccattatgtcattttgttggttagagtgagtttttttatctcagctttgatgttcactaacttctctttgatacccaaagcttgtttgccgatggtggaagtgattctttttggactttgtctaatgagacattcattgagcttggcaatatacaaattttataatcaaccaattccagttctagcaggatgtgtatacagcgttattgtctcaagtgattccaaagatttaaagttaattatatcattgaatatggcactcaacaagattttacattttcttttctttcacttaagtactctttggagaacactgtaaacggtttcttgatttttattcctcgcaactcatatataatttttctgggaaacctgaataatgtaaaccacattaaaaatctgtacaatattaaaagggcactgttaattgtaacaaggctatagtttaaatcgtttcaaccgtagaaagaaaagaaaagaaaagaaaaaaaagggatttaattgtgaagggatttaaggatgtatgtatattgaaagtatattttgtataaaatgaactttagaaaaaacgaagaaaataaattcgggttcctgtcataaataattaattgtaatttaagcaaatacatttagagtgtttgtcttgtgttttattttatacatattgtaattgatagtataccaatttatgcaggtcgttcatttcttagtcaaggaccagtcatctgaaaatgagattgcagcagttaaggaggtaacgtttgatcttccaatgctgaattttctgcactgttcgtaataaaaaaaattaagaagatgttgttttaatctttacaggtggcagattcatatattgttgatgagagagtgggttttgccgagcctgcttcaggagtagaactttatttttgtccaccacataataagactgttgaaaagctgggcaaaatcgtccagaaggaacacattgaagcacttaatgcaatagataatggcttaattggtgtcattgtatggagaaaattaagtaccacttctcccaaatcatcgtctcaccacaaacatacatccaaaaagcaacatctcacatctaggagacatcaagattcaagtttaaattccaatttcacacacaaacaggccttgtctcgggacgtagctacccctaactctaggcgcttacctacggacgacaacgacgacgacgaggatgatgttcctcctgggtttggtcctccgactgccaggggtgatgaagatgaccttcctgaattcaatttttctggtggttcaaaccaaccacggccaaatatttctgcccgtaatccctctagggggttggtgccagtgccatatcatccacttaatacttgtccggttgagcaagtgagagaacttatacacaaatatggaaaaaacagcgcctcagcgattccaccaggaaattggaaggagaaaggtgtaagtggggttagcgttcagcactggaatgatgatgatgatgatatcccagaatggcagccacaaggaccaacccaacaagtgcaaaactttcaacagccaatgctccgacctcacattccaaatcagccacattttgggttagtgcctctgcagcctgcccatcaagcaatgcagcctccaatgaatggttcagaaaatatggctttgtggcaacagcagcagcagccgcagcagcaaggcacttggtgggttcctccatctccgggcagtggcatacggccaagtaatataggttgtcagcctgatgtagggcaaatgtatggggccactgggcgtgggatagttaatcaaccaggcatggtctggcaacaaaatacccctaaaagtagaggattttgatcaccacatgtagagttcaaatgttattttcttcattgagtagatgaaaatttaagaaagtagtgatttttttcgcttagttgtgaacatgttttcgccattgtaacaatgtcaaatcatacatcaatgctatatgctttatagcattctaggctaggaacgttttagaaagcaatgtgttgcttttcctagggatattcgattgttgttgttggttgttattttcttcaaatttccaagaccaaaactcatgaactaaaataacggacacattctctcatatactttttttcctaccccattctaagctcatattttggctaatttattttacaaatagttttgacttttttattgcaactaattattggaaaaggggtccgtgcctaagacgatattttattcacttttttttacttacatttttttttaaaaacaacgttattttcatgttgcagatacgtaacataatataatataacatcaatgtaaaataacgtttttttataacaatcgtaaaacaatgttccgatttttggaaaaaaatttccgtaaaaaaatttaaaaacattgtagatctctaataaagtaaaaataaattatcattttgtatttatgaaatgatccttatttttttccctcacatatcatattttacgtctcttttcaataaaataaattgacttcactcttatcattttactttcagtacctaattaattcacttatcattaatatctctattcactttatttttttcaattcaatcttttttaaatttctacttttactcactcacctcgctttcactttctccatctaccattttctagttcttcaactttttcgtgatctaatattttctatgttatcccttaatttaattctctctcatttatttgttttctctcataaaacacaaactaatacgaagctaattattacattatggcttattctcttatattatttgtgccatttgaattcgcatgcccaacacattgaatttagatgtaattctaatagagttatatggcctttattatttatgtataagattaatttgttcactctacactacaacaaataactttttttttccttatatgaacgcgtcatcttacgaaatatctttttatcatgtcacgcgttatgatcataaaacacatctttttataatatcgtgtgttacaaataaaatcataaaacatgatatcctttgatgatatctcatttcataataaaattttagaacatattgcgtagcacatttactacgacattttgtgttgcacatttactacggcatgttgtgcttcacattttccccagaagttattacacggcacataattaattacacctcttaatcgtcttatattcaatattcatattgttaaattttttgttttcacaaaggaaaatcaaacacctgaaacccagatatatgatattacacaaatcctttgtatactaactacacatacatattgcaaaaaaaaacaaaaagaaaactatacatacacatacacgaaatttttttcaaaagaaaaagagaacgagacaacaaaatatgttgagcagtatgataaaatgagatgattcgttaaaataaaacaataaatccaggtgtgattgaagttaaccaatatcaagttttaggaagtgtttggctaattttttttttaaaaaaataacttgagttttaaaaaaaaactaaaatcagaaaacatcaatatgttattttttattttcaaaatcaacttttatttttggtctaacatattgttttttatagtttctctcacatactcgagtctaggttggagttcgggtctgggttccgagtctgggtcaggtc

SEQ ID NO: 187254 - DNA, 2408 bp, Cannabis indica
tcttttgagtttaatggaacgggttggtggttttgctcgattatgattatcatccttgaagaaagtgaaaatggaatgagtggttccaatcactgagttcttggacagagttgtaataaatcatatagttgtcgtttgggttgcttgaagagattatgttatgtctctagaagacaatatgaagtgaaaggattgtgctcattaaggcaatgctaatggttatttgggttgcttgaagcaaagaagagtggttttggttcagtcttgaaatggctgtcagattatggtttgatatagaaaatcaaactagacaaatggttaaatactaatagttattgcttgaagaggtacaagagtgactttgttttaatctttcatggatagaaagtgaaatcagaatgaatggttgcttaaacttattaagctctcttgggttattggtcttggaaattcagattttctgcaaatttcgaagtttatacaatcgttgcatcttaagctttggataaattccatttgccctttgtttgtttagtttcagatgtcatgaaatctgattatttaatggtttctttaattatagtgtgtggcctgaatgctatcaggatgagatgaataggaaggtgataaaatgaaaactcccagtaatattaaggatctttaacgcctgttgtttgtgtaattggaaggttaaattgtaaaaaaacaactcgagtttttttttgcttttaggcccgcttgcattgctatttgaatggttgcattgattttatgcagtggtgatgataatgggaccaagcatttaaaatatatcattgatgatgttgtgtcagagcatttgcatttgcatcatcagtgtgcctaatctttgagtccaaataattatatcccattcgtcatcagtttaaagtttgtctatgttctagagaaaacaattgtaattggctcaatctttattttttcttctgtttattaagttttcttgtattctggctatcatttccaacgtgtttctgttttctgaatgaaaacagaaatgccaaacattaattttttttgtcttttggtaataatttttgtgctctctgataactacattgttgcatattgattgtgactgctcacaacttcgacagtagtttgtgtaataggtggctagaatgttctaggcatgatctttcattaatttgagaagtttattggaatttgcagttcaccaaataagagacaacagtcaaaaaaagcctctcatgagcatttaataagtggagattctgacctggatgctgacattgcttcaacggctagtgctccagttttgaatcaggaaagcatttctaatgatagtgtacccgatagtatagccaggaagaacgatgatgcaaaagagttgaacatcaacagtgtaaatgtcactaatgatacaaaatctccggtaaactactttacccatattttacattgtgaacagaaatctgtattcagaatcacttttactagttcttttagtctttcatagattttattgtttctttgatcttgtatgaaaggtaattaacaacattgattgttaaattttgatcaggaaagcatttctaatgatgatgtacccaataatttaaccgtgaagcatgatgatgcaaaagatttgagtgatgtaattgtcgctaatgagacaaaatcttcggtattctgcctaaccccaaattttacaaggaatacaaatctgtattcataatcactttttagtttttttttaattagtcgattttgttcgtccttcgttttttatgatttcattctcatatgaaaggaaattaagtgcattgatgataaaattttgaatcaggaaagcactatgaatgatgatgcagccaatagcacagtagtgaagcacgatgattcaaaggatttgagtgaagaaattgcttctgatgaattaaaatctatggtattacctttaccctgatttatacaatgtggttacaaatatgaatttagaatcacttttattatgtgatgtattctacacatagatatctttgtttcttaaactttgattctgatttgtggattgttatctccttttgattttgattttagtacttctagtgtggccattttagtttgaagagtcttttgctttttgatctattgagggactgggagtttgttatgtaattttgtgtcatcatcttgaatgtgggatttatactggattgttctttaaaagtgatgtgatatagtttaatacaaaaaaaaaaaaaaacggaaaaaaagtgatgtgatataggctcccagcagtttcctttttctttgatcagaataacatttctttaaattattgtctcctttcatttgactagtctttgtcatctaggttctcaatgtggatgcagcagagactg

SEQ ID NO: 187255 - DNA, 6332 bp, Cannabis indica
acaaatgttggattacccgtatatactatttagtgaagtggttcgacccgtttcgatgctaaatgagattcttaatcttataacggctttccacccgtacatgtcgactcgacgtgtggcgtggagggaaattttgcccatactcatcaaaatccagatatatataaaaaaaaaaaaaaaaaagaaaatcgccaaaatcacgtgtactgcgttttcattttctttctagccaaacaggaaaacaagaaaaaaaaaagctagaaagtgaaagaaaataaggtgaagaaaaacaacaatgggagttccacagactatcgctactctaagcgagagagcatcatctataagagaatcgcttctaaagagccagaccataactgatagcatggtatccattctcggctccttcgaccaccgcctctctgctctagaaaccgccatgcgtcccactcaggttatatatatatatatatgttattttttttcctttttcattttcagagattcggtaggaaatcaaatactgcaatgtacataaaaatttcatctcttcctgattttttgatcggctaaggaaaatattcattttcgttaagtttttgcatttgataatcagccaaacgttggatcatggttcattttaataatttaattatgcttcttgtatgtgatttgatcaaacattgaatttcgtttttggtattatgtcttttaagattaggacgcattcgttgcggaaggcgcatgagaatattgataagacaattaaagcagcagagtctatactggcgcaatttgaactcactcgcaaggttagcgttaccgagagttttagaaatgtggaatgtctcttttctttttccattttgtgttttttgttcttaaacagctcgcattttcttttcaccatgtagtagcttttgaaccatatattattatcaatagcttgctattgtaaagttgacacattctgtatttagtatttgtagaatttagtattccgcattctaatttcacgatatcattctgttaatctaggtctccatcttgactgtctttcaaatattatgatatagaggcatcctctgtttcttaaccatcagttatataatgcataaaagctgtatgaaatgatgctgcgtttaactgcagtgaattcattgttgagattttgtggattgggttaagagaataatactatttgctctttgttaagcttttagtggccaaaattttttattttgcaaacatttttggtttggaaatcttttccttatattaaattaaattttaggcagaggctaaaatactgagagggccacatgaggatcttgagagctaccttgaagcaattgcccagatgagaaacattgttcgcttttttagcggcaacaaaaattttaaaggcagtgatggtgttcttaatcataccagtaacttgcttttaaaagctatgtcaaagctggaagatgagttcagacagcttttgacaaattacaggtttgttcttctagtctcttattatggtacagctacagcctacaagtacaagtgttattttctccctttaattaagtagtttttgtgatatgcttgatccttgaataagattgttttcataaaaatgtatctcaatagacagaaaaagtatggttaaatttcaagaggtaacttctcatacttacctaacgtattttgagaagtgattaacttgaggactatgatgatgcaatattttcagtggtaaacagtcatcatattcttttcataaaagcttttcccctcatgaaaaaactgacatgtgtaacaaattattttaggctgcaggagagaattcaaactttaatgtaatctactttaatttcaatatcattgccattttccttgaccacattgcagcccttgatttcttaatataaatgtaaaatttcactgacttctgaaatatttggcatatatacttgctttcatttgatcaaaggccttttcttatttttcactcgtatgtaatttagttacaattactgtagaatccaatattgagttcaataccgctgtgatcttctgttgtctatatttttttagagctacattatcttttttggtttcagcaagcctgtggaacctgatcgtctttttgattgccttcccaactctttaaaaccatcagcaacatcatccgggaataaaaaagatgctagtggcaaggatcactctgatcaccaaaacaaacgtttagaagctgcagtttatttaccaataactcttattccacccagggttctgccattgcttcatgatttggctcatcaaattgtcctggctggcagtccacaacagctactaagaacttacaggtgatttttttctttttgtctagagtgaaaattgtaaacttaaatcttccacttgtatcagggtgattatgcaatacatcttcagctaattcatacatggtcttgctttatatgcaactgattgcagtgggattgcaccgaaaattttgattgtgatttatttttacttatatttctttagcttatactttaccatttccaacatcagggacactcgggcaccggctttggaactgactcttaagaaactgggtgtggagagacttggtaaagaggatgtccagaaaatgcaatgggaggttttggaggcaaagattggaaattggatacactacatgcggataacagtaagaatttgttaccacatctttagcttgattgatttgtagaattatatatttttggtgattcttatatagcttgaaacaggtcaaattgcttttctctggcgaaaggaaaatctgcgatcaaatttttgagggtgttgattctattagagatcaatgttttgctgaagttacagcaaatagtctggctgtacttctcagttttggagaggctattgccagaagcaaaaggtctcctgaaaaattatttgttcttctagacatgtatgagataatgagagaacttcagtcagaggtatggtatttttcccagtttgcatagattagacaattgtaataaattttttaaatatggctggctattcttttcatttttttcccaaataattccggaatgtgtcaaaagacattttctgcagaacttgattcataggcattggaatcctgttaaatgtgataggggagggtaaagtgctgataatggaaaaccaacataattgagtttactcgcatgcacatgcataagcagtttgctggcttgctgcctgatctcttctctaacaatttcatacttgcattctttataattgtttcttaagtcaaacaaatcaatgaaaaacttttaaggagttcaagatattgctctggtttcaatagatagatggtatggattgataaggctagttataaactacttcaacaatggttaatcacatgtcaaattatatggatatctatttgtttagcttgaaaaaatgatcacattcatatttttatatgttaatatgtggtatctttttcttggtgggggtgcagatcgaaacactctttggaagtaaagcttgctgtgaaatgcgtgaatcagctttgaatttaacaaagcggctagcccagacagcccaggaaacatttggagatttcgaagaagcagttgataaagatgccacaaagactactgttcttgatggaaccgttcatcctttgaccagctacgtgatcaattatgtaaagttcctatacgagtaagatgcaacttcttccctactttctattggcttcctttttggaggttgcagattttacattctaagcacctcttccatcagcttcttttctatattcttcataataccccacaaaattttattttctttattttatttcacacttttagattacatcatacataatttttttattttttctctatcatttaaatatcatattttaaaatatattttatttatacaaataaaaatttaaaaatattaaacaaaaagaaatagaaagaggcgagagaaattattataatattatttgaagcatgtagaaaagcatttttcatgatgaaaaatcaagttattttagttcacttgataaagttcttttttaacagcattctttcatattttaccttttgagctatttcaactcatttgatgtgtgtgctcaattgcttgctctagtattgtggcttgtttctttgtctaagcaccaaagtgtttgttggctttggtataggtaaaatgatttatttttagtgtatcatacacagtacttataattatttagtatattattttttggaaaattctttgttgtgtccctctttgtaggagcattttaggtttcggtatataaaaaaattataatccaatttttcattttatttgatgatatacatcataattataccacacatcctaccagcttttcaaaaaaattggaatagtttaggttaccgaaaatagagtaaatagtgagttgcacgtgtataaaaagaattaaaaaactaggactcgtgcaactcgttttttcaaccttgtttttaacaccgcaatttttctaaaatttgtagaatgcatactatatttataatatctatcatcacataaaaatatttgaattataattctccacataccggaaacaaaaatgtctctaccaacactaatcttgtcaattatttattaccatttatgtgttttcctggataatacctgaatgtttcaagaggtcacaacaagtgttcgtgaaaatttgacaaactataaaacagctaggaatatttttgtcaaatatattcacaaactaggaatatatatattcttctcacaagaatttttctttttgcagctaccagtcaacactgaagcagctttaccaagacttcaatcatagtgatccggaagaacagctagcaactgtaaccacaaatattatgatggctctcctaaataatctggatggaaaatccaagcagtataaagatcctgcactgactcagttatttctgatgaacaacgttcattacatagtgagatctgtgaggaggtttgtatagatttcatttaaatattctatataattatacacatcctgtatgatagattccatgaacctataaatgtaatatacaggtcagatgcaaagaatttgctgggagatgactgggtgcagatacaccgaaggatagtgcagcagcatgcaaatcaatataagaggtttcttgggcaaaggtttttcattttatttttaatggtgcacatcagtatttattgtagattaaatagtaaataagttctcctgtttctcttttattcacctgtgccttctttacaaatgcacctattattcattgtgtctttgtcttacatgacatgttttcttgtgaaaaagagaatctctctaattccaaaatcgcctccaatttttgcttggcagattctgcaatgcctcacggttcagggcctaaattcctctggcggcttgattggaagtggcgaaggcagtggtaactcgagtggactttcaagggcgatggtgaaggatcggttcaagaccttcaacatccagtttgaggagcttcatcaaaggcaatcccagtggacagttccggatagtgagttgcgagagtctctgaggctggctgtcgctgaagtcctcttgcccgcatacagatcttttgccaaacgtttcgggcatgttttattctttgattcttttcatatttttcgtttttttttctccttctctaatcagttgcacactatttgttatggcaggcctatgattgaaaatgggaaaaatcctcaaaagtacattagatacagacctgaagatcttgagcgaatgttgaacgagttatttgaaggcaagacctggaatgagccaaagcgatagtttgcttttttgccattgccaagtgccagtgccactacacctgttttgaacatttatcctttttattacagaattgtcacatacgaggatgaggttaaaatgaaagccattttatgtgcatagacgtttttctttttttttgagccactttgtaagaatttggtccatctggatagtagtttgtttgaaagtctgataattgtaagtaaattaatagttataccttcgtcttagttgatcaaaagctgaaaggactaacgcagtcgaaatatatatactagctggactgaagagtatacttagtctataattaatgctatttttttatgaattaatttttattaatgaagacgcaattcgaactgagtttatttttctcttggattctttccgcatcataatcagatccaattagaatacatcaagaataaacataatttatttt

SEQ ID NO: 187256 - DNA, 2158 bp, Cannabis indica
tttgtacctttgcatttcttttccgtaaacaacctgcagagacaccactgctatctgggtttctattgatgttcctagtacacaaccaccgggtcaatatgagggggatatcattatcactgctgcaaaacctgacaccgagtgagtatattaccattcatttcatttggctcaagaccttagagattgattataaattatactctataaatctgcaacaattcagtataactagaattcataattatctcattctggttcattgcagatcttctgctcaatgcttaagcaaagctgataaatacaaactttacaaggaacttcaaagctgtcttgaaatgatggggccagttgatgacagaacatcagatggaatggtacatttctatttgtctctgaattaggattgtttcttgtgcgatttgaaggtttgttcatctgaatatttgttcctttaggtagaaagagtgaaatctgcaagtacatctttacgaagcgttcttctgtctccattattttctgaattttcagataatgggccagttgatttaatggatgagatgccatttcaaacctttcattgcgtgtgaagataaatttgacagtttgggactttgttcttcctaccactccttcacttcctgctgtgtttggcgtatccttgaaataagtatattgaacaattctccatcactgatgcatctggtttaagttttctggtgatattgtttaaagtactgaactattgtttaatttctagtttcccactagctgagttcattagaacatcaagtttaaaatattcagctagttagggatgagattgtcaatgtagaaaaactagtgttgcatataccttgtttttcaaaaacaaaaaaagggaaaaaaaagttctatgtgaatcatatagacgtcgcataatcaaccgacaaggatgagaatctctgaacagggaaaaataatgtttatggaatagaagtattctctgaacaggtgaaaagtaataatactatggaatagaagtattctctgataagttttgccaagtgaaataattacgatcaaatcagtaatgccgtagaacaggttgctatattggcatatacctccatttcaatttttattgtcaactgaatttagttcaaactgagagtatgttgctattagagtattaattcttgtaagctggtggttggccccttttagaaaagttggtcatagtgtgttgtgtctttaactctgtcttagatttctgataccgttattgaggatcgttttggtgttgttcatgggagcaaagagtggtatgaggcattggagcagcatttcaagtggcttcttcagttcagaataagcccatatttttgcagatggggtgacagcatgcgtgttttgacttacacttccccttggccaggtaacttgtgggctgaccaaaaatttatatttggcaacataattcttgccactatgatcaggcagtatttattctgtacacagttgtttatgaacacaatttcgctgtgtcttactttcttctttccctttttccatgggcattgtagcggatcatccaaaatcagatgaatatttttcagagccacgattggctgcatatgctgtaccatacagtcgagtcatctctgggtatgcagtcagttctccagattcacttatgcagctcttccgtggtgaaaactgagttggcttttaaccctcttggtgatgttacagtgatgcatcgaaagaatccttgcagaaacaaattgagatactgaggacaaagactcactggaagaaagcatatttctatttgtgggatgaggtaggaacagtgttgcagagcaatatgaatagaaaacttttgtttgtttaccttagctgaaaatgatgtcctaagataataatatttcttggaatatagcattttctgtagttcagttatattttttgtatgccattgaactctggcagaatggctgtctgtcttattacaaggactaatatttctcccatatttcatggcagccactcaatatggaacaatatgactctctgcggaacttggcctctgagattcatgcttatgctccagatgctcgtgtcttgactacatactacagtggtagagagttttttttaattattttcctttttt

SEQ ID NO: 187257 - DNA, 5953 bp, Cannabis indica
ccctataatcatattctccttcaaaatataataaaaaaaatgagaaacttttttctttataaaaaaataaataaggaaatgtttaattagatggttaatataatatgtgattaaattgaaaaatgttgagtattacagtatggcaacaaaatttgaatatgggtaattaatattaaaatatacaaaaaaaaaataatatgtaattatttataatatagtgtctaatagtaaattttgtaaaaggaaggggtgatcaaaatatgcaggcccgggaagagttttaatccttccaaattttcttcctttattatttctacatttctatcctcccaaacaaaggaaaactacactccttcccatgctttccctttatacctttccttcctcttatgtttccttcctaacaaacatactgtaaaaaaatatatgaaaatcagtgagcgagaagaatacttaggaccaggagagcatgctatttcgaactctcatctttatattttatgagccaaatgtgctagttaaattacaattgggcaatgttcttttttttttggtttatttatattgttgttagttcaaataaataaatggggtgaatactaaaagtaaaaagttaagaattttattaattttgacaagtgagttgaacctggaaaccctaaatgcgcagtggtagaaattcgtacctacaaaaaacaaccttcactcagcaaataaggacaatagaggaaacccacaataaatgagaaaagaatacatatgacattggctatggctactttcttctttgagaaaattatatatggaatttgaaaattacagatgagaagaacagtacacaaaaggaattaatatgatactaatgatctttaaaaattttatttttatggaaaataatagatgaaaaaaatattttaaatcaattataattaggaaaaatactaatccacgatatggaataaatgttttcttaatacgtgtaaatattctttagaaataaaattacattgttaaaaaaaaatgtaaagaatattgaaaatgttatttattacttgcaaattagaaaacgcctaaactcattgaccttaattaaatatataattaaggatactgatgaagaaggactgtttagccaaagtggggcttaaaacggtccaaaattccccaaaagaaacactacaccacccattctcaaacccatcaataataaaaataataataataataacaattataaaaaaaattagtcataatttataccaaattagattcataaaccctaccacaagagagtcaaaagaaaagactcttctctactttctttcattcttcccttgtggggattgggacccacttttgtgcaggccccaatagtgacaaatatgaatatgggtcggtcgtaaaaggacgacgctctcctctcctctcaaataagtatttcatttcagttgaaataagactccaaataattcgtcaaactatatccttttcatttttttttctcttattaattataataattctttccaagtttaatcctttatattcacaccctatatggcaacaaattaaaaaagccgtccccataataaataaatgtatattttttccacttacaaaaatctgtctttaaattcattctctacccctttctccacaactctatacctctctcttctctctgtccttggtttttcagagtctcatcgtctctgattctttgtttttcttccgttgataaaacacaggacaaaaactatgtgccaccactcttcatctccttcttcttgcttgtgcgattatgattcgaaccagcctaaagtttcgtctgttacagtccaagacagtaatgaacgaacccctttgattaattcaaagaccacagatttattagaatcccagactcaaaactcccaaaggtcccatctttctgaggcagtttccgaagccaaatgcatagccaacatagctcttccgatggtcctaacggggcttttgctctattctcgctcactcatctccatgcttttcctgggtcgactcggcgagttgtctctggctggtgggtctcttgctataggatttgctaacattacagggtactctgttctctcaggactcgctatggggatggagcccatttgtggccaagcttttggagcaaaaaggttcaaacttctcggccttaccttgcagagaactgtgattttgcttctattgacttctcttccaatagccattttatggctaaatatgaggagaatcttgttactctgtggtcaacaagatgatatagctacagaagctcaatcttacatattcttttctctccctgatcttattgctcaatcgattctacaccctttgagagtctatctcagaacacagtccataactctccctctcaccttctgtgccaccctttcgatcattctccacattcccataaactattttctcgtctctgttctaaatctggggattaaaggggttgcattaagtggggtttggacaaatttcaaccttgttgggtcattgattgtgtacgttgtaatctcaggtgtgtataagaaaacatgggttgagatttcctcagactgtttgagagcttggaagtcacttttgagtttagcaataccaagctgcatttcggtttgtctcgaatggtggtggtatgagttcatgattttgttatgtgggttgttgcttaatcctcaagcaaccgttgcttcaatggggattttgattcaaaccacagctctaatgtacattttcccatcttctttgagttttggtgtttcaacaagggtggggaatgagctaggggcaaacaatccccaaagggctaaacttgcagccatagttgggcttttgtacagctctgttttgggactctcggcattgttgtttgccgtaatggtgagaaatatttgggccaaaatgttcacacaagatgttgagatcattgcattgacatcaatggttttgcccataattggtctttgtgaacttggaaactgccctcaaacaaccggttgtggcgttttgagaggcacagcaaggccttctctcggtgctaatatcaatttgggctgcttttaccttgtgggaatgccggttgctatttggttaagcttttatgtggggttcgattttacagggttatggcttggtcttttggctgctcagagctcctgtgtggtcaccatgttggtcgttttggctcgaaccaattgggaaattcaagctcaaagagccaaggaactcacagggagtcatgtcacgcttgaagaagttgatcatgaccataatcatgattattatgatgatgatgatgaagtaaaagattctttttgttcattacatttttgcagagtctgatgaccatagcagtagtaacaataataataactcactagtgtgactcatttgtatgtacttctttgagacctactacattaaccaaaattgtgaaaatgttaggggtcatcatactcataattcatttcattatgattcttaatgtgattctttcttttcttttctaactcttatatatatttagagaggttgataagttgtagtagtagtagtagggggggacacatatttgatatgcttatatatagagatatagatagtctttttgttttatgcattggtattttctctcatcagaaaaaagtggaaactttaatccaaaatagtcatttttattcattaattgattattgtctcttgttctcttctatacttattttggacagcacatatacataacaaaaaacaagaccacaaagtcttctttttttattatatatatttttttttttggcctttgcttttctttctaaccctttaatataagataaaatcattaattgggttagccatatagtttgaatagaacaaaagtaacatcttctttgcttgtcacatataaagaaagattatgtatcagcctttatctttcgaaaacatctctacagtaactaacgtatgggatacttaacaatgaatacctgaatttggcatttatatatcatgtatactaagatcatcaacaaactacataacataagaagatacataaaatatgggctttgctcatccaaattcaacttctacctcaacttgcaaacaccccttcagtttttctaactttcattcacctccttatcggtaaccattataatttaaaaaaaaaatctcactttgtgaataattttttttaaaggattatttaacaaatacacaaacaacaaaaaaaaaaaattacaaaaatacggttatacggaagtttgaatatttttatgatttttatgattttatttacaaaaaatacgtatgttgtactcttgttattttgttgctcattttttgttatctatatatgttatttttttgttattgttttgatgttgtttggatgttatttttctgtactttgtgcaatttttattttttattttatagaaaatcgtaaaactatataaaaaaaaaattctttaaaaattttacaaaaaaaaatagtactttaaataattatttctctttttaaccgcaacataaagattaaatgtcccaatgtataattaattgtgattaattggtaatattgtcacaagatatgactagaaatatatattaatattataattttgtaattttagtaattaatattttgttatcgaaaaccatctagtgatgatatataagacataagtatgatgatttgatttccttgaatcaaaagtgagaattttcgtagtattatttagttgagaaattaaaatgtttataggatcatgaatcatgatgtaactttggagcattcaaagaagaaaaaaagtttatatcactctgtgtaaaaatttctaagaaaaacatattttaccaagtaacattagcaaaaaaaaaacgttatttctttgtgaggaataagaaaaaaaaatacagttttatcattatataactgtcgagcataagggtattaaaatttttgcgaattttacataaaactaacgcctatttctataatgagtattctaaactgtcggaaatactcaatgttttttaacagtttaaaacaatcatttaaatttattagcgatggtccctgaaaaaagcatttcgaaaaccgacaaaaaaccatgtttgtagtagtgctaaaatatgctcgctctctagaaaatgtgaaaacaaaaggagtcacaaaatttgattaatattttaaaatattattatggatgtccaaatcattgcattaattacaactatagattatccatgggaaaaaggttaagtcaccaatccaactattgtcacaatctgtagcttatttgcaacaatttcatcaaataaacgctgttgtgaaaccagcaactggttctcaccccagtcacgcagctgtggctaagtggcaagcccctccagagagaaaaatcaaactaaatgtacgtagatgcagcaaattgattctttgaggagcaaaattcgtattggtgttataattagaaattctattggacaagtcttggctgcagtgtcgaaaacagcagtaggaaactttaaatctcaggaaatggaagctaaggcgatttttttggtctttcgtgggcaaagcaattggatattcctattgattatgtggaaactgactgtttaatgcttgttaatgcattgaatggacgtatatcaccaaattcgggcttccatgatttggtttctgaagtctcatttcatttatcctctttctctaatgtttgcctatctcatataaaaagagatgctaaccaagctgcacatagtttggctaagcaagcattacagttggataataattatatatggttagaagagattccttctaccatcttctctaatgttgtaaatgactctatttgatttataataacagaccctttctcaaaaaaattaaaattacaactat

SEQ ID NO: 187258 - DNA, 4521 bp, Cannabis indica
tgtaagatattattatttttttaattcatatataataaatataatacgatattcttaatttttatcacttctcatcactaattaattcgttaatgtcttgatcatcgtcaggatcggccttcgacaaaagtgaaatccgttcctggtggagattcatctcttggatacttatttggagataagtgatcatcgctattgttttctcccataatatatagtcaataactctttgagaatatcattatataaaatatatatatagagaaataaagagtttaatagtatttgtatgtttattctagaataggggaactgaatttcccatatcaatggattaactaatttagagtaatttataaagtgtgtttgcttgggttgtatattctgatatatgaacactaattataattaataagcaccctttatatataatctggtttgctaagtttactctccaatttcttataattaatcagtttttgaatgcttatataaattataagttaagtatatattatatcgaatgtatattaatgatggtgtctctgttcaatgttgattaatcttgttttccatccagatttggattgtggggattatttctttttctagtacacaataatgttaaaagtcaattaaaaaaaaataatattaaaagtgatatgtcgatctcatattccatcaacaaattattatatacaattgaaatcaccaactacatcttcagatagttagccctagcaaccacaaatataccataaattttcatggtcaactccctttctccctagctagctttttcttgttgctctatagatatacattgtttaaagaataagaaaataaaattaatttctcatttctatatgatattttatttatacatcacaatatatatatatatgtacattattaattaagctatacaaatatatatgccgggtttacaacaaaattctcttaaacataggaaagatcataatatataaacataagaatggacaatatcctaatttttaatagtatccaaaagctaagcaatgagttcttaagactcctagacaatatcatacattttagaaacaaatggggtgtcacaataggcttccacgagagatctcttttttcaatattcagaactaattagtaaatatacaagggtaaatatcattataacttattttataaaaattactaatttactctttgttttattaaatgataatcgaaccatatatttttaaaatggtacaaagtaatatgtattctaagctttttttatcaaaaaatttaaaaaaaaaaaaaaaaaaaacttattaatattcgatataaagttgttatactaaaactcgttacaatttcaacatttgttcatataagaaattctcttcaagttgattatactaaaaagaacaaattagttaaaaattaagctcaaggttttttttttttttgaaaatagagagtctaatttatcatttaagaaaataaaaagtttgataaataacttttgcaaaacacattatccaaaatagtattaactcaatatataatttgttttattataacttttttttggatgttaattttcttagtcgttataataataattatctatattttatattgttcgataaatatttattagacaaatgatgtacaaacggttgatattataatatattagtatattgtgttgtgaaatttaatcaatgacttataatggaattaaactgaaccaataaatatataatcaagaacaataatatcaaagaattgcaagaattaaataacggattaaaggagtaaaatagagaaaactaacaccaagtttaacgagttcatgccttgtgcaatgctctacgtctcgatcagaaaaaaaaaaaacagtcataactttattgatatcaatgttataagaatcctttcaaactattaaagagattacaagatgaacattctctctctaatttagactcgttttctcttaccttacacaatcacaattttctctcaagctttcaatggtctgattccccatggattacaaaggtaatagctatatatagattttcatagttgctaaaattagctttagttctatcatggctaattaatgctatcttaaatctccaagtcatcaacaaattccatgtcagcttgagaaatgtgctttctgtactgacaataattcagaagacaatacacatgttctggatgtgcattcaagactaacaacaagctatctggatgtacgtctcatgatgtattacaagctatccagcagacttcacctacggaagacaagctttggaagaactatctaaactagccatacgaacaaagctttccgcatgaacaccaagctttctgcaacttctatccagagtaacaactagcttctcggaagacaaaatttgtaaccataatcaataatctgcaggttactccttagattagaacatcactttttctcttacaagtgagggcatttgtataacttttaatttggaatttaacggtaacaattttctttagctatggcgaggtatctaatatacgattaataatttattttacacctaaatggcccatttatatttttccttgattaagaaatatcttttttatcactctcctttctctattgcttactctctatttccagtgaatgcgactagatagcttaatctgcaatggctgttaataatacatcatactcaaatataaatactcttgtcatacccgatttttgagaaattaaaaaagaaaatcaaccctgcaaatttgactaagactcacaatggaaaaataagttaaggtatcctacttgagaatcccatgacgcctctagaaaacttataaaaatactaatcaactatttggtgttgggacccacaccaaaggttaacctatggtttattccttgcaagggttttcatcgagagacctcaatccgataaggaaatcaacaaggacttgagttatttaggcataaaatagctagaacttgaacataaaagaattcacaaggaggctaatccacaacgcatggctgacctgtgcaataaacactacaacaaaagggactttttatctcactttttacacttgaaaaaataaaaaagtgggataaaaaattttgatcccacttttacatttagagccttaaataaaagtttggaacaagggccttgtttggaaaatggataaaaaacagtgttagaaatgctatttttagcatttgccaaacagaacttagcattttaagtgagacttttaatctcgatttttacataataactgcgataaaaggttctcatacatttgggcattttaattgttgggccagctacacatataaaaggaaattaacttgtaggattttattttattagggttactcttatttttcctcccacttcatctctatctctctctaagcggctgcccacatggagatcaaatgggctcgaccatggtgtctctacgctgcaatccttacctggttcttttatttttcgtgcatcatcacaggccagcgacatttttctggtgaaggatgagccaacggagttcagatccgagctccacgccctttgaaacttcaaggtaccgttcgtgttctttttctttttcgttcttgagagatctatgctccacattctctaatcttgttctacttcttttatttctttttttttttttaaatgccgatcaactctctctcttctttctttgctcaggtgtgaaggttcgtggtcaacgggtcatggtttttcatggtggacgaagcttcgtggttgctatttgtgctcgttgataatgactctcggttgtcgaaggtggttcacgtggttgtcaaggtggttcgtggcttttgttgtactgattttttgggatttaaatctatactgattgtatattttaccaaaattattgttgagaaaaaaaaatatactctgtagtggttcattgcttgttagtgttagtatattctttttatttttttaacctttaatcccggttattatagaaaaactggggtaaaaattactttttatcccacgtttttaaagaaaaactgggattaaaatagtcttgtattccagtttttctatatataataatcgggattaaaagtgattttttatcccagtttttatcagagcttttatcccattggcatatatcccagtttttattttagcaaaaacggggataaattgtccctaaaaaccgagataaaaaacatatttttgtagtagtgaaaaaagatggcataggtctctactcgcaattcaccaaaataaacttttccaaatatagtcctcaacaccaaggagtataacataagtgagagaaacaatttttcacttaataaccatgcttgtcgatcctatgccatctttgtatggaaataagtagcacaggccgaccacaccgaatggaaaggagattttttttcaaagattacttttttatcatcaagaaattaaaacaaagtgaggaaggccagca

SEQ ID NO: 187259 - DNA, 1211 bp, Cannabis indica
atggttatggtgaaagcaattggcaagattttaagaagattaggttttggaacttccacaacaagattattgaaacaaagcttctttcagttggggtgtgaaacaagcagtgctcactgagctcaagaaaaactctagtagctatttattgaattttaccttacaattataggaaacctaccagacatggaagaactttcaagaatagattgatattgggtcatacttagatagtttgacgtatagggaaatcttggaagacctttttttttcttttctaagctatggttgaatgaataaatcggaggctgatttggtagtccatctgactcacagatactagaagaaagaaagctcttagttaaaaagttagttgtgaaagatggttaatcaggagttgtgcgtatgtgaaagcacatacctaaaaagctactaaattactatgccaccatccaactaaataagtggaaagcagttgatattataatctacaacagataagtatgaccccaatttttcctgtgatatgcaatcataattggagaatcaaactaaactacaagaaggggatatgattaagattagatctccatgagaccaatttgtccatgtaatcttttgtgggtttattatgtgatggatttagttttgttatccttgttgctaggattattgtcgttaggttatttaactttcttaatcattgatgatcactctgattttttggcatatgattgaactcataataagcatctcacctagaatttgtttcttatgttttcagccggtttcaaccaaggggaagccaacgaaactgcataagaggaagcatcagattggttcattatattttgatatgaagcagaaagaaatggagctatcagaacggcgttctaaaggactcctcacaaaagcggaaacacatgccaagtatggttggtgactaacatttgttaatgttcaaatgttgtattcaatatgtcaagaaataatcgtcatagtatcatcattagtttctttttcactgctgacttcaagaaactcgaccattctgcgccttgtttgttatttgtaagttagaaatggtggtctaaaactagccatttcatgatattaagttcttttagtgcaaaaataccaattgttctgaccacattgttcttaaacgttccccctatttggaagtgtagcgacagagcaaaacacccttt

SEQ ID NO: 187260 - DNA, 2619 bp, Cannabis indica
aattatactagagcctagattgcttctgattacatgctgtgaataatgattctgtattttgatatgatgatcgctctatcatcatatcaacaagttagtttcatgtttctgggtttcaagtcctgtatatgctgtcacttcgaccccaatatatatcttgaatcaagtgtatggttacgtggttaaaaatttgaaattgtatatgcctagtaaattatgattcccaatattcataatatcccaaatcaagtgtttgcttatccacttaaagaattagaagttttgtgattaattatcattgaaagaacattgcaggttttagctgctgtgatcaaagcaggcgcttctagggagcatgaaatacttgctgaaattagagatgctgtattctcttttattcgtaagatggaaccaaagagggtcatggacaccatgcttgtatctcgtgttagaattttgtatattagatcgttgcttgctagatcaccagagttgcagtccatcaaggtgctgaatatgaaattgagattacactttttactgtttcttgtgctgtcgtgatgattttctctcatttgtgttttgctaagttttatttttatttaatcttgtaggtatcttctgttgatcgttttttggaaaaggctaacagtggacgtagtagaagttcgagccgtggtaacagcccaggaaggtctcctgttcgctatgctgatgagcatatccaaggctttaaggtcaatttgaagccagaaaggaagtccaagttctcctcagttgtatcaaagataagagggctggatcaggttggctgctatttatatgcatgttgtgtgaatgttgtttatctttctcgtgttgtgttgtgggtgtaaactatcctttctcctgcttgtattttcatggagaacgttgcctattcaatcagttctatatgattttttttggcaaattttttcttgatgtaagataattatttggtaaacctgaatgctggtgttattttcttgctctgcttttctggaagaatgtccctagtggttttgatagatgttaggctaaagattgtcaatttacaggatactttgaagcaacaggtcactggtggaaagcttagggaaatactcgaggaagccaaaagttttgcaattggaaacaaggctcttgctgctttatttgttcatactccagcaggtgagctgcaacgccaaattagaacctggcttgcagggaattttgattttctttctgttacgggagatgatgcatctgggggaacaactggtcagttggagcttctttcaactacaataatggatggttggatggctggacttggtgctgctgtgcctcctagtacagatgctcttggccaacttttatctgagtatgcgaagcgagtctttagctctcagctacagcacttgaaggtattctgagtatgcaatcaatattatttttaaaaaacacgcataagggtcctaacaattatgagcttatttaataataagagtaataagatgtgcatacaaaatatgtcccaaaccattacacacagtgacatgacactttatttccaaacagtggcatcttaaataattgtgattagttgaaagagcagtgccacttcactgtaatgttttggtgcatattttggatgcatctatcgttgctacttaataatagttttcttctttcgttttgctcatctgtgcgttgttgaagatatatacttttcttcgaaatgtcagaattttttgaaatttctcttcacataggatattgctggcactctggctacggaagaggctgaagatgcaccacaggtggcaaagctgcgttctgcacttgaatctgttgatcataaaagaagaaaggtagacaattcctaatattgatagcaccattaaaatcaagcaaattgaatgtggactgtgtgaaattttttatggccgataggcaaataattcatttgttttggagttcttgaagaaacatgtttaatagtatgtatttactgaggtgttgtgagagcttggtagggtgcttttaaacaaaaactgatagagcgcactccaaattctctatgctcgccaacgttgcactgtaaagtctaatgtgatatttattttgttttttttttaatcagattttgcaacaaatgagaaatgatgcagcattactaacattagaagtgggcagtccacccattcaaaatccttctactgctgctgaagatgcacgattagcatctctaatatcacttgatggcatattgaagcaagtcaaggttttacctctgcatttttgttttattttttgctgtcaatattcacttccccaacttactttccataaagaagcaccattgaaagtctcttccaacaggatacagtgagacaatcttctgtcagcatcttgagtaaaagtaaaaagaaagcaatgctagcatccctagatgaactttccgagcggatgccgtcccttctaaacattgaccatccatgtgcccagaggcacattgctgatgctcgccagatgattgaagtatgtgttagcacaaatacatttatacatgtgctattttttttttaatttcacataatccttcttgggaaa

SEQ ID NO: 187261 - DNA, 3835 bp, Cannabis indica
catagacaaaaaagaataatactaactcttttttctacatttcttgggatttacagtgcctaattgtttgtatagcattagcagggtgacacttcttcatcattttctagatgttatagaacagccctttatgatcagtatctctgtcttaatttctttttaaaatggctttccttggttgatcaattagtgtaagtacatttgtacttttatgtttagtcatctctcatggcatatatttgtgcccattcttttcataaccccatcatcatactgactctatgttcaagtcttggtttttaaggcatatgttgatttagttactcccattggtgattaatctatgtgtgctctaacaatagcactattcattgtcctattattttctttattatctgtgtcaaattgtttagatagagaaccgagagctatttgaggctagctaaagtagttgggtgtgtgagtatgattcaagttcaaatcttcttttcttgtcttgtgttcacctcaaatgatggttaaaagctaagccaatagatatgggaatagttttattctttttgatgctaataattgaggagttacttatagtttcaattgtttcattcagctgttggagtggaaaagtatggtatagccaatcttccaggagttataagtcttgtagccggtctgctgatgtgggttacctcacttcctccagtgagaaagttgaatttcgaactgttcttctacactcatcaactatatgttgtctttgtcatcttcttagctttacatgttggagattttgttttctttatctctgctggagggatataccttttcatgcttgatcggtttttgaggttctgccaatcacgaaaaatcgtggaaataatttctgccaagtgtcttccctgtgggactgttgaattggtcatttcaaaaccagcaagtaaataccctttaacatgaacctagtgttttgttctcacattatgttagcatttacaaattcttacgggtttatttatttgatgttagatttgcgctacaatgccctcagttttgtatttcttcaactacgggagttatcatggctgcagtggcatccttttagtgtttcatctagtcctatggatggaaaatatcatatggctgttctgataaaggttcttggtgagtggacagcaaagcttagaggaaatatattgaatgactctgcttctgatgctgtgccagaagaagagctacctttaaagcctaacaccaagctcacagcatctgttgaggggccatatgggcatgagtgtccataccacttgatgtaagtatatactttttggatcatatttatgtatttattattttcataagtcatagtggtctataatctctgtactggtttgtctgcatcttcagtgttcataattttgagaagaatgtttgcatttaaaatagaattgcactagggagcttgtctaatctttctcttttgaaattaaagcgaacagaattatacagacagatttattagataccagcataaaacgaaatgttgatatatctatctcttgtccaattataggtatgaaaacctagttttagtagctggtggcattgggatttccccattccttgccatcttgagcgacatcctccaccgtattagagaagggaaaccttgtcttccacgaaatgtcatgataatttgggctgtgaaaaactcaactgagattcctctgctttctactgttgatatggagtcaatatgcccatctttctctgataaagtcaaggttgagactcatatttatgtgactcgagaatcagaacctccattggtacgtttacactagtacttccacacatttctcaatgttcctttatctttatttttctttccttgaaatctctcatccaaatgtttcttctgattttttatctttgtattataggaagagggcaatgttcaaagcagtgtgaccacttctgcttttccagtgtctaaaggtcatgccatgtctggtttggtaggtacaggacacaaggtgtggtctggactataccttgtttcatcaacaatagggcttataatcttgatgtatttgttgcaagtcttttacataagtccttatggaatatctacatggtggtacaaaggacttcttatcatggcttgcatggctctcagtgtcctaatctttggcggttctgtaattggtttatggcatttgtgggaaacaagaattttggagaaggagggataccatgacggtgttattaagtttgatgaagagcaacataatggaaatacaattctgaaagaatcatctattgaaagccctaggaaatcaactcttctcaagtatggcacaagacccgactttgaaggtatgtttttttttaagtacatattttatagttaaatgtaggtcatgtggatagcaactttctaagttttcttattaaacaacgtgattttgtcttcttgtgcagaaatttttgcgtacatttccaagtgctggggccatgttgatgctggtgttattgtatgtggtcctccaacacttcaggcaagtgttgctaaagaaatcagatcacacaacatatttaagagagaaaaagatcatccaatcttccacttcaatagtcatagttttgatctctagtcttccacttcaaagtgtctctttacatattattctataggtaacccaaagtccaactggggacatatccatgtacagatttgtgaatatcaatgtgtaattatatatgtatctatctatctgtatagttatgaaattatcatataagttgtattataaacgttgcacctccatatttaaacaaaagagtgtgaatatgaatatggtactcctttttttgctaatgggacatgttgattataatactcatcacttcagaactatgtcaattgttattaatatgttttgatgaatattattagtctgtaaacattttttatatgcatataactcattagttggtcatgctgtttttttatatgcacataactcattaacagggctacctttctcaccacaatctaagaacatggctttttctagaggggccttttggcatgagtttccatactctataatacgtcacaagagttaaaatctatctaaagatgaataattggtgaaatgaatcttgactctttgtgacttacctcataactttggcattgggtaaggactcttccttgatacattaaataacaggtcatactatgctcttatcatttactctttggaccaccatgagaccagctgcaatacactcaccatgatagggttcagcacatttaatgtggatgaattataaaatctttgtcttacatattttatggactgattgaccctacactagtgtacttttcaggtgtgtgagaaaactagtactagtcgcaagagacagtgggatctcatcaatgttcttagctattttgaaagacattcttcattatatgttgtataatatatggcagtgaaaacatctgatgagctctctcttctttcaaactaatatgtggagtggtagcaaagtatactcctaattctgaaacatgtcacatgctactctaatcaagtcagtggtgggcccatctcattattcctttaatggttgagaacatgaaacaagatatgtgctggaagttcaacttattgtatcatcctctttgattttttttttcagacatttggttatatcatgtatggttgggacttggaagtatcatattttggggtcttcttaattcttataactaatttgtggcacgtttgggaaaggagaaatctaacccagaagtaacgaggaa

SEQ ID NO: 187262 - DNA, 4600 bp, Cannabis indica
aggtaaacctcgtcattctaatacttttgaggttttgcattctcaacagggaggtgatcaaaatgagaatgttactgttttatcttctcatggataacagcaatattctaagttggaatgtgagaggcctcaatagtaataaaaagcaagaggttgtggttgatttgtgtagaataaggaaaattggtataggagctttacttgagactaaaatgaggagtaataaagtgattgaatctacgtcttctaacttcattgtctggaatcactttactagtccagttattgaaagtcgaattttatttgtttggaggaataaattcgttaaagtttttgtcttggatgaatctaattagtttgttcattgcttggtaaggatgatttgtcataataaggagttttgtgccacatttgtttatggctcaaactctttagaagaaagaaatgatctttggaacggtttggctcggctccaattcactgtcaaaccttgggttatcatgggagatttcaatgcagtttttgagtttggtgatagatgtgggggtaatcgggtcactaacacagaacttgaggatgcttcaaacttgacaactttaaggatggctgattctttacacaaaacaggatcgtttttcacttggtcgaaccaccaagatgctaaagacaaaatttactcaagaattgaccatgtctttagaaatgaagagtggttagatttatttcctagctcctcagctaatagagttgggaaactgtttctgatcaatgttcttgtgtggtttcctcttccgtggtccatggaattggtgtcaaaccattcagatttttcaatttttggacagagcataaagatttcaagcagttggtaatggagagttggagaaaaccagttagtggttcaggtcttaaagcttttcatcttaaatgtttgaggccgaaacatcttttaaggaagtttaataagaagaccagatgtggaaattaattttgaaaaggccaaaaaggagtaccaagtagctaagatggcggctcaagctaaaccagaggacttggctctcttagaggaagaaaagaaggctgctataaatcatagtgaaaaagagaagttgttgcacaacttcttaattcaaaggagcaaagccaattggctaagaaaaaggtgatgacaataatgccttcttttatgcttgtattaagaaaaggagagaagaaaatagaataactagtttcctaaatgatgatggacagcttgttaaagattatgcagaagtggttaagcattttgtgagccattttaagagctttaagggaagcgacaactaaacttctgcttgcatggactttcaagatttggaaggtaactctttaactctagatctttaactcaagcttctgaaaccatttactaggagaaagaagatcaagaaagctctgcttagcatccctagcactaaaagtccgggtccagatggttttggttccaaattcaataaaacaatgtggcctgaaccagaggaaaagctctgtttggctatcctcagcttctttaaatctggagacatctctaaagatttcaatgagacaaccattactttgatccccaagatagaaaattcgtccaaagttattgactatcggtcgattgcatgtggtaccacagtttataaatgcatttcaaggctgatttgtatgcgtcttgctgagattctccctttcttggtaaaccaaaatcaaggagcctttgttcaaaatagaacaattcttatctttcaagacttgataaagaactatggaagtattatgttgcatctcggtgtgtcatcaaaattgatctgagcaaggcttatgacacggtgaattgagattttttagaagcttggctgaaccatctttgcttcccatctcggtttgtgaagtggataatgctatgtattagaggtaccacttacaacttgatgttaaatggtagattgcaagacagtttcgaaggaaaaaaaagtcttcggcaagaggacccgatgtcttcgctattgtttgtttggttatggagttcctaactagaagattattacaagaagctcaagtcggtacgtttcggtatcaccctctttgcaaaagcctcaatttaatcaatcttagctttacgaatgatttgattttgtttagcaaagttactttggcagcaggaaggcatctcaagatttccttggaggatttttgtaagttcacaaggctcattgtcaatctctctcaattccaaattttttttggaggagttgaggccggggaaagagaaaattgcccaagagattgggttagaagagggctattttcctcttaagtacttgggagtcccaatgagaccaacaaaatggcgtatggaagattgtggggtaattttagccaaaatcaagaaaagactttatacatgggctacaagacacctatcttatgctggtaggatgcaattgatccaaactatcttgttgggattaagaaattattggatgaatatattcatccttccacatagtattgtcaaggaaattgagaagcatcacagattctttttatggggccaaagcggaaacaaaagcaaagttcatagagcttagtgggataaaaattgtaatcctaagtatggtggccttggttttaaggatggtaccaaatggaattgagctattctagctaaatttatttggtccataatggaaaaacataatgtcttgtgggttaaatgggttaatacgatttatctgaagggagtagacctgtacttacaatctgtctcaagataccagttggtactggaggaaattatgtaatttgagacaggttttcgatgcaaaacaggtgcagaaagcaggatcttcaggtaaattcaaagcttaacagctttacaacagcctgttgaggtgtgatctggttctgaattcaagagctgtttggtgctgattaagtctgccccagcacagatttattttttggcaagctgtcaacaggcagctgctcacgaggaatcttctctcccgtctctgcattactgccgttaacagtgagtgcccggtgtctggtttaagccctgaaagtcacagtcaccttttctttgaatgctcgttcttggttcttgttgtgagtgaagtgtttagctggcttggtttcaaagctttgccattacagtttgcaaattggctgaatgtgatctcgatcaagacagggagaatcaaggatgatattacttatgctactcttgctgcatcaatctattgtctttggttaaacagaaacaattgttttcataagggatattcttatacaattttacatgtaactaatgaaattcaaaaagttataaagtgtcatttgtatagtctgtaaactcaacacttgtaattatagaatgcttaataggctgttggactgatctggtgtccgggtttgtagctgtttgagccgtttagcttctggttgtttcttttgcttgtggctttttgcccgtttgattaatgaaaatgctatttccaaatcaaaaatcatttttctgtggtattaatttactcgtgtctttttaacaactattggcaggcacaccatttcggctgctcgagcatgctttcttgacaaagatattggatctttatcgccgggtaaacttgcagatttcgttgttctttcaactgactcgtgggatgagtttgcttcagtaggatctgcatcggttgaggcaacttatgttgctggaatacaggtctatccctcatagacatttttatcttcaaggtgaagtatgctgctggtacagagaagagggaggtatatatgtatgtactgtagttattataagtaaatatatgtgcacacacaatttacattaatgcattacacacaaagtgattttaatatagctggactatcttaaataaatatgattagttgaaaaaacttcacacatattgtttaatatttccatataaattgtgtgtacatatcattgctcatttcttatatatataccaaacatgacgttaatttttctttgttgctatatgttattagtcctactataattttgtcttagtaaatcaagatattttgttaaattgcaggagaagaaggtgaagttgatgatcatcaatgttgtgctatatatatatattagtggaaaagcaatttacttgctctttgtaacttttattagtatatcaaaatattttggaaagtacacaattccctctttatgcttttgttttgtaattgtaatcatatcatactcttaaaaactatcgagtgaccatatatgctttaatcagtgaaaagtttatcatattgagagctatctggtgctagttccattatgctgttaaaaaatattgcttgattagattgaaatggcgtttctgagttcagaactaaggaactgaggtcattcgtttctgagtaagaaaatgaagctaatatggtaatttcttagttcttctcttctcttcagtctagctttcaggaacaaccttctttttctaaatgctaatatgggtcactttttattggctgatgctctttgggagagaatggtctgtctgttgaaaacctgtaa

SEQ ID NO: 187263 - DNA, 2136 bp, Cannabis indica
tactattcctaatgcattgaatagttccctcctcctctacccctcctccccctactctccccaaccaaaccccatttttcaactcacatgttctcacttgacttttaagcaacaaaaactataatgcccatgttggtaataggaaatgctcattcaccacgacactcactaggctaatttcattaaagagttctctttttatagttgttgactttaaactctttttttttttttaatggaaaggaattcctctagttatttaaaaagaaagttcaacttttaaactaaagattgaaactttgtatgaaaatgcttagatagaatcgtagaaatacaacaaaactaaccaatcaagagtggggcagccggcagaagaacaagaaacatcttaagattacggcagaggatccacactccccaactgccaacgaccccatcttctttaccccacaccacacttaaatgtgtcagccacgttttaacttttttagcaaaactcttaactgttaaacctttattttaaatcaataaataaaaattaacccaattaatgtgatccctcacaaatacgtctctctactctttcacaatcccaactttaaactattgcttaacattggttatggctatggctatggcttcctccacttttctatgtgtgtctcttttggtctttcttcaccttcaaccggcagctccttcttccgttggggaccttttatctcctattctcgcgcctgtcttcggtttgattcttcttctattatatgttttctcaaatggggttttatccattttccttcaattttttttattggtttcatatgttttctgatgtggggtttttctattttccgattttatttgagtgattttttgatatggtagcatcaaaactttgtaatgttgaaaaggggtgtttatgtgttagaatagatgatatctgcaaaccagtgcaatgtggcaaaggcacttgtaaggcttcaagtgacactactttcttgtttgaatgtgtttgtcaacctgggtggaagcagactacttctaaccaaactgatcacctcaaatttctcccttgtgtcattcccgattgtaagactctctctctctctaaactttttttgatgcttatatttagaaagcaaagcatttttatcttctcattacaaattttttcactatcatagtccactgttcataatatgaacaggttcttttctgttctgttctgtctaatgcttgtttaatcaataaaattataagatcatattgtacttctaattgatttggataaaaaaatcaggggttcttttaacaaaattattccctcaccaattgcatactaaaaaatagactaatggggtcattttttttattattgaaaggaaggaagtagaaaaactctcttgttatgttatatgtaatctaatattatttatgtcttttcattacaaaaccataaatttcatcatatcttttcttgtttcaaattgttataggttccattccatattcacacataatctgatccagattacctaaatatgcattcttgacatcctatcaaagccatatattgggtactattttattgagttctcaaatgattcttcgattttgtaggtaccatggactactcttgcactaaagctccttctgttaaagataaagcaaccaaaccagatgatacagtttttgatcgtaaccactttttcactactaccaaatctttacaccttttttcatggtaaaaactctcttacatttccattttctaaatcttgtttttgcagcatgccgatggagcgaatgtagagctggttcctgcaatgcaacttcagctttcacttacgattgcaaatgtccagccggttattccaatcttttgaacatctctagtttcccctgcttccaatcatgtaagaacacattctcattatactctctaaactgtgtttagttatgttagttatgtttgagtaatagaaaaatgctgcatatcaggtgaacttggaatggactgctcaaacctcgggttattcccaacaaataattcttctccttcgacgccatcagccgctgacaatagcaagaatcaaggtaatgcggaaaaagaaaaaatagaacagcaatgat

SEQ ID NO: 187264 - DNA, 1467 bp, Cannabis indica
taaatccttaatctaatccaattttagcttataattattgtcatggattgtaattaagtctttttactcatgtgtaaactatatatgatagtgatttgcaacattgatgaggaagaaaaaagtcaaccaagaattaattgattgctttgttgatatgtgtaaatcattgacaagctagagatatgattttacacctggaatctgtgttcaatggccaataaaaaaacagggcacatccttggacagttggtcttcttgtgttgatttttcctttctagtggggaaacaaaagtgttgtgtataagtaagtagttggtgtgacttgtgtgatcttttaattaatgctattcatatttgcatctttcacatagtgtgatattcttggtgagaactccctcaattttggtaaaatgcatgtttttattattgggaaaaaataaaaataaaagagtcaatggattaggaatgattccacaactcaaaagaaaacttttaacaaaatttaaatttactttgtacataaaaaggttgagcatgataaaatatagtatttggtttagggggccaaaagaagtaaaggtgtattctagcatagtcattagtagtgttgtttaatttataggtgacgtattttataattagttagcgatattctataaaagctactaaattaaattagaaaatgttgtacattacgaaaatttatcatgaacaatatagcatgattttattaatttatgtttcatttttttggattattttttaatattgccacattactcaatatgctaattcatgacaatttgttaagacatgtagtattgctcaattaaattatgtagtgttcgatactactttattatattttcttattatttaatattttatttatatactgatatttttttcacaatttcaaagccctgagcatacgggggcttgaggggtacgcctcgcctcatctgagggtcggtcatgcaatagtgatatcacaccttaaataatgctaagaaactacatgtgcattttggcatttttcttcttctttgtattgcattgattgtgtcataggttggattggagttgttggctttgactaaggacgtactcaactacttttgataatttgaagttgggaggacaatcctcaaccattttatgttgaacccaacaaagtcaattaaagctttagtaatattatataatttgattttatgaaatggacttggtttgaatttgaagcatcaaatgagattaagctcaatggaagatacaattagttagttgttacaatgtctaattggcctaaaattggtaaccatccaattggctgtgaaattgtcaatgccatcattttctttcttatgatttttgtattgttaatttgttattaaggctttaacaaaattttattgtacatcaatgccagtggttaataacaactacattacattaattttttttttt

SEQ ID NO: 187265 - DNA, 1451 bp, Cannabis indica
aacacatagtcatttattttatatagttgctgcctcactcaaaaaatcatcaaagagattatgttctggtgtggttatttcagctgaccaaacaacatcagaaagtggttgtctaggccttccaacaatgttagggagcaggtgttgaatgtgattgttttagcaacctagcttgtatgctgtttggacaaaccgaaatagttgtgtgtttgaacagaaatgtaagctagctgagattgttagcaatgatgtcaagtctattgtcaagctgagatttttaaactgtaacagtaagagaaatgaatccctgttcaactatattctcaatgtaatggaaagctggtagaagggtgcgactgttgctccctttggctggctgctttcctttgtttgtattgtaatattttgcctgttttgaataaagaactttctttcctgttaaaaaaaaaatatatattatattacatgatcaattaatgcatatgaaaatatattttcaaagttaagatttatgagagattattggtgacaataaaatttcacaaccaaaaaatgcaatggttctaagaaaatagaagattaaagctagtaaagcaatgttcccattcaagctacaattaaagatgaattgttgaagtacatcaagcaagtaaagacactaaaggaaacttgagatactcttgcaacactattctcgaagaaaaatgataatgagattgcaatattttaagaacgaacttctctctattacacaacgagatatgacaatccattaatattttattaaggtaaaacctctttattgcaaaatttctgcattaaattctattgttggtatgtcaaattttaaaattaaaagaattattatttatggataaaaacttgaatataaaaattttattactataataccacgtttgcctaaccaaccttctcacttagaaaatctgttagtcaatctaaaagtgttggctaaataaatatgcagagtgtcattaaagagtgaagtaagactctttaataataatagtaaaggtcgactccaaaccgaaagaactcaaaaaaaaaaaaaataaataaaaaaaaaaagaagacaaaaaggttgtcaatttaagaagaataaattttatggtgaatcctatagttgtggaagaaaggacacattgttaaaaattattggtcctagaaaaagaaaaaaaaaaaagagttgagaataatgttgccacccaaacgtaagacaaataatgattaatggggtgtaaaatcatcttttgctaatttgatggaagaaaagttaactccgataacaacaatcctttggtgattattgactttggttatgatgggaaatgaagagaagttgcataacatgaccaattaattaaaaaagtaagttaatgtggacatttgtactgaaaattgatttactactatttgttgtaattaacagt

SEQ ID NO: 187266 - DNA, 3480 bp, Cannabis indica
ctctcactaatctttagctttaaaataatatagtgtaacaaaaaaaaaaaaacacacctttggctggattttccagaatctcagacaacaatttggaggtatcaacttcacgcaaagccttacagcttatatatgcacatagtctttgacaagatttaaaccagggagctcccagaactaaatcctgaacagcaatatctgatgatgacagaagaataaaacacaatacgaaaacacagttcaaatttcagccaattgaattgaaaaacaatgggtttaccttcatgggatctgaggctgggatccatagctttaagggtcttgcgaacttgggatctgacgacctttttctgcttaaatatggcgtccaactggtcttgaacattgtcgtttttgttggtgctcatggttacagttgagcgtgaagctaaggaaggaaatgggagtggtcgctggggagtggggagtaaagggttgttgatagaaagagaattggcggcaagtttaggcaaaggaaagagcagaggttgggtcatgagaactcgagctgctttcaccaactccctcacatgggctctcctccccatggccatttcggtgagctaagggcagagctatactgtccctcgcttaattttgcgggactaaatccctcgtgggccatcaatcgttggatcatttcttcgtatgatctaatggttattaggcaaatgcaaaaaaaaaaaaaaaaaaactttacaatattataacgccattgtcgtttcttcctcccttctcttcaaaagctcacacccctaaccctctttctttctcatctcgcctgaactcaggaaaaaagaaatggaggaactgacctgagtacagtagaaaaaggatggatactgatagtgtggccaaagcaaaggagtcggtctgcgaagacatcctggccgtacattgggtcgggtcgccgatgatctccatcatcactactcgagtaacggccaccgagtttggactgttatcgggtctgtgttgaattaacactatgaagaatcacaaaaataacaagctgagtagagaacttcagtttggcaaagctttattgattaggaacaatggtagagtacaaagctgagtacagaactttcactctcaacaatggcggtgtctccttacaaaccagctcactcacataagagatagttgtgatcaaacacacttaaaacatgagtttgttgtcatagaagagtagaccactaaggcaccaagcattatataggcatcaaatagagcaaccggttagccggttgacttatgaagtgaacaaccaatctttcaccaagttatgacagggtcgcaaacatgattccaatcggtaaaactagaataatcattacatcaatgaggaaatcattgatgatctgagaaggggaatattcttgatgcatgaaggttcagcagaggcagggtgaggtctcatgtcttaacaccaaagcttaaacgcatgggtgattgtatcactttaagtttggtaatgagctgttaaaatctcgatggagataaggccttggttaggcaatcgataatttgaacagaagaagaattgtacctaacttccagttccttttttaagattttgtcatgaacaaagtgaaggtctattttgatatgtttggaacgtgcatagtaaataggatttgatgctaaagcgctggcactaacattatcacaccaggtgattgaagttgatagaagttgacagcagatgaaattccagttcttcgagtagagattcagcccaagtgatttcagcagccacatgagcaagagccctgtacttagactcagtgttggatcttgaaaccactacttgtttctttgaagaccacgatatcagagtatctccaagatatacacattagcctccaacagacctcttatcatcagtacaacatccccaatcagcatcagaataacctgtgatggtaagcttgtcactgtagcatatgtgtagactatggttgagtgtgccttttaaatatctcaggattcgtttggctactccccaatagactgttgtgggagcctttaagaactggctaagcttgttgacaacaaaactaatgtctggtcttatgtggcataggtattggagtgcttcaataaggctcctataagtagtggggttgtgaatagcttcaccatcagtttaggaaatagatatgcctattaccataggagtgggacaaggcttgagatttaccatgtcatgcttgttcaagagttcttcaacataatttctttgagtgagatatagtcccgtgtcatctcgagtcagggctcccaaatctttgagtgagaacagtttgttgagttgattgataaactcctttagctttactccattgtttccagttactatgatgtcatctacatagatgagtaccagtatgatcaatttgccatctttgtataagaatagagaggtgtctgctttagagttcttgaatttctagccaagtagagtgcccttaagcctgtgaaaccaagctcttggggcttgttttagtccatataaagatttatgtaatttgcacacatgatttagtttggcaaggtcctcaaaaccctctagttggactatgtaaacatcttcttctagattgtcatttaagaaagtattatttatgtccaattgttgaatgctccagttcctggtcataacaatggttaaaacaattctaactgttgatgccttgataacaggactaaatgtttccccaaaatccaaaccatgcctttgaaatctctaatggtagccatcaacattcaatttttctttgaaaatccacttgcagcccacaagattgtactcatctaaataggggaccaaggtccaggtcttgttggcgttgagagctaagatttcatcacccatggccttgttccaccccttaatcttgagggcttcaacaactgaggcaggaattctgaaatgaaatgtgtcactaagatggttgaggaaaacttttggcttaaacacaccaaccttagctcgagtaatcattaggtgtgacactgattgtgctggatgtggtgacacaccagaatttgcatgtgtgggagaagggataggagttggagatgtaatggaagttgaagcatttggtgaatgtaaaataatatcatcagcggttttagtattgagatgtggagatggaagggaatacctgtctggactgttgttgtgaggagataaggttggactgtgagatgttgttgcaggggatgttggagaggttgatggaacagtcatagagtaattgagctaagatgtgtgaggagaaaatggagattgggaagctgagaccacgcttcatgattaacaatgagatactgttcaagggcatgtgtgttgagaaaaccagatttaaaaggaaattccttttcattaaagtcaacatatcttgagatatagaccctacctgtggtactaag

SEQ ID NO: 187267 - DNA, 2022 bp, Cannabis indica
atttttttgtattttttttgtgttttttttttttgaaattatcccttgaatatatgtgtgcatacttatataatggaaaatgctacatcatgaaaatttatctgaatgacatggtatgccataatttttttatatttttttatataaatttatgtttcacttattttgattattttttatcaaatatattgccaataccacattattgatggaaaaacatgacaatttgttatgtagcatatataagagtaatgatattgttcttgtactaaaaaaattacacttattatactatatacactacacatacagacattttgaaaaattatgtatcccgttttagataattatattttattgaaaaaactgacagaatatatattactttcctttagtcgtcttaatgaattcatttgtagtacaaactgatttagcatctaagaagatttgatgtaaaaaactacaaatagattatattcactaaaattcagctactgtataaatttggcaaaatgttttttaatgtcgtaaaaaataaattaaataaaaaaaggttgtttattaaaaaaattctcctttggctgcattcatttgagttattaaactagccaaatttggttactgtgagtaactaccttaatcaccaagtattttaccgttttgtttgataaataccgagtttaataatttctaacgtaccatatctaaagaaattgtttagaaaaataccaataaccttcattcatcatggatagaaagctaaaagctccttatatacacagttaatataaaacgacagccaagttacagggataaatattcgtcaaatctcaaacaatatcctatccattcatgtgcccaagtatccgtttccatcttaaaatcaatatcgacgtattatatgtgggacagtacccgtagtatagagctctcaaccacaagcgtaagcaaaaagtcttgctaaaaacacacgacgagcaattattgaagaatagcttttgtaatgccatccatgcattgaggaacattcatcaacaaagtccatacaccaaaacaaaaatcccaaggatcaattttaaccactataacctcatctaccttttctagcctcttcatatcaacacaaagttctagtgagtaccaacttcacttttttcatcatttcaaccaaacccaagttttttatttgtataaataaaaatttcaactgagtactaaacaaattcaaattccgttgaagaaaaaaaatggccactcgaggtttcattgttatgttcttttttattgtgtttaactttgtgctgttcagttgtgttgcctctaataaggtcccatgccctccaaaggggactccttcccctgcagacgtccctatgaccaaaggcaaatgccccaaagataccctcaaatttggggtttgcggtagctggctggggctggttactgaggtcattgggactaaacccagtgaggaatgttgtactgtgattaagggtctggcagatcttgaagctgcattgtgtctttgcactgcaattaaggccaacgttctgggacttgtcaaagtcaaggtgcctattgctatcagtctactagtcaactcatgcggaaagaaagttccagaaggatttgtttgtgcttagctttcaaactttgaatgtgcttgtttctttattctactaaaatgtactcccatcattattatcttttttttttctcgatgaaataaagcaagttattagtcttcatttaaatgcttttatgttcagttcatttgttagtgatgtctgcattgtatttctcctgcttataattaaattagactattgaacacattattttcattataaaacattatgtagcacaacaaaaacaacattcttgaaataaagacattatgttacataacctgtaactttatttatttattttttccattgcaaacactagactgatgataaaagacaataatgtatggaagcaatacaagcatttcaatcaaatcaacaaaagggtgtaacc

SEQ ID NO: 187268 - DNA, 4028 bp, Cannabis indica
agatcataaatattatccaccagactaatcggagatgctttagaatccaattaatacagagaaaagacattccacttatgaaacaaaaactgtgtgcacaggttattcatacgagtctttataagcatatgggactttaatgtggcgatcgggtgatagtttccatacctgtctcactgacatgggaattttattgtggcgactgggagccaacgctggtctcatatcaattggtagctgagcctgctcaaagcaaccacaaaataaaatgtgattactgacaaacctatcagcataacaaagcagttttgaaaaataacttactacatactagcaaaggataacttcctttaaacacggcaaggtcttcctggttttcatttgctgccccctcacgtgcaccacttgtttttcgggcaagaacctccaaggcccattttcttttatcctttttcatatcatcagatttagcagcaacttccttagaggcattagatttggaactgcctaatgaagaaactgatgatccttctgagtgtcgggttggatgagctttactagaagcagcattactcttttggctcggaaggttgttctttttaacaacctttgacagacccttgtcagtctctgcagaacttgaagcactaatagacacctttggaaatttccccgctgtgggttgtttatccgaatcaccagatgttttaagagcagatagtggcttgatatcatccttccgtgggaatacagatgtatcagctaaatatagccgtgaaagaattggattgctcccctgtctttcagatgtttgttctgtttcagtgttctctggatccttccttagaaggtcgagaactgactttaaagtttgaatcttttcaggctttgaagtagtcaggcatcgatgcttccagaattcaacttcacaatcacggtcccatgcacgttttcgccttccattattagtagcatatattttctttgttagattctcacgcaccttactcttctgcaaaattgactttcttcctttcacagccaaatgcgacaaagtcttaaccgattcatctttaggtaccgaaacagcagccctaaaggcagcaagaagctttggatcgaaaagattttcatcaatatctttagcagatttgctacgaactgcttctcttatttcttttcttagattttgaactgccgcagatgactcattgtcctcagcagttctcttcatgatcttctttactctcaaaccagccatgttttctggttcttttgaagatttatcaccagtatttggtaatcgagtcctcttggaagttttacggtttttcccttgaacaatactcattatgtcagcaggggcattacccttttcaggacgaacacccttataatcagtaggattttcaatcatcatgccatttttggagtcatctaaggcatatgacctggtctggtcctcaggcgaaatcggttgaatcccctcctcagtttttattttctttgaagaagtttctatctcactctttttctcaccatccctatcaacattcataacatggccacactaacatttagatataacacccaaaatgatataatcagagttaagagtttccactctgcgtgtactgagaaatgtgaaggccaatgattttcaaatcaaaagagttaaataggctgatgcaagaccttaaagacaagctttagactttggagacaacaacactaccctggtaagtgtattttaccgaaaaataaagaaattttagtaatataggatagtagagtctacatctgttaatgaaagcaagaactgaaaaagaaacactgccccgattttctaaatcaaataacagtgaagaagaaaaactacagcctaaggtctgaaataaataggcagagagccaagataaagtgggccaataatatcttggtgataagtgataaccacccaagatattttcttctttcagtcaacatttttctcaatttgatctacaaactgctaggtagtattacaagggtatgagaaaatgttgctatcactaatgatgctgaaagctatgaaagtattaggattaatcaaaatatttgatagacagaaccaacctgcagttcgaatgctttctctttacagcagtcgttccaggcacattcactttggcattggctatagtcttatcagctgaaaaatatatcaccaatgaggcagtgtgcaaagaagtccataatccatatacatacttttagtataaccaaatttgaccaaattcaaaactcattgtccccaataaaaaggtattttcaatgtatatacacatgactctacctttacatatatgctcctttgaatcgttgttctcttttacatcttcattcatttgatctttagttccattattgtccatttcatcaactacacgcacataaacaacaagaatgatttggagagctatcaaacttcaacggaagagacagaaagaaaaataaatatgtgcagaactaccagacaagaatgatcccacagaaagaccgagatgaacacccataacagaactattatcagagggaatgttactgatgtgtgactcctcagctaactccactgaagaacttttattgcctccaaaaccactatgctcatttagggatttatcagcatttaaggatatatcacatgataaggacagttcaagttcccgagctttcaaagtcggatgagttgttgatatttccatggatgatgctgtcaacttctgactatcatcttcagaagtcaagataaaagtttgagtaaccagttcctcatcaacttcaacttttggctgaataatctcccttggttcttcagctaatttaccatctccaaccatagagacaactatagctgtttccccagcatcagcaacagagatagaaaccttcttagagtaagtgtccccggccgcacactctgtatttgcattttcagaactacaaggatagttcgaaccatgttctaaattgtcatctggctttggtgaaacctcgtcaacaatacacctagaagaaaaatgcatacaataataattaaatgttacaaatataagaccaatatggtagttttatcactcaattacatggccaagccattagatgcctccccgtcatagtttagagtagtattctaatagctaattctgcagcttactgaagtaaacatccctcaaacccatagtgtaccttgggcataaccaagtattctcagaagtactttcaggatcaaatcccacacagaaagcatgatacctgtatgaaaattcaagtcaaaaccataagaagttattaggatttcttaattcattttctctcattaaatgatttgatcttaccataaatcacatgaatcacaagcaattgatgtatcaagattggaatctccctcggcagtgactgatccacttcgaattttgcaaccctctccatccaagcagataactgcctaaaagtgatttaagtaaataagtacttgatgttagatgatatcaccttaaagaggaaatcagattacagcctagcaaaaataagcttcaccaagtttcaaaatcaaattgacaatcatgtttaaatatcattagtaaacagaataaaaattcaactactaaagtaaagagttcattaatatctaaaacctaggaataaagattcagcatataaaaaaaagacttaaaaaaattaagaagataattacattttcatcaatataataggacggaaaagagagagtgttattcttcccttcgatggaccaatcatcatctctgcataaatcactacataaaaattagtctatgataaaaaagtaagaacctatggtcggtcagttataacattattacagtttatgaacaaaaacataggaaataaaatccaaaaacgttggactatgaaaaatcacaattgaaactgccagagaaaatcataaaagtagtagataacaatgtaaaaacttgacaatacaatgccagcatcatgcgaacgag

SEQ ID NO: 187269 - DNA, 6459 bp, Cannabis indica
ttgttttaaaaaaataaaaataagaatcaattcttatgtatttttttgaagtgaaaaaatagaaagtgtaatctaattaccaaaactagaaaagttactgaaaagaagaagcaaacacagaactaaaattaaataaatatgaagattatataagataaaaccaaattaacaacatacatacaaataaaaaaaaaatactcaaagattaacatatcacatatgtagttgcacttgcttgcccattattaaaaatgaagcacaaaacaaatatcaaatatcatatattttttcttcttcccataatacccttgaccaaaagatttctttacacattcccccttgccccctgccacactcttcttcttcacttcattcagctcaaatctcctctgcgtcgtcttcttcatactcatcatcattctccgccactgcatcttgatactgttgatactcagagaccaagtcattcatgttactctcagcctcagtgaactccatctcatccataccttcacctgtgtaccaatggagaaaagcctttcttctaaacataacggtaaactgctcagaaaccctcctgaacatttcttgaatggaggtggagttgcccatgaaagtcgaagacatggataacccagttgggggaatgtcacaaacactcgatttgacattgtttgggatccattccacgaagtaagaagagtttttgttctgaacattgatcatttgttcgtctacttctttggtgctcatcttgcccctgaacatggcggaagccgtcaggtaacgtccatggcgggggtcagcagcacacatcatgttcttggcgtcccacatttgttgggtcagctctggaatggtcaaggatcggtactgctgggacccgcgtgaggttaagggggcaaaaccaaccatgaagaagtggagacgtgggaatgggattaggttcacggcgagctttcggaggtcggagttgagttgccccgggaaccggaggcaacaggtgactccactcatggttgtggagatcaaatggttcagatcaccaactgcagtttcaggataatcaatggcttattggttagttaagagaagagtcagttcgttcaaatcttagtttctttgattatatacatatactcaaaatagtctcaaaactttgtttttggtgttctaacaagttaacatgttatgatcttattttaacacaagttttagatgataacatggatatgaagctgaaatgttacttcagataagtattggaattataagtcttgaacaactgaataggttatgatcttgtcaagtgcaaaaggtgtgattttacagtgtacgagattcattcatttggaagtaaactaaagagaagagttgacttacagcttggatttgtgagcttgagagttcggaagcagatatcatagagagcctcattgtcaaggaccatgcactcatcggcattttcgaccagttgatgaacagaaagtgtggcgttgtaaggctcaaccacagtgtcagagaccttaggagaagggaacacagagaaggtcatcatcattctatcagggtattcttcccttatctttgatatcagtaaggtccccattccagaacctgtaccacctcccagagaatggcaaatctggaaacctgtgttgtacaaggtacataacattcactacttagaatattctcgtattcaaatataagatgacatataaaaagcggttctgagttagaaactaatcaactataataaattttctgttcattacattgtatagcagatggtcaacctgaagggtcagctagaagtttaagttagtgtcattgtctttttgatctaatattttgattcatagtgtctagagttcgcttagtactagcaccattggattgaattaggaagaatttgaaacacttgtatacctaccttgtaaacagtcacagttctctgcctctttgcgcacaacatcaagaacagaatcgatcaattcagctccttcagtgtaatgccctttagcccaattgttaccagctccattctggccaaacacaaagttgtcaggcctgaagatttttccataaggacctgtcctcaaactgtccatggttcctggctcaaggtccataaggacagctctggggacgtatcttccaccactagcttcattgtagtaaacgttgactctctcgagctgacaaggggtgtccccaacatagtttccagaggtatcaataccatgttcatcacacacaacctcccaaaacttgcctccaatttggtttccacattgcccagcttggatgtggaggatttctctcatgttttactttttcagtgtaatggaaaatggtaaaagagtttagagaagagaaagtggggaagagcagagcaaggaagaatggaactggtatggccttttgtaggtgttagaactgagaagggtggatttcaagatatgagagtgtgatatttttctgtctctctccaaacaaataataacaataataataataaagtttcaattaataatgtcatgtgggtttgtttgtattaaaggtatgtcaaactccaacaagagtagtgagctggatatgggaatgtgacaacaagatgcaagcttttgtttctgcccacactaacttaaattaccaacaaatccttgtgtttaatcccccatttatcatttttagatccctaaaatgtccatttctttatttggtaatcttgctttgtctaacatgattgctttcaaatccatctgaaaaccaatggattgcttttacttgatctattttgactggtaacagtatggttaattttttaattatcatactaattgtcaactaattttaagattatcacaaatatctcaaacaaaatagctgttgaattgatttcatttatttgtttagctatttcatatcttctcaataattgattagaccagttaccctaaatgtatgaagtagatgccacaactaaaatagtttagcttctctttcagagtcggcaaaagggtaaaattatgatacacttaaatttatggcaatctataatcaaccttaatatgatggcaaactattaatcaaccttaaacttacggcaaactataatataatccttaatcttaaacagatctagcaaattaatatataaacatcagcttaagtaatgtattaattgttatcattttgtgataatgtcaaaaatggtacttgaccgtttaatactattagcatttagatcagtggaaaaaagtatgttcaataagataagagtcataagactaccctaaaagtaaaaaaaaaaaaaggacagaaacaaaatacatatgagtctattgattaaataaaagactaaagccaatttcgcatctgctaacatttaataaatactttaaaacttggcattttgatagtgaagttcacaaaaagatagggtagttacaccacatgaatcattgtgcaattgtttaagagagatccagatcaagttttgtataattgggtatataaagaatagaagttttatgccttattattgtgccaataaaattaaaaattaaaacctagaaggaagtatggaggtgagaggtagggagttataattattggaggcatgagatatccctgtcagcttgtgttttcttcctgtacaccttcatttctacaacctcacgagggcaattcggaatccaatgcctcaaaaatgaacttaaactgtacattcagaagctaaacatgaaaatgacattcgtatatttgcacatgcctatgcgcttctgattgtcaaattatttcaaattcaaccaatcaacaagaaaaaaatctatcaaaatctaataaaactgttgaaaaagattcacattttgttggattattgtagaccttcctatggctatacatatgaactttgttgacttagccaaaaacattcctatgttactaacagctgctaaaaaaataattctgaacgagttacataaacatagtaaaactgataataaaataaaaggttacagagagagaaagagaggtttgatgtgacaaatttgttgttaaagcataattatcttatcaatgcaaaggggtatattagtcagttggattagatgaactgtccacatctcaattatcaccacataatgttggtatgttccattcacagccaccccacaactgactacaattccatcaaaatcattcattcaagaacatacccacttctcctaaaatcatctccaactccaattacctcttgtcattatatgataatactaatttttacccctgaattgaattggttgattacatacatccaaacaactggtcatgcaaacataaggaaactatgttagatgaaaaacaacccaagttcataaccattcacttgaccactgaatgagtataaacacaggcaaatagtaaagcccacatgagaatgggcatcatatgtattcatgtttcgaggatattatatgcctctatatctctatcaacatctcatgatagcaatagtgttgcaaggttagatacaaaagcacatggcacatgttgaaagtcacatgaccagagcatggtctagagagaaaccatgagtaaaggtttgacttaaagcaaagaattttaatgagtaactcttggaaagagaaaataaaacatttattattgtatgaatattgcaccacaaggtgttatattcgaactggtacttttttgttcagcaagaaaacttacatgatcagttgtccactacagtaagttcggactaaaaatgtcaagaggtttgattattcagataatcacttgttgttacacaacctgaaccatgtttgttctggctgacaactacaataggtgccctgaggggtgaagattttacaacacaactttattcatccgagacaatgtgtcagcaaccacaaaaggaaaacagcttaaatctagatcaatgaggcctacacgaagaagattctaaagtccacaagaatccgattcacctcagtactcagtagagtagctcctcataaacgggatcaatggactgtccccatttcccatgatacagctccagtagcttctcggcaggtgttacacctgaaaattaaatgccacaaacccaaaaatcagtgttgtattagttaagtaagctcccagtctaatctacaatatttgaggatcaagaagccataacaattaatgatcaaatctctgatcatttgtgctacccctattggagagtctatgtacaagtactaatcttttaagcttagcttttttaaacccaaggggaaaaataacctaagctttgcgcctttcttattccttgtccattaaaaaaacaaattctgggaatataactacaaaaactagttgtttacatctaaaacttagttacctgttctaaccacctcagctacctcattcaagaaccctacctccttataccctctcctctccaagccatcctgtaacagagtatttagccaatggattcattaaaggaaaaatattaaatagatatattataaagatcaaaatggactcagcagcatagctcaccttcgccaactttaaaacatcttctgcaacatgacggagcaatccatcccgaaatggtgtttttagaccagtctttgggacctactcaaatgaaatagaaaatttataagaactaatttcaataaagttaatctagacaagtaaaacactcaaatttttgcagttatttttccgcaagacacttggactttgtaatttgtaaaaataattttaccttatttctcaacatttgtctttcttccggggtccaatcagctaccatgtccaatatgttttgtagtgaaacctcatcatacaacaaacctacctgacaattagaagaaagtgcaatgaatttcaaatatatttgcacaagctacatgcagaaaggtgccatcagatcatcagaatccaagtgcaatacttacacagagcagagagcatatattcatgacgcaaggtttattaattctgctttgtacgagcataggaaacaataaattttgtagtgaagtgctattctagtagcttgatatgtgagaggagcaattaacaaagtaatgatgcataatatctaaagacaactacccataatgcaggcagagcacacaatctcctccaaggtcctccatcagctcccctcatctccaagtatctcttcagcctgacctgaacagaaaatatgaaatttggaaaaatcaataagcaggagagcataaatattcagaaaattaaccatataggctacaaacctcaggaaatattgttgtcaaatgattctcccagtcattaagtgttggcagttctccaggaaggcatggaagctttcctgccagaaagtcctgacataaataactaataccatgtcagccttgtatgatgtccgctacaaaatctatgtattttttt

SEQ ID NO: 187270 - DNA, 2482 bp, Cannabis indica
tctcatgagttgagtacacactgaaatcaaaaatttattttcattcgaattaaacctaatagctcactatattcttagagtgttgaggctgagttggaaaaccctggtgtgagatctttaacaagtctcactagattggatgattgtttcattaatataaaaagatagcaagaaaatcctgatagtcaacaagaggtaaaaatctctgaaccaatagttagtgttgtactatgtataattgtgtttagatggattcaccaaattttttaataaataagatattattcacttttaatatgactctgatatgaatcataaaaaccaacatatataactttttgaacctcttaaaaaagctaggatacttcacaggtatccttgccctacaacccatgaacataatggattagttgagagaaaatatagccaaattttagaacatggcttaagtttacttactaaagtatctatgcctttgaaatattaggatgaaacctgtaggtttgctatctatcttcacaacaggttacctactaacaactttctcccattaaacttctcttcaatattaagcctaattatactagcctcaaggtttttggctatcattgttaccctaatattaggccatataacaagcactaatttgagtttaaatcctcaccttgcacattctttagttatagtcttaatcataagggttataaatgtcttgatgcaaatggaagactttagatttctagagatgtaatttttgatgaaatttaattttcgtatactggtgtcaaacacattagctaagattcctctagctccacttagatataatatggagcttctctcccttgccatagcataaaacaggtcaatacaatagttggatgttaacaatgcatttctaaatggtgacttaaaagaagatgtgtttataaaacaacctctagggtttgaatttcctcatgctcctcatctattttgcaagttaaaaaaggctctctatggactcaagcgagcccgtagagactggtttgagaagcttcatcactgcctagagtcatttggatttgtatcctccaaatatgatcatagcttgttcatccaacacacacctaagtctgttacagatattggtatatgtggatgatataatcatcacatggagtgattctgaactcatctcatctctgattaatgccttgaactcaaatttgtctctaaaacatcttggttagctacactatttctttgggataaaggttcaacacactatagcaaggttacatatgtctcaaggaaaatatatcagagacttattgtgtagggttacatatgtctcaaatgcagggtgccaaacctactccaactctcataaaaagtggtgtattttttttttgcttacaaaggagatcctattgaaaatccacaagtttacagatcaatagtgggagctcttcaataccaaacaattactaggcctaaaatttcatttagtgttaacaaagtatgccaatttatggcaaatcctctgaacacacattggaatgttgtcaaaagaatactaaggtatctaagatgtattgtttcacatggattgttatttaaacctattgctaattatgaaattacatctttctgtgatgcagattggctagtgatcctgatgacaggcattccacttcagggttttcaatattttttggctctaatctagttgcttggcaatgcaaaaagcaacacacattgtcttggtctagtactgaagctgagtatcacagcttagctaaatttgtctctgaaattacatggctgcactttctattttctagaacttcatgtgtgtttgcctcgacccttaattatttggtgtgacaatctcagcattgtcttgtaaactgctaatcccatgctacatgcccaaaataaacatatcgagctcgacttatattttgttcttgaaaagctatctcaacagcttatttgtgttcactaagtccatgttgcagaccaagtcgcttatggtctttctaaggccatttcctccatgttgcagaccaagtcgcttatggtcttactaaggccatttcctcttcacactttgatatgtttagagtcaaatttggtatttgtgagtgtaccaattctaagttaatgggggattgtaatggaagttattagatattttcgttgattggtttagtttgttgttaaaagtttgttaattcactcttgtacaactacaacttttggttatagagttgttaacttttgaccattatatatgagcttgtattcttacattcaataacaataagacaattctttctgtcttctctttcagtatctttctctctacctttcttgctctctatgtacaacaatggcgagacatacaatgctaacactaagagtccacatccccttcatcgatgacagtgaaccaacctcctccaatgcgcaggtactaactctctctctctctctc

SEQ ID NO: 187271 - DNA, 1238 bp, Cannabis indica
taattttgatcaagatattagtgtgattgttatgtatttagatttatttaataaaggtgtggaaaggaaagtgtataaaatgttttgaactttgggtgaggaacgaaaaccaaagcaattgtaagtaagacacagttttaccagaatcttcaaattaaccaggatcaaaacggtagctagctttagctatacatgtttcaattcaacaccctcttcactcttcactcttcactataaaaataccacactcaccacctgtctctctccaaacctcatttctctctctctcaggtccctttgaccactggtccaaacaacactctctttctcttcttcttctatttcttttccggcaaacgaagctctcgtagccctctagggactctgtctcactgaggtttatttatagtgtctgtctcgaattgatgaaactataaaacgacattgacacttcttcaacacccaaaaaaaacaaacaaaaaaaaaagctaagattttttttttcttcttaatttagatctctctcctttgtatttctatgcccaggaaaaaaaatttatcatttattgacacttctcactgatcaaatacaacaaacccattctctaatggtgaaaatgaaccaactttactgatcactcagttctctactttaccatttttcccacttaaggggaaaaaagaaaataaaatctgggttttgaccagcataactagtagtaatggcggagaccaatgatcaggcgaagacattgccagaagctgaaaagaagaaggagcaaagccttcccttttaccaacttttctgttttgcagacaagtatgattggcttctcatgacaactggaagtataggagctgttatccatggctcctccatgcctattttcttcctcttgtttggtgaaatggtcaatggttttgggaaaaaccaaatggatttaaagaaaatgactgatgaagtatcaaaggtttggcaatgaatgacacactcactactcacttactatatctttaaattaaagaactaagctttttggattgaacttagagatctcagatctaattcatgtattaattatctatttcttccatttttggcagtactcactatatttcgtctacctaggccttattgtgtgcgtatcatcatatgcaggtatacgagctaatgcaatagtctcttttttttagttataaaataaactcaaaaaaagatcaaatttttcgaactgatt

SEQ ID NO: 187272 - DNA, 4093 bp, Cannabis indica
aaaaaaaaaaaaaagaagctccaattctaatcggataatccttgcccgacccgacccgttatggacatacccgggaagaaccgtgcccgccacaggccatccacatccaccgaacgcttcctcgtcggcgcgttctcccactcgccgtctgataatgctgtaaccagcaccagcgccggcgacggtgacgagctcaacgaggacgatatcttttggaccggtgatttctctgccgaatccaaccacaacaacatctccgcctctccttcctcaacgtctgcttctcgtgttctcaacaataatcgtcttcttcaacccaagggcttcgctgctcaacccgaaggatttggaatcctcgccgctcttcccgagaacgagacttcgtcacctaaactacgggaccattctaatttttacaataaggcttcgatttcgtcttcgtcttcttcttcgtcttcctcttcgcgtttgattccagtgattccgaagcctccgcaagaacgcataatgcctgttccttcttcttcggtgaagtaccaccaatctgttccggtgaacgttcctatgatgtccaaggccatgtccaaacccagggacttctttgctgtagatgctgatgtcggtgatgatgacggcgaagccgaaatgttgccacctcacgagattgtggcaagaagctccacgcaatctccgatgcttgcttattcggttcttgaaggcgtgggaagaaccctgaaaggtagggatcttcgtcaggttcggaatgcgatatggcgacaaacaggtttccttgattaattaaagaattctttttcttcaatttggggaaaaagatgttcctttctattatgtttatcagtataatttttgttgggtatcctttgtaatttcattatcaaacatttgatttagtataaatgctattagtatcaattagggtaatctgaagctcattcatttttggttggttagtaaatttttaggaattatgtgatgttcaggaaaaataatttttgaaatttcttcattgttttttttatcaaaggctttaatgatctttgatagcaatgaatctaaggagttgactattaaattggtagaattgaattcaggtaacattttgatttgtgtttgaagtttactacatttgaaagtatatattctaatgatgtaagagctatagagaactttctttgtgcttgttagttatattggaatttgaatcactagccactaataacagtttgggaatttttttctttattgggataactcatttcagtggtggtggtgttggtggaagccaaacataggaggaactttgtgtgagatagttgcaaattccttagtttattcaacttcctttgttgatagtattttgctctatgaaaaggggtttttgttatctctcttgggagtaagatcaaatggcttttaaccccaaacgaggtcttcctgccctcagatggaagtctccgattagtcatctattttattttccaagtttattgatacaagttagagcccatttggagtaaaaattattatgatgaaagaatcatagagaacttactttatgctttttagttgtgttggaatatgaatcactgcccactaatgacagtttgggaatttattttctataattgaatgttttattagtagtggaagtcaaaaattagaggaactttgtggtgagactggtgcaaattctttggtagaatttgtatcttgccttttagttaactttcgttacaactttctacctcgtttatccagtctcatactctataaaagtggggttctgttttattgcctgttatgtcatgcgagtaaggtcaaatggttgttctgttaacatgttttacgttgtagactaaaaatgtatatagatttttcggtccttcatttggataagttcacttcttcttgtaggcattgcattgaaactgaatggctataaaattaggttgatagttgatactgtcacctctaataacataagagagagatttctattttttaaatctttggaatgactgattttatgtttcactactgaaaatcaaaagatatttagataaaataacctgtctagttctttttaagttaaccatatttcagtttaggacaggatatgtagtgatttccatacatacagccgtagttgaatattactcttcttttgtcccgttggactttaaaatgtacgctatgcagctagactgcggggacagccgatgggggcaacaaagccccattctcttacacttgagaggcttagacattttttggcttacttatgtaacagcattgaaaataaatgtgtctttcatatcacttattcaaccatacattgcaacaggcaatgtctcctatttgtttaggagacagttaaagtagatcaattgtttggcaaagcacggttcactttggtagttggtagggtaaaattagataccataatcattttctaccgattctaggctcgggattttggcaaagtatatccaggtgtacattattgtctttggcctgttcatactcctttcttatttgaaaccggtctccatcatattttgcaagagagattcttccatgtgtgtttctgaaatgttacaagcaccggttcatgttcccattcatgatgtcctgcaccgtagggttctgcgttttagattacatttgttggggcaatgttggagactttatattagcaggctagttgattttgtgtatgcattagccaccaatacatgtagattttttgtacaaaaatcttagtgtcaatcaatgctctacccgtatcgaagcttgatatggttcttcgaattcttttataaactcaatatgaagcttatcattgtaaacatctcatacagaacctcagctgctaatgaaagaatccgctagaccttgcggttaagtggcaatttaacttatcacacgagtcaataaatttcatatctttggctgctggtaatatgctcaggtcaatgaaaactttagtcatggggatacgtattgaattgacatactcatcaattattactttcatcagtttcttttgttttgtacttaacaattttatttttttttgctggagggagaagtggatggatgtgtgatagttttcattaaaaataggttaaacaaacactctatcccaaatccataggaatagtattcttactcctcttctacttttttcccataccagtcttttacatatttttatgtacaatacaaagtgggaagttatgtcttgttcataaatgccttttttcctttgtcatttctacattttggtccttttacattacttccacgattcctcaatcttatttaagttattttcttaccttacaattatcttagcctattattttttgcgaaaaaataaatatatgacaagattgtgatctcatgcatatttagagggtaataggttgaaaatgaaggaagataaataatgaaagttattttgtctattcataggttacaaataaggatactaatgtgtgtattacccatttgatagtgtgttttatctaaacacaaatttggtaccctttgaatttttacattgtattattaaattattaagcgtcataactcatctataactcgtactatgcataccaaatatatataattaaaatataggattaattttttttaaaaaaaaattaatatatatatataaggtactaaatgagtgtatttaacatatcgccaaatcagaaagaatgatactgtaagagcaccagcagtgctggcgtctctgctcgttgcatgtttgacaccacaatcaattttaagcaattcaccaaatcaaacaaaatggagaaaaataacgtataataataaataaataaataaataaacaaaaaaaatttaagcaaataattcttgcttctttgcttaaaatgtttttttgtgaccccaggctggccctacctatttgacagatgaaggtaaactatggttagtgtcattggtacttgtttttattgtaatttaaaatccaaagctccccaaagttgatcataccataaaacatagaagaaaatcatatgagagtaaatatcat

SEQ ID NO: 187273 - DNA, 1627 bp, Cannabis indica
aaaaaaaaaaaaaccttaaaataaatgaaaaaaataaaataaaaggtgagaagtaaaataaaacgaaagaggtggaatatatcgtgatatattgagagagaagctaagccgaaagattggttcttttctttaaggactcaaccaacttcttaataaagccttccattactacatagtacatacatatatttccttctatttttttatttttaaaaaaataaataaaataaaatccttaaattgtaaaataaaataaaaataaaataacacttgacctctatagactgccaaagcgatcagtagtagtagtacctagcttctgaaacattcatcatcactctcttgaaaaactcaaaaaaaaaaaaaaaaaaaaaaaggaaaagtagaaaaaaaaagaaagttttatttctcttcaaggaacttcagattctttaatctcttctcatttaatactaaactctcttctcacattacgtctctctccctctctttgagccaaacaaaaaaagtgtgtttaagtgtatattatttggttctacctctaaacatagtttgtttagtagagagagtattaaaggtttcatcttttgccttgtttgagtaccaaaatgaaaaataactactcactctggtttttgctctgcattttggtcatcaatagctacctgggtatgcctcttttcactattttttttattttcactattttttttaaaaaaaaataaataaaaataattgtttaaataatgtttggagtataatgtctttaagtatttgaatatgtttgtgtttattttattggtgcatttgttgaatcttcttattcagaagctgacactgtcagggttaagagggttttgttcttctatgttttttttttaagaaaacaaaatacagaggaaaccaagtaatttttttattattatttttacatagtagggaagaaaaatgttatgaatgtattttatgtatttatttttaagtggaaaggttgagatgaactcttttgtccttgagctacaccttgtcttcatgcttgttctttaattatttattttagggatacttgttgcaagagtattcaaagatttgagtataatcaccaattagaaaaattgtcatttttgtctgtttctggagaaaaattacagttttttaaatattgtaaggtctattttacttacaaactcaaaattttgggtagttatgctcatatttaatctttattttatatgatgcttagagattgtattaatgataatgaggtttgaaaaagttgtgttttgtgtttttttattatttattcacgtatttgtttttattgtttgaactttaaacatcaacatttagaggatggtcacaaattatcccatttaatatttcaccaacacattttttgccaaagttacttgtttgatagctaattataaagccattggtgatagttcaagtcctactagatgatcatagctttaattaatattatatgccattttcagttcttatttccattttgttgctttagatatgtctatataaagatattgataaatttgtttgcttcattaaataggttgtttgacttattttccctctcttttcaattatgacagaaaagaaaaaaaaa

SEQ ID NO: 187274 - DNA, 7309 bp, Cannabis indica
taattttaattgataaataaataccctcttttttaattaaagtacaaaatataacctcacataatacctaaatcacataatggagatatgacatataaaattgaatataaattaaagaccaataaaataagagtaaaaatttaaataaaacaaaaagtaagtatactgtaatttcctcaagaaaatgtcattgacaatgtcattgacttaggaaaaggaaaggcccaagaaataagggacataaaaaagcatcagagaggtaatcaaattatgtaaattagaactgtcctacctacaagttcattgaatttatggttgaaaatgaataatcgacatatgatacatttttatgattaagtacaaggacagccgcgttgttgtaaaatgtaaaagacgtatacgaaacatgacaatataaaacacaaaactagtaaaatacagtgttttcttctactttttctttgcttcggaatcttaaaaatgaattccatgaaattcagtcagaaattcccagacttattttgcatattcaaatgatcttcgttttaaccaaatccaatgaccagaacctttgaaattacaaattgaaggaacggattgcacgtaagtctatttatgtacagatggattttcccaaatttctcacttctaccatcactcactttcgtaatcatcttcatccccaaatgtaaacacagaggcatcagcagccattgccttgaactcactttccgggttgggattttcaatgccgggcacactagcccctgcaacatcaggtttttgctcacttgaagcatgaacctgggtagaaccagcatttcctatagagatttgttcagtagcttttgtcaaactggcaatctgatcgggtttggacttgttttccgaagtgaaggtggtagtgaccacatttccactgcctgcaggagctgtctctgcttgccgattctttgaagagccagtttcctcagcctcgccgtctgaaaacacatcgtcttgatttcctgaatctttagtttgctttgggtttggagtgggggcaacttcgtcaccagttgctgtcgcaggactagattgagagctttcgtcttgtgtttttgcggtagattcagccttaggggtcgctaaaacagtcccgttataatcgactagaacaatctcaacctgaaatcctggggaaggcagttttctctgataaaagagtcattgccggagaagattaatcagtaatataaagtgatgtccatttgaactaaaaaaacaaagatggaatgatgatcaacactaaaagttgctacttaatttttaatccaagagcttcagctcaatgccagattgaggtattgcaattgaaccaagcccagaggcatctttttagaaagggaaaaacataaattatatcccaaattctgacttgcaactttgtgaaacaaacaaattttatttaaaacaaaactcagtgataagtttttaccttgtcgaaaccatcaagatcagcagtacctaagatttttctattttctgtcattgttgtgttcaaccagctgtgaagaaaaataagataaacattaccaccacataacgaattagtagctgaacaataaaccacaaacaaagatataaggacagcaacgaagtgagactgaataccagtagaaatctccttggcggtcatgaaagtggattttgaaatccccagtcaattcggttagaccaggctctccaggcagggcaaagaccatcactcccttctttggagcactaaaccaataatcttctggctgtgaatataacacacaagcgccaaaacttaacgggaaacttaagaaccactaaaagcagtaaatggaatattgagaagacttgtttaaaatcaaataattgctttacataatcatgacctaccgaaagatctttggttcgtggatgcttttttgaggagaagagaacacctacacattaagcggggttcattataaaaaaaattatggaactggtttagatgagataagattagatttcaacaagacagcttaaagacattttgggaggtgttgccaacagcaatgccatcacacaccattatgatcagaaatagtaatagagggcctgatccaataagggcatctatgaagtcggaaacccctaagcatgcacctgcacaaaatttaccagcatgtgatgttactacatatgaacatgtataacaaacttcaatgaagccaagaaaataaacagtcaaaagtatacctgcgtccaggtggaatttctccattgaagtatgttaaaacacgttcaaagtatttgacatacctctacatgaccataagaaaaacatttgttaatcagataggtgatagtaagggaagttcaagtttattaagaatatgcaattcaactgtcatatgaaatatatactgacaatctgacttggaagaaccagtccttttccatcaaaacatcttttctggttatagtagtccatagactcctcagcagtcgggtaaaactgaagagatatgaaacataagaataagaaatgaaaatttctactattttgcaaaaagaaattggcagaccacatcattaaacatctttaccttcaaatacaaaagaagactagaaatcatcaaccctgtcctagccattcctgccttacaatgcactaccactacattctcaatatcctctttcagccaagaataagcactttgacaaaataatgttatcaggtgaatcggggggcaattatgatcatcaaatgggaaactagccacctgaaattgaggaaaaagaaacagcactagtaatttaaatcaagttcccaaacacaaattatattatcacacagaattggttttagtttttataatttttatataaaatttggttgactacctattccttaattgctactgacttaggaaagaccttaataatcgagttccaaaatgccaaaaaatattaatttgtttatacatacagtactattacactaaatgcaacatgatataattaaaaacacaacaagaaaaactttccagtccacctcctgttattttttctaatagttgaaattaaggtacggtgaagaacattgagcagttctataacttaattacataacactataacgggatgaaatacatcaaagttatgtctgacatgttctgacataatcaatagtgcagtttagatatctaatatcaagtaacaaaacctatcattggccacctattactaaatgacacaacacaactcacctttccttcaaacaatgatgcatcatataacctctcagaacataggttgtatactttgtacttgtcctgcacataccacaagaaacataatagcaaaagttgcattagaaattttaataaaaaaatgttttaataaaaaaatgtaaaaaaaaaaaagacaatgatatctttggtactaaaatacaacataaattacaataacaacttttcaagatggaagattaattttttggaagaagcgagagttctctctccacagcaaatggaactaagtagagacataacttaatccatcactacacatcatacactaactttgtacagttctgtctagtttgttaacaagtgtatgagccacaacaagtaaattattttttctgttgcaagtaaaatagagaacaccttctgcttcaaatttgcagccatatatacagagttaaaagtgagtaaaaatcactggtagaactcatcagaattgaactttcaagcatatacatttatacaaacctaaatattttacacatgtgtcataagaaaggaagatattgggaactgaaaatgagaaataaaagattatgtgatatgcactggcaaccaaaaagtccaattaccttgtgatgagtttcaaaaaacttaatgacttcttccatgtggtttctgtagaaaccctgcatttcacatgataaaaccgtttgccatcaagaaggaactataaaattcaaaaggaggcttgaatgtcttactaacctcaacatatccaaaaaagccagagctcatatcaccagcagggaagcccatagcaataatgttttcagtgatatatgtcatatccaaatcgaaacccccttcctgaaaactcaaggccgtacaaatcatgtatgcataccagacaaagaaaataaaagaaaaggaggtcaatatgaaatgctacagatactacagcaagggataaataaaatatatgtaatgtatgccttacggtaagaataccacttgtgcatatatgcacccaaatccaagtcaagatactatgataacactctaaggagattcaagttcggactttggataagatacagattgtatgccctcatatagaaattaacaagattaaacttttacaatacaacacatcaggtgctcttaaaatattctgaaatcacaaaataaattgactagaaggtcatagagctactagctgaataatgtaaagatgtcaccttcgccaacacacgcaggccattaatcaagtttttaacctttctacttgattaaactaaagctaagtaggacaaaaaaattacaccaacgaagtaaactagcaacccacctggtaccttcttttattttgggagacaacatggcgagccttaacctgtacagccttcactgcactccttgaagaatcgactaacccttttgtaattgttccaaataaaccaggctgagtatcagatgaagatccatcagaaatgtcagctggaggagatttgggagacaagcggagtcccagtccactcgtaaagcgtgaaaaggttgatttcccagaattttcagttggtgacccatcttgagtcccaaccaatggctgaggcaatttcaaactcttggtccatgatgaaagtttagatggttcatcatgggaagaattgtgtgatttgtctgtagcaacaggaggaggttgtacctcaggagcttttacaggaggtagggatgagtcagtagattccttatccatttcagctgaattttggagaaagttcacacacctggcatgcacagttcaacggtagcaatacttacgactatagctgcaaagaaaaatcaaatcatataacctcacatgactaattccaccatactcgctctacttctagaaacaaaacaataaaaatcaagtttgtgataggtgttttcagtttctgttttgttttattttgcctaaatgttttgcagcgaaaccagtgaatgctcgtatagatgtgaatgtgagcaattatcattccaactaaaagtggcaaatattgtattttctttcactaataatctgaaacaataggaaaaacattatggacaaaattagtaccagtgaccgaaaaataaaaaagcactatccaaacaaaatttccattccatcaaaccaagttgcgtttcataataaactagtaatagtaggatcggatgtaatacagacgacaagaaagtaggaaatgatcattagtagacatattttggcactctttgtagtaaattggtgaagaacatatcacattatggcacacaaacagtggtctgttgttgattactgtctctattatggcttcaatccataattcatattaaaccaaatagaactgtggaactataaaatcaaacgacgaccaaacaaccatttcgataacacttagcagcacatatcacaaatgtatacgtataagcaatacctgaagatgatatttagaaaataacagaaaaattgatccacaaaataagaagtcaaattaaacgcaacacaaacgaaattaatggataaatcaatcaatacgaatagaaatggaacctcgacaaagctaacagtgctgaagcgagtcagatctgtaaaccatgatcaaattcaacacttaccttattccaaatcgcaattgttccaactaatttcgaggaacagagaatatcaaagatgagtgaggcccgtctagggtttcagatgcggagcgagagagaaagagagagctttgttatccggcaagggaagaggttcagatgctggtcaaatcatttcacgtgcttaagttcggtaaacacatccaacggtggtgatgcagttttattacaatcagttggttagtagtattaccttgtatactttataatttatatcaccgctaagatcggataggattgatttttttgtagaccctacaattttaccacttttcttggctaactgccacctaattctggatctcaaaactgtgtcgttttaacggattgtatatttggcaaattttcatataagaaatttatatttatttattttttgttgtcaattctttcaattattgaattatttagtattagaaggaatttaattctaggagaaaataatagaaaaaagaaaaacgattactcaacgaaaaatttattaaaaatagaaaaagaaagactatgattaaaaaggaaaaggaaagaatcttttattatttttatagatttatagaaaatgtttgtcactttttttcttattgaaacgtgcaaaatatcattaaattaaaagaactattcttggtgattacaaaaaatttcagctgggagtaaattaaaaaaaaaaattattcttaatcattataaaaaaaattcagctgggagtacatttaactcgttattactcgaaaataacgaacacttagaccatttagtcatttagccacataattggaggcaataaaagtatggtcatcacaataaataaaacaaagttacaaccttcaaaacactactttagacaatgttactaatgattctaccaattttacatggaacatcttttccattgacgaccttgatagttagttccgaattatcttccacaataatgtaagcatagtctctttcccttatcgttgtaataacgaggagcgtgacactagtttcagccacaataaatggccccaaacactcgagtttcttcccataaaaattgtccatattttcatcacagaccaccacactaagagcattcatgctaggagaacaaacaacatcgaagtttatctttatccatcctgaaagaggtagcgtccaagtatttattttactgtcaacaagattttttttttttgtaataataatgaaatttcattatatcaaatcttccaaaacaaaggaagcaattacagtaggtaactcaacaccactaaaaacacggtcagcctcaaaaagagaagatcgcgccaatgaatgcgcaaccttattagcagaccgcttaacaaaattaaaagaaacatccgtaacagaggctaacatagccttacaatctaaaa

SEQ ID NO: 187275 - DNA, 4067 bp, Cannabis indica
ttttgcattgtatggggtagtctattgattgttttgaaaacatttcaggtgaggaggatacacctattggagctatgcctggatgttataggcttggctggagacatggacttgtggaagaggtgatactatatttggtttcataatttatatgcagttcaaatgatttggatgcatgattcatctcctactgtttgattcttaaatgttgtatttagattatttgtagaaatccaatggtttatttgtttggcctgttgaagaggattatcccaaactttgattggctttgagactaattctcagtactttccatgtaatccaactgttaaattctattttataaagtagctgagtgagcaaaaaaccaaaaatgattctccttttcggaataatatgaagagattagatactattgagtatttcacaggaaagattgacttgtatttggtgctttagtagttttgtaagcttgttattgctataaattctcatatttctctaagtgaacatcttattacaaaggtattttgcacatgatatcgcattggttgtttccaatttaatgcactaacggaacaatggaactatctatttggtcgagcaggtttcgaaggctcgggatgttggtgtcaatagcattgtgcttttccccaaagttccagatggtttaaaggttcttactttaattcagtatgttaatcttatgttctgtatgacaacatagtataattgagttgtttcttacagactccaacaggagatgaagcttacaatgagaatggcttagtccagcggtcaattcggttgctcaaagacaagttccctgatcttgtaagtcaatacacctatatagttattagggtaatgagctcttaagaatattgtgaatttctttttattaatattatcatttccttaagtgtttcgtctgtctttttccaggtaatctacactgatgttgctttagatccctactcatctgatgggcatgatggtatcgttagggaagatggtgagcagttatgctttatgattttccatcattcttttgttatatgaatgatattcctaaaacgtttatcaagtttccgaaaccagtgcatttcctagaatagggtgatatcttatagatagaagacctctagttgcacatgcagaactgaaacttgatatccattgcaggagttatattgaatgatgagacagtacatcaattgtgcaaacaagctgttgcccaggtaattgatgtttgcattatttctgccatatttgtcaattattgcttcagtcattcaagtgtgaattttaaccattcaattaacctcattcttatatccaaatccaagccaattttctgcatttctgacatggaactttgttgttccttgtgattacaatatattactatgatatctggtgtgtctgaatgcattatgctttgggagggactactaagttgaccaggttttgctttgcctctttttcaattcaaataacaggcgcgagccggagcagatgttgtcagtcctagtgacatgatggacggtcgtgttggagcaattcggtctgctcttgatgctgaaggctttcatcacgtttctatcatgtcttacacagcaaagtaatatgtttcttcttactactttttgcacgcgggttcgggctttttccttgtcctaggatcctccctcgtagttcttttgaatttcgaataattcaagatcttttgttttccaattatctgataaattacttaatgtgtatagattgtctttccattcgtctttccattcatttcaaaactcccacaatcccttcccgaacccccaaaataaagcttacatttttgcttcactgattgagttgaaatccctcctttaccctaccctttggtccctcagtttcaatgcatatgtttatcccttccctgattccattctatgaacctttgtgtttgtcttgtttcattgatgttagatttatttacaagattcattttccaatgtcaataacaggtatgcaagttcattttatggtccatttcgagaagcactagactcaaatccacgatttggtgacaaaaagacgtatgcatttttcacagttgatttaaatgacaaaagttttctctaacttgatgcatcggttgctgacatctattttgatatgtggctttcgaaacccaagttatcagatgaacccggcaaattatagagaagctttagtcgagacccgtgaagatgaggctgaaggagctgatatcctgttggttggtattctttgttgtggattattgaaacatactaagaaacttcgttagttctcaccatttttggaacttttataacaggtgaaacctggtctgccgtacttagatatcataagactactcagagataactcttctttacctattgctgcatatcaggtaattttaatgacccaagaatctattatgcttatgaacaagtgcttctatgaaaatcaaaattggacagttttggctattctttttcagcagttactttaatgtaaattggtttgctttcacttgacttatatcataggaatagaatattaaaaatgcttgagaaatagatgatagaaataattgtaaattaaacagtacttacattgggaaaatggaaaaataccattttggcttctgtgcatgggaatttggagtgagattggttgggggtaataaaaagaaatagagtagaaatgctagagagtctcacattattaatgtgtagaaagataataatatatatataagatccaagtgctactactctcataacaaattggtgttgagatagaatccatgcatcttacgatgactatccgataaaaaaatgaaaaaaccgatcgaaaaagtagccactaaaagtccaaaaaaacttatctaaaaaatagagtaaaaaagaaccacttatgattcggcggatagtgaactaaaaaaaatgcttgtgatcgagccatccaagatgtgaagggctacttttttcataaccaattggttttgagatagaactctatgaatcttacaattctaacaagaaaagaatcaatttacatatcattgtttagctatattttaaagtgtttaatgtaataacttttctatttagaaaatgaaaagaaatgaaagtatgatgcaagatatatatatatatatatatttatttaattttttattgtatatttaaattttattccattttattcttatacttgtttccatgtttccattcttatttttattcctattcgtttattttcattccatccaattaaaattatcgatagtgttaagcaaccaaggaatagcatatttttaatttacacagctaagactcttagacatgttttcttgtaaatatatataaactgttgtgtgtgtgtgtgtgtgcaggtatcaggtgaatatgcaatgatcaaggctggtggagtactcaaaatgatcgacgaagaaaaggttatgctcgaatcgttgatgtgccttcgacgggccggtgctgacatcattctgacatatttcgccttacaagctgccaagtctttatgtggagaaaagtaagagaagaagaggagcttgttgaacttagaagaagggaattacaattgtgatttgatcaaataataatgtaattgtaatattagaacttgaaaatggtaggattaacaatgcggtttgtagttttgtagtattgagagttaggacttgtttgattaacagttaagtagtgttgtgttgttgtcatattgattgtattttagtattttgtactgtaaattattgactacactacacagactacctacctaccaaacatagcccaaacccctaagttatttgttcatgcatatttgttgtgtcatgtagattgaagttttttcttcacttttggaacctctgctaaaagttgtgttaaatttaacacaagatgacattgtgcaaaatttgacacacaatatacgtaacttttttaattacagttttaccatttatcattaatgaaattgataaagtaattttcagcgtaaatacttaaatttaa

SEQ ID NO: 187276 - DNA, 1470 bp, Cannabis indica
acagagtgtattgataaagtgtatgatgtcagaagagtacatcacggtattaccagcactagtacgggaagttacacggtgtatgtggtacgacatttaacagtactcggggtatgattcataccctacctatactagtacgatggtggtactaagtgcatgttgtatagtggtacatggccgtatctcagttagaacgctcttactcatatgtgaagcctagtaaataggtgtatgggcgcctagatacaagtcgttattatgtgatatgttatatgcttttcttactgagtctgtcgacctacagttctactctcatgtgtaggtaaaggactgggaaggctgaataggagtgagcttgagctgggatgggattgtacatgtcatggcggcacaacctagagtgtttggtctcgggacgtctggggtttctattttgcaatcgatgtgcgacctgacatttatattttgtataatttgtagaagtttaacaaagggatcccgacacttgtaaatattttattaaaatttataaagttttatagttaagattaaaagttttagtttgttacaattttcgagaaaaattttttgattagcaaagattgcactacaattgataaatcactgtagcagacttagcattaaggcattacaaaaacagcaccccatataaattgcccctgaatatatctatagagccaagccatgtgccatttctaattctattattttcttctctatatttaggtgttggtcccaataaagctcattaaatgagcaaaaaattaattcattgaccaaatcttgaaataatgcctacaattttggagtaaatgtgataatagattaatcaaattaaatcaatttaatttctatttatttgaaaattaattggcaaattttcttgtaccatttgtgagactttataaataggattcagattatggaaaaatgggctatctttctttttacgtaattttctttagcaaaattattgtaaagtttaatcttatattttctttatcatattttctctctaaaacttgtgaaaatgaatagcaactaggccagagttattttggtgagattagagatgagactatatgttgcatgatcttattgtatttcaattttcaattgtgttcaaatacttgcatatttgagttttatatttttattctatcaatttctatcacatttcaatatatcatgtgttgatatcatatttcaatatatcatatgtgttaattttatatagattcagtcaagtttttcctatgtaattatgcaatataatatgctagtttatattattttacgagtagatatttactgtattattgttatcgatatattttttatttttaatttctcataatatttcaacttatgtccttacaactgagaatgaaaggctatatataggctctcttctaacagaaaagtacaagaaaccacaaaaactta

SEQ ID NO: 187277 - DNA, 3925 bp, Cannabis indica
gtctccaccaaattcactataaccttttccaaagtagatttcaactcagagagttattaattgatttactttgttgctattgttgttgttgttttgtttaggtttctactgaagcagtagaagctttaagagtttcttataggaagataaatccctttactgtaccttttgccacagccaatatgggatctgctatactagcaatagacttggtaaagaaaaagaaattcaagttggtttaattctaatggcatacaaaataatatacttgtacacattatcattatggttgcaccaaaaatttcaggggtggacaggaccaaactactcaatttcaacagcttgtgcaacaagcaatttttgcatactaaatgcagcacaacatattataagtgatgatgcagtaagttctaacttttttaaaaataaaatctagtaataacccatgatgagtctctattctctaatctagttttgtcaaatttcgcaggacatgatgctttgtgggggatcagatgcaggagttattcccatatgtaataaggccagttctttcattcttggttggttcaaatacatgatcttatcaaactaagtttaagatttttatctctgcagctattggaggttttatatcatgcagattactctcgcgtcaaaatgatgaaccaactaaagcttcacggccttgggatactgtattccattctactctgcctttaaaaacttaacttactccatagtcttctggtttttttagttgtttaatcttgtacataaaaatgcttattttgtagaatcgagatggatttgtgatgggagaaggtgctggagttttgctattggaagagttggaacatgctaaggtttgttcttatctctatatctatgcatagtttccattagccaggtttttttaagacttaaactcttctcatttttgtctactttcttttttattgttactactacagaagagaggagcaacaatttatgcagagcttttagggggaagtttcacttgtaatgcttttcgtactgatggtaacaaaccagcaacatatatagactctttttccctcattttccataactttctcagcattgactgctgttacttaataactgttctgttctgttcttttgtagattcggggaaagaaatatctctttgcatggagagggctttagctcaatctggggtagctccagaagatgtaaactacataaatgcacatgctatatcatcaccagccagtgatataaaagaaatccgagctataaacagatgttttggcaagaatccaaatgtaagttttaaatcctaaatgcacatattttctcctagtataataagatcaccagattttggttgtggtgactgttttgacaccattcttttgcagctgagagtaaactctactaaatccatgataggccatcttttgggggctgctggtgctgttgaagctgttgcaacagttaaggttgaatctcttttactaaaattgatcaactatcaccatttgtatttttttcttcttcatattatacttgattttgattatcacatacaggcaatacaaactggtttggtgcatccaaacataaatcttgataatcctgatgaaggggtggtatgtataatgagacacctatgattcatttgacttgatgtgttaatgtttcagtgttgttataatagtatggtaatgaatgtggtcaggacatgaatgttctagtggggaagaagaaggagcgtttggacataaaggtggcattgtccaactcattggccttcggcggacagaactcgtctcttgtatttgcaccttattacaagtgaatttggtgtgttacataattatctaccgtaaatgacttagtaattatcatctatcacttgcagaaaatatcacctagtaatttccgttccaaaataaaaataaaatttaaagtgaagtgcttttgtaagttttcttgttcacataatgttttaagtatagtgttgtgcttttccaaccatgttcttcagtttttaacttacactaccctttgaaaagaaagaaactgatacataacatgagagagtagctatgaattaaacaacataattccagaactagggatttcatggttaaaaatctccttatcatttcagcaaaacaaatgaaacatggttagttttaatttgtcattaggagtgaggtgtatggtaagatgtacagtgttttatctcaaaattaattggttaggggtgaaatagactatacatcttttatatttgttgaacccgttgtgaatgtgagtctaacattatttgatagacttcatagagttcatcatttcatttttgaaatattccgctatgagtgtccaggtacaacttcattgttttctgtatgaaatgattcaaatgaagacagagcagtaacatttattgtggaaacataaaacccataaagtgattggtataatattaatgaatcaggaaaaaggaaggtgtgtcaaggaaaagggaagataataaataagaaatggagatagataagagatggtctaacgaaattattggagagctcttttaatgggaaagagttaaattataactctaaaatactaacagatttagagattacgaactatttgacaaaaaaataaatatatttaacgagttttattttttattgaaaagacaatttaataagatatttattttttttgctaattgtcaatctttactagtgactattaaataaaaagcaagcaaagaagttgagacaaacgattttgtcatttgtcaagatactaaataagacgtaccaaaagaagaaaaaaaaagtacactgttacattaaataaatatatatgagttgtaaactgctgaggtatatatggatgataatattcatattaaatatatatgtatgtaggtggttactttcgtctccaattacattaaagtccagaaaaatagcaaatgtggcgggtgaggagtttggtaaaaaattaactacttagccctgccacatagtaattagtataaagagtagatagatacaataccatcaaagtgtcagatagatgcaacgcaacacaagccatatttccttataataaacaaactcctacatataagaagactcttaatcacaactaaatatacatatatatatttaggatccttaaattacaacattccactctttttgtgtgaacataatttttcattttcttttaatatctctattatcagctacactgcatggctaataaatataacagtcacaccaatccaactctcatattataaaatatttaaaagggaaaaactttcttcctctctactgttgattaagctatcccttcattaatcaatggaggtttcttccatagcttcttctccttgtacatggttctcggttcagtctcagaatagactgagcccacgagctcaaagaaacaatcttactattattctagcatgttgcaacaatggcaaaggtgcttttgatcaacataaaaaagagtactacagctccaggggactttatgcacctttagctgtcattggtgaaaatagttcattccccatttgtggatcaaagagtaattccttcataactagaagaaggaaaagtaggctcatgaattgtgaagctcattcagcaggtaatttctttatacagagagtatatatatcataccatatagtgctttatgtatgtttaagttttatatttgtattgtttcgacaactttgtatagacaaagctacttgtgctactgtggaagctgattctaagaaagaaacaaggaaaagaagagtagttgtgacagggttgggtgtggtaagctccattggtcatgatccaaatgccttctacactaatcttcttgaaggtgtcagtggcataagtgagat

SEQ ID NO: 187278 - DNA, 2361 bp, Cannabis indica
ataatataatttatattattcataaaaaaagtttaaaaatattaaatttgaaattttattcgttaaaattatgaaaaccgcgcaaagcgcatatctattccctagttaaataagtataacattttatactatcaaacatatattgtggaactactgaacatcaaaacttcattactaacctctaaaataaactttatcgatcaaagtctaacatgtatcaatagatagttccacaactagtgacctacaactaaatgctaggtggcaatgcctcaaatgatctaaaaaggaaaggcatttcgactaactcctcaagcaagagtacaacactccacacaatttgataaaatttgagcaatctccaaaccctcgatcatcatacacaaaatatcgaatttcaaaatttacaatctcgataattttaataactacaccaaaacacataacctaagccatattcatccactatacaatttgtaattgtagattgccacataattatacaaacaaatggctgttcagaagaaaataatatacattcgtacaaatatatttacacacaggacatgtttttccgttaggtaaatcacaaggtcttgagtagttcctcataccatggcctatgaacattggatgttacagctgccacacaatcagtacatctgcagccttgaccaaattatctgcaagagagtggcaccaactggccgaagagatgcctctgcaagttctcttcccttttttccatttcctccaaagacaacccctcttgcagctagataaacagcacgagaaacccgtttgaaaatggcatcaccagcttgaaggcttttccccagcatccttgccataatctgcttcctcgcctctagtttctctgggcatgaatgatgttcactatattctgcgcacccacttattgtttcaacaatgtctggtataccaatgtcctcaacagtttccagtaggctagagagctgatttacacatcttaatgctattgtatccatgtcgagagcattagtcactaagttctcgttcgaaagagtttgacgaagaaccaaacaactgtaaaacatgataacaaatttattagtcacatatgcattgacagttggaagagaaacatgtttgcatacgttggcagtgaacaagttcgatttaatataaacaacaggcagaagccatgcaatccagtgagcaaaaatcataccacgaggatgaaacatcatgaactttgcatccatgaatgataaatcatatagtgtgtgggtgagagagagaggtaaagaacttgaaagattgtacatgatgactcaatttgtacttagcacagtttaatagccaaaaactaatcggagttttctaaaataagagtgctaagtcctacagtaagagtctcaaggctgaagcataagtaaataagaataaataatgaaagaagataatgataagctggaaaaatctttttcaaatttccatttacatcaaataggaagttgaggaaatcaggagacgccacacatgatgagctcacttaccaggtagacattactattatcttttgaaattgagactgaacaccccttagcctggagagattcatcttaagagtttcaggcaaaacttctaggctcagaccacctacttcacacactagctttaataagccaagtctaattaacaaatcaatttcttcacccacgcactctggtaattgttctcctggaaaagccgaatctgtggaagaatttaaacagacaattaagcaataaatcgattgatagatgagccaaaccatcataattattcttttccacagcagaataaataaataaataaaccagttgagttaccaataaagtctattgaagaggcttgtgagctgatttttgttccagaaattttgcctccagtccggagagtggtaggaggaagtccagaagaaggttccttatttgtcacaacagataaagaattattgtattcatgccactcctgctctaccatcactttcacagatgaaacccactgccttgtagttggcaaagaagaagaggctagtgcaggagaaccatgcctatcaatgaaagcttttctcagatactctataccggcattgcccttaatgagtggttctaccatcctcagacgtgctctgctaatctccctcttaagagtctgctaaaaatatcaagttaactttataacatgggatgtaaaaattcaagtttgttggctttgtatcacgaaggattctaatactcacaagagtaaggagatatagaaagcaggagaagaatcacaaaaatatgaaggggttaatgcaaagtcaatactagcagcactgaagtagaaaag

SEQ ID NO: 187279 - DNA, 2286 bp, Cannabis indica
taatacttgtttgtgagtacaaactacatataaaatcatgttaggagagaaaacaatgtgtccttcacaaaattagtattttaatttatgatttaatttaatacagcttaacataatagtgccaaggccgtgttaaagaaagaaaaatcaaacaaaaatgaaaaactaatcctagtcttaaacccaagtgacttctttttaaacttcctatccccctactattttttgttgaaaatatttaataaaaattgatttttgtttttctcttattttgcagcaagagttggtgttgtacttgaagaagaacctcaaattttgattgtgatttttcaaaaggaaaaaattcatcattaatatacttttcccatcaaagtaggtgcatagagtagtatttcatatgagtattaaacgggaaaatcttcatcttggaaggcaaggcaatgggagtcttgtcaccataattaccttattcttgatcaaaagataagaatgggcttctcaaaagatggagtgggatatttgacagctttggccaacttcaacattcacacaaatttggatttaatcatatgacttggaaaaagtaataaattcacttggaaggacaaaggacatagccaggccaaatgagtatatataatagtgaaaagtgtcaaccttttgcttgtgtgaaaagtttcgtgtgtattgatagataagatttaagattgtaagcttcatttaaatgagaaaataattcatttacttcaaaaatcaaaatggctaatatgaaattgccaaatcattttttttgggggggcttgttttattataacgaatcacccatttctttctttatcaatactgaataatagatatcagtttcttactagatgatggaaagtatttttggactcttaaaatgccttcaaaaatcaaatattttatttagaaagccttttatcatgctctttcagctgctttaaatctttaaaatcgaaatattatttttagtactctttgctctttttgttttgtaaacattgaatctgtttcctataccatcttagaatgttccaaaacattacatgaatggagaggcactacttttaggaactttcatgccataaacaagagttgtgatattaaagaatacttgcttaagggttttgaaagtttttcaaaggatgagttgtgtttgtttttcaatataatttggaaaatatggaataagcgtaacaaagttttgttcaaaacaaggaaattacttcaattctgccattgaatttcaagtctcttctttgctgcatgaatatgtcaaagctgagctgaggatcacaaaattgaaactctaagtgaaatgatcaatcaagatttagttgaagtggttcacggtaacggtgagttatttagaaatttacctagccaagcttctttaaattgaatgtagatgctacgtactattgatgatcacaattcgaagattgggattggaaaaattgtgaagaatgattgagggaaaattgtagctggcttgtctacctcttttgatggtaaattgtccctcttctagctgaagcaaaagttttagtttgggctctcaactcgtatgtatttgtagaattttctttcgaactgattgagtttgattgtaaaattttggtgaatcaaactcaagcatctgtccatacacgctttcctaaactagtaacaaatgttgtcagtgtgtgggcatcgtttttcgtagatcgcgaagtggcattacaagtatcaccacccacaacaaccattaaaaaattaatagctaagagaatagaatgaaaaacaacatttgaatgtggattattaacccaaccaacaacgatagtagaatcactattaataatggagatattgaagccaaattgatgcgcaaaagtcaaccacaatataatagaaagcagctctgccacataaatagaaaactccaccaacacactagttgcccatgacagccaaactaccctcgcttcatcttaaatcaccccacccagcctaacaaccactaaagcatcggtcgccagttcaaaggaccaagttgatggcaatctccactgtgaaagtcgttggttgaccgggttcggagacgaagaacccaacaggagtctccaccaaacgtgatcttttaatttagatacctggttttgtgctagttttggaactgcttctattctcgactatatatcaccaaacaacactgagtttttatcataccacaacaaccaaagagttaccatcgttaactcaaaactctcacgagatagcttt

SEQ ID NO: 187280 - DNA, 3948 bp, Cannabis indica
ttggattcttagctttggtttggtacaactcaactacattcaattagattacaataaatggggaacatggtctactccaatttactataatttaaacatttgaatttagaatttatagataaatacaatgctcatataaaccaatttcagataaagttaacactagtgaacttgtgtgagtaagctcatgtttaaatagtagaattggatagaataaaatgttatcatgtgattttattaacaaatcaaatacaattgcaatgttgcaaaaggggtttttgaggggattgtaagaagaaaagggaagggactgaaaactttcaaatggtttagtctcatccaatcttatgaatcattttactaaagtaaaaatagtgctttgacttagtttttttgtgagttttgatcatatctcatacttaggtaaatgaatgaaagagtattgatgttagacactagtgcactatgaggagatggcctaataagtagttaacaattttatatgattaaattaaattgtaagatttgatattaaattacagtcgtatgacatcttgtggtggtggacacacaaatgccaacaattatctaaatgaaaagtgggaacatttttcttaatacttgtaccattcttttgatacctaaaaccaattaaaacttcaagaaaagatattgtttgatagagaaaactagatgagctcatgaagaactatgcacacacatattcatatactcatgaagaaccaagaaaattcttgaataataatcaattctcatatcaacattgcaaaaaagggaagaagagaaaaaaccatatataacacatcatccaaattaccaccacacttgtttatgcaagtatcaagaaatgctcaaattgaaattgtgtaaggattctctatagacacatatttttcaacactaaataaattgctatgtaactcacataatcaaccatttgagctacttctattgatcataacaaagaaataccaattgctatgtaagtacacaaaacaaaatacctaactatcaaagttttcgactgcaaaccaacaaccgatcgctattatgaaaaagaaaatcatcaaagttgtaaagaacttacatcaattgctatgtatctagggatgcacaaaactcaaactttatcagagtaaatcacatatcgatttagaaccaagaacacaattcaatcatctaaacaagttcaaacatcataaattcgatccaaacttccattccatcattttcaagcttactatgtaagtactcaaacatattctaaagatgctcaaaactcaaactttatcatagcaaatcacatatcggacggttggagcatactatatcatttaatcagtttagaagcaataacacaacaaatcaatcatttgctacaaaagttcctctctttcaacctaaacaagttcaaacttccaatccaatccataacacattacaattgtctctacaaaagctataataataatgaaaatcacacaagttcaaagaacttaatatcatattctgtaaatatctaaatatgctcaaactcaaatctctaattttattagaacaaatcacatatttgacagcttgagcttactatgtaagtactcaaacatattctaatctcaaattaccgatacaccaacataaaatcaaatcatctatactttctttcttattctttttgttttttcacttattcagtttagaatcaataacacaaacaaaccaatcatctgcttcaaaagtttctctctgtcaaactaaacacattacaattgtaatcacaaaagtctaaagatgctcaaatctataatctcttgttagagattacataactgacactttgagttatattctaatctcaaattttcttgaagcgagcatgttagaagtgattaatgttaatgattgtctataaccaatatagaaacactctacattgtaattcattcttttagaaattttgacagaaaacactgtgagttagctagctaaagagatattgtggtgtagttccatctatggtgtctttgtttgtttttcggttctcttgaattgtgttttgttaaattctcttcttagttcgtgtttgagtttagttggtgttcttagaaatacaatactataagaatttgtttggtacgctgtattacatcttattgtatattactatattaaattgtatttgatgttatattttcatgtacaattatgagtgtataaatatataatattttgatataaattgaaatttaatataatattatataaacatataatataaaacataatttatacgccgtactaaacgaatcctaagtaaatttccactttcttttctatatcatttaatcagtttagaaccaaataatacaaaatcaatcatcatctgttacaaaagtttcaccctttaacaaactaagcacaagttcaaattttccatccaaaacatattacaattgtctctaacaacaaaaagctataaaagaagaagtttaaagaacttgcctttctgcagcttcagcaacaattggcaacctaggcaactgtcccaaaatgcaagaagaagatccataaaccaaacacaccaaaaggaagagaaaaacagtactatccaagctcatcaacaaatccaacccaacaccatcttttggattaaagcttctctccaaaagatcaggaaatatcaacagcacatcaagaacaatagcttgcatagtgttaaacctcacatacctactgaaattcctattcctaaccacaacaaaatagagtgttaaaaacactaaaaacccattaaaaggaaagctcttaaaaacctttatagctggtatcaatggctgaagtagtgtctgaataggactgaattgggttataacatatttcccatattgtacaccatcaaagaaagggtaaaagtaacaaattgctgagatgagtctatctggtgcatcaactgagttgctttccttacattgaatggtgaaaactcttctggggtttgttgatttgtggttaattttggttagagtgagtaaaggtggagtcttttgggtgaagaagaaggttgaagagttatggggtttggttgaaaggtttaaagggtttatttttgataaaggtgagataaggttggaagtagccatggattgtaatgaaatgaaaggttttagctttagctttgattttccaatgtgctgggaaaagatcaaagctttaagctactatgagctgaagaagaagaagaatagagagatgtaaatgtgtaagggtgagatttttctggtgatggcccaaaacaaacatctttatctaattttttttttattattattatttttatagaaaattgtcttttttttgtttgtttttttgtttttgatgacaagtacttttgtagaccggtcgtgaggtgagtggtattgctatgtagtaaatacattgattttcttccaaaaaaaacattgattttcatttttatttatttttctaagattagtttcaatcttttttttttccttgggaacaaacaatttgtacattgacaatattatttttttcttaaacataaacactaaaagaaaattgtataatatttctaaacataaaagaaacataaacataaaaagatatttctttattttatttttttagaaaaaataataatatttatatatatattttagatatgtcaattgggtaaaaaattaatataatagaaaaatatttttttaaatatgcgcaataagtgtaaatttaaaatgcaatgttgccccggcactttggaacaagttatagaattctaaaatttgggagcgtcacaaagtcctctagcagagcattctctataatgttttgcttattcgtacctctctcgcgaagagaatgcttattgaggaagtctcttgctccctttgtagggaggaagaggag

SEQ ID NO: 187281 - DNA, 1244 bp, Cannabis indica
tgtatttatttaattatacctttggcttctgctgtagttacacatcataaaagtagcatgaagtaacctctttgatatagccttccttctacaatggtgtaccttggaattttatacattatccttctagcctcatttttattacataaaagttggccaatcatgagatgttcaacaattgaagcatctaggttggtctcgtatctatcattttgacatcttgatcagttggctcacaaatgcttggttggtagagtatctcgattggcaccacattgagtttgtcactctcaagttgtaaggccaattttgccaaagcatcgacattttaattttgttctcttgggacctactcagttttgtagtaataaaacttgcccccaagttatgtcaatttttttttccaaatattgtgccattttaattccctttttctggtattctcccaacacttcatttatgagtagttgggagtcgctaaaataatggatgtcctttgcttttgatacttctgtaattcgaagtccagctaacaaagtttcatatctacttcgttatttgatgcttggaatttgaatagcaatgtgtagtggaatctaaactgcctgggtgataccaagatgattcctgcccccgagccattttcgtttgagaatccatctacaaatagtttccaaagctcttgtacagaaccttgttccattccttcatcaacatttatcccgtcgattaaggagtctactaatgcttgtcccgtgattgttgttcagagatgataggtgtattttaagttatcccaattcaatggacaactttattaatcgacctcaagcatcgggctttgaaaaaacttgtctcaatgactggttaataaggatttgtataagttgtgatacaaatgtttatatattgtttaaaatgagatgcacatttacatagttcaacaaaatttattttcctacatctacggtaacaaggagttaggactgcatttttagtaatggaatgagattagaaaatcaagagaaaatatacttatttttgtacaacatgatttaatcttaggtatgtgcgtgagtgagtctttaaaaagtaaataaagagacttatgaataggtagtaggctgcttggtatacgagcttagtaaataagcagcttaatataatttagttatagcttggtgaggggtagtctggtgaattaagcaagtcgatgtattagcttgctggaggtggcgtaattt

SEQ ID NO: 187282 - DNA, 2198 bp, Cannabis indica
gctctacagtgagattagaaaaatgttaaaaaagaaaccaaacagaaggcaacacatattttcaactgcacaaaataacatgtcacaggagtcttccgtaaaagtatattacccactagaatctcaaatgaatatatgcttactcacacaaaaatcttaactgctgtagttttagcttgaagtaacacataccttgagaaaccaaggccatgaacatgtgctgcctcagcatgcccttcaccaacatcctcagcagtagaacctcgtttcacaagctctgaaaactcatgcttatcaagccgattcccttgtgagcggtttgcacgcttaggagctaagccaagagcctccctcatggcctgttcttcctcttccttaatccttttgatctcttctttcgcagcttccatgtctgcactctgagcatttttatccctcacataccagtgcaggtccttccctgtaaattttaaattttaaaagaaataacagttaaacattcttttcaaaagcaaatctcaaatactcaaacttggctagtaggagaaaacgtgcaataaacatggtaatgttactactttgctagtactggtaccagtacacacaacagcagggcttcagtttaaatatatgattgctgtaatatagagagagggagggagagtactcaagccaagtctaagtacttcaatattcctatgcaatgagctctaattccaaaagctagaaaatgaatattgacaatatatttgatgacattagaaagggagtggtgtgggaatcctcaaacaacaatatctcaaaacactggaaagaacttaagtttaacataaaatttgattgcattgacaataaacacaccatcggcaccaaccagagtagaattcttcgtagttttggaaaatatggatcttggccagttttaggtgtttgtccacatattatcatacattttgggacactttctacttcaagtacaaaagtaatcaaaccgagtctcaaaccttcattttttttttcaggattaatccatttcattattacagcgtaatgtgaaaattactaatggtccatactccaccattggagtttaaggtggtgatatagaccaataaattgtacatatctcttcctagataagtctacaaaaataattaaaaacaggtgcttgcagaaacatcagtcacttacattatacactcaatacaacaagtttgcaaaactcaggaaaaatgcaatagtaccaagacatgagtgttacctttctgccatcttccaacaggggccttgagactgtgaccaatatagttctctcgatgcttatcaactttcacatcttcccaagtaaattctgttcatcaccaataaaaaaaaagaaaggcgggaaatcaacaacacgccgacaataaaacaagaagcaaaatagaagaaggaatattaaaacaagttcagatggaagtatgattcaacatcaagtatgagtagtgttagcatgagcaaatatcttcctccctttaagaaactcaagcaactcagaataatatcaagtgagatgctttaagtctaaccaagattttaacacatactatccaaaaaagccacgaagatgaaatcaactcattactcatatgcaatgaattcaggtccttaaaacatattcaagcaacataaatgcctaaactacgcataagaaaacacccagaagagaaacttgaaaatgccaataaataattgatttaatcttccacttttaagattccagtttcaatttgtttcagaaccaatagctcaaattagggcttcttctaaatccccgaaacataaatcatacaattaacgactgatagcaaaactcaattaatcaaaccaaaaagaaaatcgtttggcttctaaaaatggaaataaactccggttaattttataatcaagtttcgcataattgaactagaggcgtaacaatgtcgataaagaagagagagatacaataaaaccctaaaaggcaaaaggaaaatataaagagggcttacgatcacggccgccacgaacaccgcctctagtagggtgatacatgtttcgaaaacagcctttctcttctctgcttatagtttcagaatttctggttatcacacccaaatatcgtcgttcgctccgcagcctatatattcgtttgtctccaatttattttttatttttattta

SEQ ID NO: 187283 - DNA, 3650 bp, Cannabis indica
ttttttttttttaaacttttttattctttatttttatccttgtgactatatgtggtgttttatcatattgaagtatgaacatgcatgatgttttcctttccgtggctttcttatctccaaattctccaaatggaatacgcggtctgcttttcattttatttgattatttctgtccaaattatgtcttttttaacgtattattgactgacatcagcattgaaactgatgcttatagactagaggctcaatttcagattaaattacttgaccaggctaaggatctattaattatttctgtttattttcttccttcaagtccagtttcacggatatgcacttctttttatgtgcttagtaaaggagactagtttaagtccaaactcgtgtttcttttttgtccattctaggaaagggatcagaggtacaaggagttgggtttcagggatcggatcacacttagcagtggacgttttcttcttggcaacaagtaagatcatacagttttactttcagaattttgttatttaattccatgtgaaatattgacttattctatgtattaagatatccaacgtctaaacttgacccgtgtatctaaatttcaaggtaaaagattctggcctttgcgtccagaagtggaagtgtttaaatatagctttaaataaatgtttggggtctcatttctttatccattagcaagtgtttagacacgaccattttcttccaccttgcatgctcattgttctttttttggcttaaaacttcatgatggtcctgtaccatatggagtggaaaaaacaatacattaaaaatgccaattcaactaactcttactaaatctactctaacttcagtttatctcttaagtcagcatttgtttgttttcttccctttgcttttccttatcgtatctcaatacaagagatccaggttcaaacccctcagtaattataccggtttagtttggaacttctccattttctcttaactatttctctcttcttttatgtgcatcctaaaagttctctacttcattttaaaataaaataaaaagcctcaaatccaaaaggaaacaaaacattaaagtctgtataaagattgtcttttatttatgtaaatattgttttacttttactttaatgttttataaagatctcttgagaaaagactaatactatacgacacttaagatggcccaatgtatgacactctatgtatcctccacccttttaagagaaaaggaaaaacgtgtccttgaatttaaaattagtttcattaagttttattaaattttaataggtgatgtccaaacataaaaggttacctcatgtaacaccttaaagtgtcttagggcaatgctccttaagaaatgaaagaaagtgaaaatagagtttaagagtttagctgagattttataagtggcaggacataattcaattgggaacattgttgaaattaattgtgtgggggttaatagattaatcgagtaattatgttgcaggtatgcgcggacatttgcatttttctacaccattggtttgcatatactagttttcacctgtctctacaggatgtcagctctgagctacctaaggtatttttatttgattttatataaactttgaagagcctcctccattgctccttgatatctgctcatctcttttgatttccaatgattttgcagtaatggtgccgaggatgtcggtgataaacccctgaccctgaatcttcgacaagctctctaagatttatggatgaaacattaaacatcatgtacaatgtacatatgtgataaatttaccttttctgggctctttgctagtttcaactctgtaatgcatgtagtgttacctttaaccttcttcatgctataacacgtgtcaaggcgttcaattcaaatttactgttccattattataaattttttaaagtaaaagaaaaaatatataaaatttggtttatattaccagtgaaaaaatatattaaaacttcaagtccaagttttttcatgtttgggaggaatttgggattatatcaccggttctcttgattgcttttaaaagggggaatttttataaatattgaaaaatttattagagtttatttttatatggataaatacataatgcaaaaagatatgagattaaaaaataatcaaagtttaaaatataagaaactaaacaaaaaaattataaataaatttgataaaattctaataataagaatcgttggaaagtagttggagaagttttaggcatcggaaaaattaacgaaaaagttactatcgccgatatatttgtcggaaaattatcggaagtagatgtcttatatataaattgaaatagaactggttttataatataatgaataaaaacaaataacgcatcataattcaaaccgattataattgaaaatagaacaagttctataacataatgaataaaaataataactcatgatataataaaaaaaataaaataaagaggaaatcaatttttgaaataatgaaatataaattaaaaacaaaactagttctacaacaaaatgagtaaaaatgaataatacataataccacataaatcggttataattttttttttttccaaaaaaaagtggaatcaattctaaaaatactgaggtgtaaatctaaacgaaaccgattttataacaaaataaataaaacaaataatacataataactcaaaatataatataaagagactagttatattcatcaactagttaaaaatttgagacaaaaaaattagttcagtaaagcaaagaagataaaaacttacgcaaaaaaatttgttaaataaaataaataaataaaaaactggttctttgaattgattatattaaaaattagtttttaaaaaatctgaattaaaaaccaattccttgaattaattaaattaaaaaattagtttttgaaataaataattcaagattcgttttctgaaatgacttaaacaaaaaaaacagctgcgacataaattaaaatagaaccggttctacaataaaatgacaaaataaataacacacattaactcagaaactagttataatttacataccataaaagaatgaatcaattctaaaaatattgatacataaattaaaacaaaaatggttccatactaaaataagtaaacataaataacaaacaataactcagaaattgattcttattaaaaaaaaaaagaagagtcggttccgatactgagacaaattaaatagaatcggttccactacaaaatgagaaaaaatatacaaccaacaattactcagattataatttaaaaaagaagaagaaaaaaaaagagtaaactaaccaaatagtaagctaaaattgacacgacttgtcctactattacccggtattaattctaaaaatatggtcaatttcctaattcctgcagtaaattgacaatcacaaggggaattcaaaaaggttggcaggcaatcacaagggactccagatgtttcaatctaaagctatactcaaacagtacttaccttaaagaaacctctaaccaaacatcgcagttgaaacatttgaatgaatttgacccgagccagaagctagagtttgtgtcttgcatagcaatggatgttgtagcgaatttcctctgagcatatatgac

SEQ ID NO: 187284 - DNA, 4444 bp, Cannabis indica
tgaaacaagagatgattccaaagccaattatgcatgcatcccagaaatactatgtgacccgtttgtttgttcgttttacaacacaaacacgaaatttaatcatgtcataaaataaactaatgaatttctctaaatttggcaacctgaactctggtccatagcagtggaaccaacactttagcattattctccacaaaaacatgtgaccataatggtctggttggaaaatcgagcagaggggtttcagtttctgttgtgatattgtcattaccaactctgaggctaagtaaatcagcattaaagtaggttccagctgctccagcattccctgggcaaccaatactcaaaccacctgggccaacaaaaagcaaatcaagcaaaaaccaagaagcagtgcggttaaatttttaaaaaaaaaaaaaagacatgccaaaactagaccagaaaggatatgtaaaatttattaattagttaagaactggatatatttgcctgatgaaaaaaaatcaaaagatttagatatggaacatagaagatagatgtggcagggcacacagcctgtggaaatggtttgactacacagaaacaaatcctgatttttggcccttaaaaaacatgtgcacaatttccatgtgctataaccttaagagcttgcattcaaaaaaaaaaatcttaagagctttactaagttgtatagcaagtcgctgtaaagatttaaagtaacccgtatttgacacatcaaatatcgtagttaagaaacaactatacaagtattgcagccaccaataagttttttgatacttgtgcaattttttccaggttgttagcatgtaaccattaataaacaagcagagactcagataataaccaaataattagcagctgagtgatcgaagtcacagctaccagatataaatgtgtaattgttacaaaccatgcactgcaactttaacatcttcttgtatgctgtaacaatccagagatattcttccaccaccacctccaccccatccagtcccaccagctgcacttatagttccatttcccttcctatgtgacagaacataatgccaagaacttatgagcacctataacgtgattaaatcatttaaaatgctcccactatctatatctgataatggtccacattcattaaaaaagtgcatggatatcgttgtatgcagtgagtgagagaaaaagagatataagaaacaggaatgttagtagtgttgtttattaccagcaaatttacaggaaaaagcatatgatgcccagcaagatatttagaataataggaagttactacagtatggtattggttaggaggtcaatgtttgatggtaccactttcacaaatggtaaatctacaaaaaagaattacatcagaatgaacagggaagttactcacagctttatagcatgcacaaatatacttccccccgagaccgcctccactagccgaccctccataaccaccttctgcggtaacagacccatttatatatagtgtatccttaactagaagtctaatacgtcctccgccattccctccaaatggagttctaacagatgtcccaccacccttactcccataactccatggctcagccaatgaagaccatgcataaacatcaccaccccagaaacttgtcttattatttttcacgcaagaagcaccgcgaccaccatgccctccaccggcacctacatagtccactggtgtaccactagtttgcgaaggtggtaatccacccaaagatgttgtatttatggaagaattatagtccatggtcagattggcggctgagaaaattacagaaccagcaacaatattcgcatattgaccaatattcacattgccagacaagttaaaagtaatcacacagccctcaattggacacgcaatggaaacatgtggaagtatttccaagtttccagtaccatatacatagagatcagattttaaaatgaagttcgaattcagcaagcaagtggtattaaatgatccaactcctaccaggtcttcacatgaaactgaacctactaatagggatgatgacaaaattggaatttgttcttgaattgtcgagatgttttgagaatcattacttatatgtaactgagagtcaagtgaccattctttcaaccttaggcgtccacttccagactcaattgagctacaacaaggaatgactacatggaggtatcccaccaaaatgaaccaccaaaggtactggtaccttagcaaatgatgcatcaccattcagctacttaatattaaacattccgtcatatgcatgaatttctgcacatgaatccaaatattaaacttgtcaaatcaagcagcataattgtacaatactacttataataaacttttcagaccatcagcagcaaagaaatcctttcataacttaaaatcctatagcagctgttttcaatctatctacaattaaaaccttgccctatgaaataaaaattatgattgacccttggtgtcaacaaaaattcttcccgtatacttgctagacctctacaatacagaaggaactagaaagtcaaagcaagtgaaactatttcagaatctatacattttaaggcactttctactataatacttgacaattatcttactaccacaaactaaggagctccttgtctactccaccttgtaagtaatgcccaatttctaataatgccatctgctggcaataaaccaaatgagtagaagtcataacaatgagtgcacataatgtgcctccataaggatcataactgctaagtgaaacgattacaagcctacaataagattccttaatcagaactaggttattcgctgtacaactcacatatctctaatcacacttaaatagttgaatccatttgcagaacaaaaagttggcttagatatagatttggaaagtaaagcacacagttcaaagtctaggaatgccttaattattttatttccttctagtgatcacaattctatgttgatcaaataccaaaattgaaaaagtaatggttcgaaatttcaaatgaaagtgcaaaccgaaattcgaacagctacaaaccagttaaacaataaaacgcatgtgtgacaaggtgatatggcgataaacttattctacacttgaaatgaataaacatatatagatataaatgtacatatgtgtatagggctacataaacaatacaatacatacggatcctaaccagctaataacagcgcaagaaaaggaaaatacaaaacgatcagacacttccaatatccaatttctacatttcaactatgaaaatcaagccccgaaaacctcataactttcaaaatctcgaaacgatctccaaaagaacaaaagcttccgaaaagcataaatcagatattgaattaatgaagtgagcgggagaaagcttaccgtatggaaagcaagaaagaaggagagaaagtaacgaagaagaagaagaagatgaagaagaattgaactgaatctgaaagaagcttcggtcagtcgctcactcactcactgtctctctctcttccttcacttctcttctcttcactttctctctctaaagagctgtaagaaactttctgaatcgtcgttagtcagaaaatggtttcttctttgtctctttgcttttcctctgcttttttctttttttctttaatttttattgttttatatatttaataattacatctcctattcttttactattacaacccctttcaacatctccagactatttttgatctaatttttgttatgatggtaattttaaaaaaaaatacgttatagttataattaaatttttttttatataaatgtgtaaattaaaatattaaacattctaagttttttataatctttattaaataaaataagtataagtgagatataatattaaattgtatgaatagtaatattttatagtattataaatacattttataaatgcaattttttaataaaagataacattgctataagagcatttctaatagccaaataggaatgatttaaaaaatactacatgtgatgtatatattttcgatatttttgaatggatgaaaataaaaataaaaactttaattatttaatatatattaaataataatataatattattttaaaaattttataggtacttgttattggaacattaaaaaaatagtcaaaaataatataaaagagatataaaataaaagttaattagaatttttaaactttaacatgtataagatcatgctccttaaatttttaaggtcgttaaaaatgtccttaaactattgagattgttggatttaaaattttttagttctaattttagtaaaaaaaaactactaatatggataaaagttcaggggacatgatttagtatatatcaaagtttgaaaagacatgatttggtagatatcaaagtctggagagcaatggtttag

SEQ ID NO: 187285 - DNA, 1978 bp, Cannabis indica
ttatattacatgatagagttaaggtaatgccattagtatgtagattacagttgaatttgctttgtcacaccttgtggttgatcatcattttgtctggttaagttaatatttagtcttcaggcttaatcttttgagatttaactatctggcttgctaatgatgtagattactattctctacattaatatttataatgttgtcattctgttgatttatacagaaacagtaataatatggaagtggtacttgaattagcatagtgcaattgattaatgcttcatgcaaacttagttgataagtcttggaaatatgaattctgaaacaaggtatttacataagtaaaatctataaatggcattaactagatgaattgttaatcacatgagttcttacattcttttgtgtctatataaattatgttgtatgaagattaatatttacttcattacaggaagaaggacctaatgataggaagattggaaagttgtgcgaatatgctgcgaaaaatcctttgcgcatccctaaggtatgatggtattttcgaagaaacctcagtgttatgtatggaaaaagaaagaagctttcaattgatagtgtcagcaacattttggccatgaaaatctgagaaactatggatacttcaattgagaaaattatagtgtcatgaatatctacagaagaactgtttctactctttctcactgagttttaattatgttgatcagattgcaaatacccttgaacaaaggtgttacaaggaactaagaaatgagaactttcaatctgcaaaaattgtcatgcatatttacaggaaattgttaatatcttgcaaggaacaaatgtgagttagttcatctctcattccttgtgctatcttattcatgttccataggttgtctcagatgttgacatgttgttccattggagaccattttttgcctttgtgttttcggttggatttacatttgatttttaccctttatatttgcaagttaaagagttgttctattcttccaagtgttttttaggcctctgttggctagtagcttactcagtgtcatgcatgctctactggatcaatcacgacaagacgaaatgagaattataggatcccagactcttgctgactttgtaaatagtcaggtcagtcctttgttgttctttaccatacaattttaaagttatctgcatatgagattcagttatagcctacttgacttaaaagtcaaattttagatcaaacttattaagttttgcaggcagatgggacatacatgtttaatctagaaggctttattcctccactctgtcaattagctcaagaggtaggagaagatgaacgagctcataatcttcgtgcagctggacttcgatctctatcttcaatggtattgcttgtgatcttcttcaatgaaataaactaacaaaaagcaaagcacattttagaagtaatgcttctagtgttagatatccacttaaagttcacacatttctattgtagaattccactctattgttcaacaatttctttacttaatgatatgttatgaatgaagttggtattgctacttgtaatctaatggtctgatttttttttgcaggtttggtttatgggtcaaaactcacatatctcagtggagtttgataatgtatgattccttgactataaatgtactttcaatatctatttgagaaccaattccactgttctccgagaactaaatagttctagcattttgctaacaattcggtttcttgattgtgtaaccagattgttgcagtagtattagaaaattatgaaggtcctaaggcgaaaacagtggatccagaagattcccaaaagaggtgggtgcatgaagtgagaaaaaatgagggacttgtttcttcttcaccaaataccataacaagagtttcttcttggagggtgattgttaatgacaaaggcgaagtgaatgtgacaacgtaatctctgttactg

SEQ ID NO: 187286 - DNA, 5893 bp, Cannabis indica
atgttatagagttaaatatttaaatttactaatattatttaaattttataattttctatttctccatattatcctctctactctcaatccatacatctccctccattctatctatccttctctccactctaccaccaaacatagtgttgaactcgactctcgaccctttagaaatttagactcataccctacgtggatgcgtcatagcagccaaatgtaacacgtggaataagccacgtcatcaccgtcaccagttgacctgttgactttaattctcacatcacatcttcctaacatgtaggcctcagtactcaaatctccctatcacacaccattaaatcttgatacagaatattccgagctcatttcttcctcatcctcttcaataatgtctccttcatacaaaatctgaaatttttgagaagaaaaggtgataaagctaacataacatggcctggttgaagagcctaatccaactcacagtcaccaaatcctcgtccattagagctagaaaaacaaacccatttcccttgccatcgctcgctttgatagcacaattcagcacagctccgaccaacgagactccacgagtcactccttattcgggattggggcccgccaagccaggtgagaagccgagggtcgtggttctgggatccggatgggctggttgcagactcatgaagggtttggacaccagtatttacgacgtcgtttgcgtctcgcctaggaaccatatggtgttcacgcctcttttggcctccacctgtgttgggacgcttgagtttaggtccgtggctgaacccattgggaggatccaacccgccatttctcgggaacccggatcatacttcttcctctcgaaatgtgtcggcatcgatactgataaacatgtggtatgttttgtttattctttttacattcgctttctgggtctattgattttatattttgcgtcgaaaaactggtgtgagaattgtgatggatcttaaatgtaccaattttgagttttggggtcaattcactggtattggatagttgcaacttacaataaatgattgttgaaatgataagaaatttcaattaaatgtacttttgtaattcggtgaagaataataagcctttgatttgacgtgggtgcattttgccataacccttttttgattcaatatatttggtgtaaaagaaattgtggggtgggggccatagtctgaagagtactactactggtggatcgagttcaaatctttgaatgtataaccacattgattttttctttttccacatttgcaaaaattgttaattaataacagttggtatatatcgaggtcttgggttttggaatggcttacatgtaacctcgttttggtttttgtttattgaaggtggaatgtgagacagttaccgatggagcagaatctttggatccttggaaattcaatatttcatacgacaagttggttattgcattaggtgcagaggcctcaacttttggaatcaatggtgtaacagaacacgcaatttttcttcgtgaagtttaccatgcccaagagattcgtaggaagctgctactgaatttaatgctgtcagacatacctggtattctcaatgcatccgtgttctagtgatttgttttttgatgggaattcagtactgtgatttggctgaatttaactgtggattttgttatggatgcaggggtttcagaagcagagaagtcaagacttctgcactgtgttgttgtaggaggtggtcccaccggagttgagttcagtggagaacttagtgattttatcacgagagatgttcgacagcgatattcccatgtgaaaaattatattcatgttaccttaattgaggtttgttaactaacaattgttagatgcaactaattagttttcttgcttaaaatctttgttcttctgttattgttactggagctattcaatttgctttacctaattttatttttattagacaaaatgatggtaaatttgcttaaggattttaaaccaatgccaaaatgccaaattgttatcgtaactatgtaatgttgacacaggcaaacgaaatattgtcttcatttgatgatcgactccggcattatgcaaccaagcagttgacaaaggtaaataaattatatatctacaattttcttatttgattgattccttttgtttgtgttttcttttaaattcatgattcagatgttaacaccttaatttgttgtaagaggaacttttgagcttacacgatgataaatagtgacttttaaaaaatatctccttcaattttcacctattagtctgatccgaaaatatttggaatagcccactgaacttacttttccattgtacatctggatcttttcatttaagtatcctctctcagtcaggagttcgtcttgtccgtggggttgtcaaggatgtcaaagctcaaaaattaattcttgatgatggcacagaggttccttatgggctgttagtatggtctacaggtgttggtccatcgccttttataaaatcccttgaccttccaaaagctacgggtggaaggtaggctgctgcatatgcttcgttctttctcaaaccatgttagcatggcctaattttctacattaaatcttctgaaaccaccactttggaccagattaaatttgaattttcatggacttgctatcaacttattgaattgtatttaatgagaataaaaaacattgtcgagaagtgcctaaaatttcttgttatctctttcattagcttgttaagtaaagtacttctgtctttctttccatcgttctattttcatatattcaaacaatgcttcagaaaaatagatatttactaaggcaaattgcacatgaacaggattggtgtcgatgagtggctgcgtgttccttctgtggaggacgtattttcgataggagactgcagtggctttcttgaaagtactggaagaccaacccttccagctttagcccaggtaagctgtatttcaaaagacttttctcttttgtgaaattcctctagctccttgctactctgtaagttagctcagacaactcacctctcatcgcattataaaactaaatatgcagcttttcttgcttggcgtgccctttacagaatatgacttgttttgaaattttatgtaattgctaacagtatcttgtttgccaaatgaaggttgcagagcgtcaaggaaaatacttggcaaatctcttgaacagaatcggtaaagctggtggaggtcctgcagacagagcgaaggacatcgaattcggggagcaatttgtttacaagcatttaggaagcatggccactatcggcagatacaaggctcttgtggaccttagacagagcaaggtgaatttccaagtcataaatctattatgtttttttcctttgaacttctcaagctaaaaccaggattgttcttcttcaggaggcaaaaggtttatctcttgctggattcccgagttggtttatatggcgctctgcttatctaacgagggtgataagctggaggaatagattctacgttgcaatcaactgggctaccacttttgtgtttggccgtgatatcagcagaatataaagttggaaaaaggtgtctattctacatttcatctttataccaaacccatgtacatatgcacctttctttgcttattacatattccgtttattttatgcaggccaacaataagtcggatctaatggagtttgcagctggacatgtcttgcataaatgaaaataagtcatcacagatcaagtttatagcattaaatgagataataaaatattccactttttgtaaatgtcgctattttttttttttgaagaaaaatcataatggtgtccgaatgtcattagctggtcattatgctatgtacatggagtctggagatctatatagtaatagtgcaagtacagtaccacgcttgtcgaaagttgaaaatgtaagactagttaattttgttttctggtggaattatttgatgatatactgtgtgtgcatttggaaattttcgtgcatgaatctcccaagccagcgtagtatgacaaatttcctatagtttcagttgaaaatttgcagtagtatgacaaatttcagtaattttacataaaatattgcaaaaatcattattgacagtaaattgatactttcatcattaagatagatttcgttgtaacaacgaatgcgaatattagtgagctctgcggagttatcacttgtacaataaaatactttatatagatttataaacaagtagatctacgatccttacagaaatgtcaagctacaaatgacagactccttttttatagcatcaagcaaggacaatccaactgaggaaatttcggaataagttccatattatattaaactaataatactacatcaagtattacgcaaaatacaaaggatctgttgtggcatcacaattaaactaaacctaaaagttatatccatgcagtgaactaagtccacaaacctccaacgccagatttacccagctttttgccaacaacgttcctcaattcaatctctccaggaaacctaccctcctttagtttagagaaaatctgtaatgcagaaaactacagtcaggaactttgaggcgtcaaatatcacctgtcaatctttcacagaagtacggtctagaacatttgtattgcaaaggaagaaaaggtaaccagttcctactaacaaagaaaaaatcaagaaagttacagataagattaaaggtgactaaccaattcattgttgaggtagacctcaaatgccccagtgctttggaggaaggattgcagagcatttccaagaagccaagaagatgcaatggtgccaaatttgtttgcacgcagagaataataccaaggaggaggagtcataaatcccagcaatggaaaaatatgttcacccgccacaacaagcccaacagctccaatttgagcaacgggaaccaatttgctgattatacgtttatgtaaagctggtggatgatttgcaagagcaacatcaatcccaggaaaagcagtctccaacatctttttcattgtaagggcatttcccctaaagaaagcagcatggattgatcaaaattaataatcctttactacacttaaccagtagaagaacgtgaagtactctcagcactagggaacaatttagaattaaaacaagaaaaaaaaaagagcaaagagaaatacttgaaccagcaccaagaatggactttgtaggaaaggaaaatatttaagcacaaagaaattatcccgaaatattaatcaaaccccaaatgcaaagaccacgacacacagtaatatcacaaatccctgaaaaagagacaaaagcagagaattcgagcgtacctgtaagagcaagaagaacagaacatgatgtcgattctgctgccgaggccaagtcccccaacaattacttcgtcctaaaattcaagaatttttattttcttgtttaattgaaggaaaacattggtacaataaataactcgatttgggtgtgtgccatcccagttgaatttcaataaaacctaagaattttgtaatgattacctgagagggaacatctagggtttcagagagagtcgtagcttgttgaagttcacgatctggtggatgatgcggaggatgagggtgatgatgcggaggatgatgcggagggtgagggtgatgatgcggaggatgatggtgatgatgaggtggatggtgatgatgaggatggtggtggtggtggtggtgaggaggtggtggtggatgtggagcgaagaggctaactatgtcgtagaagaagagaaaaagtggtattccgatcaaaagaatctgagcgcgatccattgccatacacagacagaacactccacactacaca

SEQ ID NO: 187287 - DNA, 2389 bp, Cannabis indica
tttttaatacggttcaattttctcatatttaacattggttgagttcacgttggttacaatgttcttactgtgctttcttaacaaaatattcttaatatacaagtcattgttcatcagtgcaacaaaactttgttaaattttttcttaacaatgtctaaacacattattcatatatagttggacctacgttgttaatcagctaacattcgtgctactaaaatattattatgtaataaatcagggtttggaattggtaatacgcaactcatatagagaaaactctattggggtaagcttgtttttattacgaagtaaaggttgtcattagttgtttataggttgtcaaatagatgtctgacataataatgtatataaatagttgatgttgtgcatgtattttcaatgctttgttgtgtttcattttttttttttacagttttcttatagttggatgaccatatttgaatttttcaaaatttcaggaaacataatcaattccatttctcatacagttcaatgtgcagtttgatcaaggaataaattatgtgaattacaaagctagtggtaaatttatctcaatgtattgcaaatatgaagaacttgtgcacaagttgaagcaagtgttggaatgcaactaagaaaatactcaactgcaactaaaataccaagtgaaataaggttaccaaccgttgagaataaatgacaatccaagcctattcttctacatacaattaaaattgaaagaacttgacttcacaaagtatccattatgtgtgaacatggtcaacaacacatcaacaaccaacaccacctctttctttgcaatgagtagctcattagttgcataaccgttgtttcaaggttgtatgacatattcaaaatattaacagaaacataaagcattatcaacatcacatttgacacattaatgtgaagttctaaaacttttcctattacattaactattctgttgaatcttcaaaagttgcccaaccactgttgattgatagttgtaaaaaaggtgttatacataacacaataattcaaagattcaaataacttctacaactatattcctaggtttactaattagataggttgcataaaagttatttcattgttgaatcaaacattatatacgtcgacacaattcaaaaacacgtgcaaaaacataagcatgaaaacaaaatacaataccatacaatccaaacccgtaatcaaggtgaactattcaaccctaaattgaatgcactgaccaacaatgtttgcccgaaattccttcgaattggactaatgcacctcttttaagagaataccatgaaaaatttgaggggacaattatgaatggaggaatatataaaaatttatcaaattgggttgcacgaaacaaagtcttcacattttccaaaagagtgaaattaagcttcttaatgacattgttactgcaattggatgccactttcgatctataattatcataacagggtacttgtattcccattcctaaaattaaaaaaaaatgtcaaaatgaaagcaaaaggtgaacacagtgtaaacaaactacaatacaactgttagcaaattgtttaaaaacaacaccataccaaaataaaaaaaaatggtaaataattgcccaaggaatactaaaaaaacattaaaaaatagtacaaatattcattacgaaataaagtctaaattaaaccaaaacaaatacatcaatggccaactatttatgccgaaaaactaaaaaataacctaaatctaaaaatattcccaatcagaaaatctatcactaagaaaacaacaaaataataaaatatataaaacactggaaccaaaatcacaacaaaaaatattaaacaaaatagagacaacatttcaaaatcagggcaaaatcgaaaagaaactgaaacaaaaccttaggaatttgatccgcatgcttcttccccttcttaatttctggaattgaactctttcctctttattttttttttctttaaaggactgtaatcctattttttgcactatgacgtggcagttagctggatgacacgtgtctcacactttcttacctgggcgaaaggttacactcttagtagccctcaaggattggtagaaaggtccatgttatccatacatagcaggatgtttgggtaaagtcatcaaggaaaatttgcccaagcttgatcgtgtgatcaactcgcatgcaccagccaggaaatgtgagctggcaatttcgaagagggatgtcgtttttccaagtgtgcatgtcacaaagataatccctacattcgtgggattaatttagagaataaaggcaataagcctagatttctaatctctacattgtaatttatggaattaaactagtttcctattttattcatta

SEQ ID NO: 187288 - DNA, 2659 bp, Cannabis indica
cttatgtgtagagtatagtatacctcttatatgtaatttttttccaaaagaaaacgtaacaacttaaactttgagccttatttttgggccttatccttcgacatttttccggcccaagcccgtttgtggcccaaatcttgacttggccctgtctctttgcctgaaagagttctccttctccaagatcaaacctgccctgaatctcgcgatgaagttatcagctttggtatcaacatccgggctcggacagaacaacgacgacgccggcgactgtccaccttccgatgccgccaacggactcgtgccttctattgaagaatcctcgctctcatccaaatccggggacacacttcttgagctcccgctactctttatcctcacaaaatccccatgcttcacgaatttccagtcctgaatcctgaatggcggcggcggaggcggaggtggagggatcgaactcgacatcggcggcgactcgcttccggttgtagccgatagtggtagtttgtgagtcactggaatcggtttgcttagagctttgttcttcgaaacccttagtgttgaagtattgaccggtggccgaggaggaggcggcggcggctgagacctcgagtaagggtttctgtttttacctttctttgaagaaaacagattatggaaaactgaaggtggcggcggtggaggtggaggcggcggtgatggcgatgggtatgaagatgaagattgcaatgatgaagtatggtcgattgaggtaagaatggattcaaaattttcgacgctcttttgtctttgcttttttttctttcgcctaagtgagattaagaaatccttggtagccgtatttctctttttctcactttttccacttttgggttccgattcttggtacgtcggcggcggcggtagcggcggcggaggtggagggggacgcaatggtggaggtggtggttgagaatttacatgtttaacttcagaaaagttgtttctttcagtctcgtctttttgtctaatatcttggtaggtcctcttcgctttgcgctttttcaccggagccgtgggcggcgacggaggaggaaatgggggtggctgaggcggaagctgcgtagaaggctgaggggttggttcaggcgcttgagattttacctctgttcggacctgaaaagtgtcgacctcaatattcttggtctccaagttttgatctttttctaccttttcaggttcctgcaatggccggcgacgttggtgtagcccatcggagccgagtgggcggtaactagagacttgggtatcatcgtagaattgccattgttcatctctggtaacccaggaagattcttgacgtagatcagggtatgagctactatttctgagtctagtaagtccatttccattgttatatgacagtgtccgatctgaatactggtaccatcgatttggacttgatgggttggacttctcaacctctcgagttgaagaagatttagaaacagttcgatcttcataagggctagcgttctcaccactgtttctgcttagaaacccacaaataatggcgaacagaactagaatcagattgagagaatcccagctcttctttacagactgaggtttgaatatttgagaagcgaaggaaagaatcgttggaataataaagaagataaatgcaagtgttgtaacaatcaagactatgagaaaagcactagagttgaagagtagagatgatgaacggctcagccgccgttgccggcgactatctgaggattgtagccaaaagggtgtaagatcattctcatctccttccattatttgagttttttttttgcttttgatagaattagaagcaggaaaaagggaatcagaggttatagatatgagcttttgggggacactctatctgctctataattttttctttttgtgtatgttgttgtgtttgtgagttgggttttttcttaggtatacgaatattattagctttttatataatatatgctttggttataataaggtagcatgtagtagtattagtactagtgataaagatgtgaaagtgggagaaaagtggtttggattaaaatgattatatcattatgtggggtcttcgtttctttatttcatctctaaataagaaaaaaaggaatagaaacagaacaagttatgcgcgtcacatgacccatttttgcctgtcatggctagaatgacagccaaatgatacgttgaataattgttgtaaaccatgtgcatagtacttgttttcttttttttcagttttgtaaatttgtaatatgctagtagtagttgttgttgttgatccaccatatgcaatttcgataacactaattctcattcacactaaaatataatatgaatttcccaaacacatgtcttttaccaaaacattggattcaacatcatatcatattagataatctccaattatttgttacacaacaaagtagcttgctaaaataagcatatggctttttaaattataaaatgaaattatgttatgagtcatggtcaaccattccgcgtcgcgtagtacaaaaactcagccataatttttcacttaaaaaaaggtttataattagattttaagtcacggccatcaatcagcatggattaacttatggtaatgaaaattgacaaagactagtta

SEQ ID NO: 187289 - DNA, 2296 bp, Cannabis indica
ctatttttctctattttttttttactttaaagagtaaattctagcccttataatttactttattaagctaacaaaactcttaactgttggagcctcatgatcctaaagagccttgttctgagccctccaaattatatacacacaagcattaataatgagcatgtaaatatctttcttttactttgtttccatcttctaatctagttcacaatccatttgaagcggtattgattagtgtcgattactacccaatttaacgtcaattcctacctaattcaacttacggtccaagaatctttggctgaatgaacatttaaaaaacagatgttcacgagttaatttcttgatcacaactgcatatgtagcataaggttgaactttcaactccttatttaagaagcttgtctcctatttttaacctgatccaagcagctaaccaagccactattttatctttagggatgacctatctctcccaaacatgatttgcaaaccaaacctgcctgttaacctttggaaacatgctgtcgcaggcttccgaaatggtaaacttcattgtctcaatgtggttccaagtataataattcagcatatgatctcccacttttattatttgagaccaataccagctactgtcttggtggagtttatactcccaccaatttgaacctctaaggtaaactttatggacccacttctcccacaaattataccaaggaacaaatatgtttctcgatggcagctatattccactcttcaagtcgacaacaaaatctcaaacctcctatcttgtttggtttgcacacctccttccacgcaacttgaccaggagattcatacactgttgttccatgccatagatagtcctgatagattttatcaatagattggataacttttttcagtaatatcatgacttgagcccaatacaaatgaattttttacaagaacggagttgacaagagtagcccttccaccataagaaaggtgtctagagctccaaatcttgattctcgcaactattttctcaattagaacttcgcattccacacttgaaattctttcaaaacagacaagcacaccaaggtacttgaacaacagcttattgtgaacaaagccagagattttcaagatctgttgcacatcttggctctccattcttgtgcaaaagataacatacttgtttgcattttcttgtaagccaaaagttgaggagaactgctcaaaacttctcagaagaaccataacggattgaacatcaccattacaaactaacaacaggtcatcaagaaagcaaacatgagtgagtttcaaggctttacacccctattatggaaggtaaagttctcctaagacgaagttcttgctaagattctggaaagatattccatactcaaaacaaaaattaaaggagatgtagggtcttcttggcgcaatcctcttttagaagaaaaatattcatgtaaactgccattaaaaaagatggagaacttgggggttttaatacataccatgatcgacttaacaaaatctttagaaaaacaaagagttatcaacatctctttcaagaaatcccaatttatagagtcataccccttctttagatccattttgatcatgcaagatgctttatcattgctccttctataatggcagatcaagtcctggcataccattatgtcttccatgcacaaaacctcttcaattttaagaaaccaactatggaagaataattctcaaccttgtacatgttatctttgttgccattttgtatagcacgttgcaatgggtctaaagtcagcgcaacaaattctggatattttaccttttgaacaagtgtcaaggttatgctatttatttccttcaaaatttcttttcaatggagaaaggagatagtcgcttcagtcgcgtcacgccccacaatattccatttttttttttggaaaaaccactgttaaacccgtcaggacccaaagcttttgaatctaaaatcgagaataaaacttgctttgcttctttagatgtataaggtcttaaaagatattcactttaagctttaatgaccacatgccttcttaaataatattcacatttactttccttcttccttttatttcttcctcaaataaacttgaataaaatcaacaaaagcactagttaccttagctgaatcttccacccaatccccttgatctgttcggattacattaaacttaattgcattgcccccactttttattttaagcttctttggaataatttgattttatcatcaccatctttggctttgaatttt

SEQ ID NO: 187290 - DNA, 4869 bp, Cannabis indica
ttgataatgctctgctacagaaaggaatcaagggctagatatctgaacggaaggagtcattatattccgctgcacccaatgtaaggtttcctaaactttatatgtgtttatttcatcgttttagaaagttcatatttagggtgttaatcaacatacttgtgagtagatctaagatactggtaaaataaatttccaacaagctcaagcaatgcagaaaggaacgttgcaaacacaagcaagatccatgcatgagccacatgggaagggaaacaatgaatctaaggaatcatccaaagataaaaagaagcagaaaaaatataaaaagtacatctcaatttatactggaaacaacgtgaaaatatattcctcgcaaacgagaacagagttgcttttcgcaaaccaaaacagatgaccattttctttagtgaaaatttgaaactcccaaaaaattgtaaaaatataataaaaaaaatataatatgtcactctattattcttaaactcccttttacctataatgatattgatattgattgtatattcattgattgatgattgataatttggacagtaaaatatacacatatgacatgaatcatttttattatttatttattcaagagttgactctttgagcaaagatattaaagtttgaaaaaccatgtctccctccaataatggttgggaagttaggaatattaaatggaccggataacatgatctctatgcatcatagtcaggaaaatggtatctccaagttgatggaagcctagttggcctatatgtctaatgttattgtgtagtaatgaaagtcagcaccccctcaatctgggattcacactgagctaaagtcactagacaattcaaattctccaaaatttgaaaaattgtccagctctgtaaaacttcaatgtgaactgaattagttgagggttatttagtacatagcagcattgtccctaagttgagtctttctttcttgggttttcaaccatttggcttctcaattatgcaatctaagatagcacagaacaatgccagattgaaaaatgtcatgtcagattagattaatagaaacttatgataaattagactaggaaaaataatattttcttgcatcatgggatgtgttgaggagaagagaccaaaattcattaactctttgcgctactaagtgtttgtctcatatattagccgtttgtttccccagaaaacatactgttttctcacatcaaaattttactggtttaatgttaaaaatgaggttgttatccactgatcccagctatcaatttcccaagtaataactttatcttgtttgttcaatgattgtaaaagcaatttttttatcttgttaattatttatttaaataagaatcaaacattttgagtttttcttccatatgtaagtgaaactacttcaagccgattttcacattctcatacactaaagatgtggaataagacaaagggtaattccaaacatattgtgtttgttttcattttgtgtggcatcatatgattacttagactaagtcactaaagaatctaatcatttgggtttgtctgctcctatcctattgatatttccaatggttcttgtttgatttgaggatgtcaatgatgaatgagttagcataagtcggttaatctagaatgatacaaaaaatcatttcttgataataaaattcataagtaaaggaaatttacaaggtttgtctcctcctactacaagtatttttttttctttactcagcttatctccaataaaaatggcaactaccctttctctagtatggtattttcaactgatatcagtagtgtcacttgcaatttgcagcttatcaggcaccacacttttcctaatattttctttcatttccatttcccctagaaaatagatgttgtttttggtctttgctaatttatgttcttttttctatgctttgtactagattgctatgatccaatggatcctaatggaaacattactgtcacttttgatattctccaatggacatcaaatccaggtggctatctggttagtacaatatgtcaataacaactgtgataaaaaccttatccaatacaaaatcataagcaattttgtgttgcaggcaagggtgacaatccaaaactactatcagtatcgccatgtggacaaacccggttggaatataggctggacatgggcaaataatgaagtgatttggtcaatgaggggtgcttttgccacagatatgggaaattgctcatctttcaattcccaaataccacactcctgcaagaaagaccctattatagcagaccttctgcttgaacaggcttcgccagaaagcatgaccgcaggctgctgtagaggtggcatgctttaccctcaaaccattagtccttcaaactcattctcttcctttgaagttcaagttggcactccagaagggcatgcttcttctgcacatgcacctaagaatcttatcttacttgcaccgggtcctggctacacttgtggccccctttcagatgttaatcccacagtttcttcagatattggaggcagaagacgtgtccaagtttttagtaagtactttgtaccaaattaagtgttacaaaaagcccaagtgaagtctaaggttcgagtcaattactatagtttcctggtctctaaatattgtggagttaggcagctgccaagaagcttaattttagtatgaaaagatttctaagctcttctttttatcatggctcacaggaacatggaaatcaacctgcacttactcgagctttttggctaacaaaacaccaatgtgttgtgtttcactttctacattttacaatcctaccatcactgcatgtcaaacttgtagctgtggatgtagggaggctgacaaaagtactgattcttgcatgagcatgaggttggttggttggtggattggtctcttttaataactctatgaatagctttctttaatctcaatcaagtttactcatttgattcattcaagtttaataaaagtttcttttgtctcataaagaatttttctaatgtcatatgatatataacagagaaggaagccatctatcaagctcaaattcagtaaataacttagacatagtgaaatgtagtgatcatatgtgcccagttagagttcattggcatgttaaaacaaattacatgaaccattggaaggtaaagcttacagtttcaaactacaactatcaaagaaactacacagattggaatgtactagttcagcatccaagtctcagacaattggaaaaagcttatagtttcaatagtactttgcttccagctgttggattgggaggtacttcttagttcctacaaatattgaaatattagcttagttcactcattcttgtaaatgttaatgttaattaagcttttgatgttgcagatgaggtgggcctgttttggggacaaaagtactacaatgatttattgttgagtgctgatgaaaaaaaccaggtgggttcagtgagtacagatattctattgagaaaagactttgaatcatttaccttaagaaatggatgggctttccctagaagaatatacttcaatggtgagaactgtcaaatgcccccaccagatgacttcccaatattgccaaatggtagctccaaacataaaccattgctctctttggtccttcctttcattatttttgctttcaggacacatctttaatcaataattaaccataagcaacacaagcttctctttcttttctctttttggatagtcttcatctcttgattcctcctgtacaatttgtaactcatatgaactggtccaactgttattgatatatgtgaacgggtgaacatgcacttattatacatactaagttaaacatgtcaaaaagaaaccaaaatatacaagacaaataccaaagcatatattcttggcatattcatgtcataatatcatttataagttgatataataatctaatagtagaagtattttattagctatttttcaaaataaatacagcaataaagttctcaatttatacatattttgaaaaacaataaaaaaattacaatattgaactttggaaaggttcgtctatccaaattttcaatctttacaaaggattgatttctctataagagtttactcttttctaattcctaagtttatctaactacaatagtgaacaaaaattattataaaaaaggaattactataaagttctgaatttgttatttctattaataatacttaatttgttatagtttcttttgatcaacaatactcatttatctatatcacgtgtgaatttttttttaaaactttttaaagttttacagaaatattttaagaaattaaaacacatatgttacgaaaaaaaaaaataaattaaaagagatatcgatgcatttttatttatatctagaagaatattttaatcttttttatatatattaaaacacatatattacgaaaaaaagataaattaaaagagatatggatgcatcttttatctattatttaaaagaatattttaattttttttttttatatatatttgtataatttagttatttaatatatcttatcaaattttgaaaaaaatttataatttaaaaaataatgttgaaataattgtacacatatattgaggcttcttctagtcaagtgctctaattttctcttgtgaagtttgtgtgtgccactaagaaaattcaagtattcaacatatgaaataagttaatcttggcaagattttctaagtaaacaattcaatcaagccaacaatcaatcaacacacaatgacataaaataaataaataaataaataaaccccacgttagcgtacttgattggaaaatcccatgc

SEQ ID NO: 187291 - DNA, 2114 bp, Cannabis indica
ttttgtaaaaaactgtaaaaatgtaattttttagggttatgtaaaaaatgtaaaaaatgttaaaaaatgtaaaaaatggtgacttatgtaattattcctaagtttttttaaaaaaatgataccttatctaattatcccttttaatacttaacaagtcctgttgggcctaaaacgaagcccaaactgaaaaaccccgagcccataagctttaagattacagcccaaaagcttttccttcctttatttgattttatacaatttgctgagcatgagtcgaagttcatgagctccaattaccatagcagttaacttaaaaaaaactggacttagaagaagacaaggacagaggtatgatatcattgatatggttatgaaccagaatttccagtaattttcattctttggttctcaatttggctttggttgttattggtaatgactctacaattcacttctatgctttgtgattgcttttttcattcagtcattttcacaaacaccttatggtcattgatgttaggctgctcaagttgatgtttttgtgggatttgagtcctttatgtttgtggggtttcgtttatttatttttataaactctttaagctcatctttgtttggttgctttgggattttatgagagttttggtgtttctgagtccattgagagttctagcaacatgagaagagttggagccttgtgctcaatcatggttaaagaccatctgaataaacttacacctgtaaggtgtttaactcctattgttgttcattttggcctgtggaatagtgccactcagtctctatcttcagctccaatatgttccaattggcaagtcttgcctttctgtacttatgtctcttcagactcaaaaagtgaaagtttagatttgtctgtagtgggattgagtcaaaatgctctcattgatgatggtgatgacaatgaggaagagaaggatgaggatgacagtgattgtgaagatgttcatttacaacaattgaattcgttagaacatgagggtcttgctcaagatataaaaactcttgtgcatatactacgggatgaactgtctcgctgtgaaatgaggacaaagctcgacgaatgtggtataacagcctcatcagagttagtaatgcaggttcttgcacaagttcgcaatgattgggaagcatcattcaccttctttttgtgggcaggaaagcagccgggttattctcattccctccgcgaataccattcgatgatttccattcttgggaaaatgagaaagtttgacaccgcgtgggccttgattgatgaaatgagaactcgaaaagatggtcaatctcttgtcactccacagacacttttgatcatgattaggagatattgtgcagtccatgatgttgggagagctataaatactttctatggttacaaacagtttaagtttcctgtgggaatgggtgaattccaaggacttctttctgctctttgccggtacaagaacgttcaagatgcagaacacttactcttttgcaacaaagataccttcccttttaataccaagagctttaacattgtcctcaatggatggtgtaatataattggtagtccacgcgaggcacagagaatttggtgggagatgagcaagagaggcgttcaacacgatgttgtttcgtttgcaagtattatatcttgctattcgaaatcaggtaacttgaataaggttctaaggctatttaacaaaatgaaagcaatggagattgttcctgataggaaagtttataatgcaatcattcatgctcttgctaagggtaggtttgtgaaagaagctatcaatctcttgagaacaatggaagggaaaggaattactccgaatgctgtcacatataactcactgatcaagcctctatgtaaggctcgaaaaatcgatgaagctaaacagatctttgatgagatgttgcagcacaaaatttcaacctctgttcagacttatcatgccttcttccgtgttttaagaaccggggaagaagccttcgtgctcttggaaaagtatgaaagaaatgggctgtgaaccaacttctgatacttacataatgttgataagaaagttttctagatggaggcagctgga

SEQ ID NO: 187292 - DNA, 1767 bp, Cannabis indica
acaaggcaaattatgagttctgtgacttttacaacaatcttagttggtagaattttcacatttttttcctcaacaaataatcaggaaatgattcagtgtaaagaaagaaaaaagaaaaatagctttattctagtacttctacagtctattcaattccaacatatttccaatatcatgatcaataaagagttacaacgaaacataagaagagcataatttttaaaaaatagtaagcttgacataactcaaaggacacaaacataacttttttatgcacccaaaaacaaagttttatatttgcatcaaatatatacaaaaataaagctaccttctatgctccacatgatgaattttcatattcttactgcattatttccattcgtgtatcatattcttaattgctatggtatatgtcactagttatcttgaaccaacaacaccaaaacgaggaagtgaagaagggcaaacaatctttagattgtataaataacattaacatataacctataaaaatttaaaaccaaaaagacaggattatgtgcaaatacaacaagcaatgtcatcttacagtgaatatcaagaattccactaatgcttttccaagaaagagaaggataaagataagtagataaaataacaagtgcaataaaatggaacagctggattaaagaaaaggaaacagaaatgaaaaggacagtccattaccaatgaaggaagactagaaggttttcctgattcttcatctccaagatattcagcaatggcatttgtaaccacaagagctcgaagatactcagctactcccctactgtctacagcatgatccctttgttcgaaccgcttgataacagactcgggactagagataaaagatagaagaaacaaatgattgcctactactacagaatccaagaatcaagaacagtaaaaacagaaaaacaagtaattagtttaactacctctgcttgttgagctcagctaatagtgcactctgctttgctgcgtccttaggattagcatctgcctccgcaatcaaacgctccaaccgcttctcctgtcgcaaaaaaggccaccaactaaaccaatcccacaccatcaccttctcaaaccactttcttacactcgcccataagcccaccaaaaacaccactaatggaaaccgactcttctctccctcttttcccaccaaaatctcagactttccctcacttgcgaccacattgtcgctactttcaccccaacccgattccccattctccaaacccaatccagaaacctcgctctccagctcaatccccgaacttttgccaatttcttcagttttcgattctaaaatggaaccctccccatttaaactcgaacacttggattcttccatctccgaaaccgaagacaaatcgcgggcactcgcttcttgactcaaatttgtattctccggttgcaatgtgcaagaaaccgaccaagtccgggccgaaaatctaaattttcgaaagtccgggggtgaaaagtgaaaagaatgagaaaggaaaattgggttttgactgaaataagcaacataacaagaatgtaactgaaaacgtttcagtgaagaggaagaaaaagaaaccggagaaagtaagggaggcttataaagaagagaagtttgcaaagtggccattgtttttgggatttattagaatcgtttcgcttcctccctctctctccctcaacagggaactggtatatgagtactgaagaagagagaaagggagtttctttgagagccac

SEQ ID NO: 187293 - DNA, 1408 bp, Cannabis indica
tatttttgtaatttaatgtaggaggcccaaataataaggatatttttgtaatttaatgtaggaagcccaaactacattctcatttttatatagttatagatatatatgatgtagtgcatatatgtattctaattatattgttatgtattttaagatcccacattttttataactttagttacatgtttgctttaaattttgcaaaatacatatattgttcctttaaattttctataagtaaataataaatattaaaatcatatattgttatgacttatatacacaattataactaaatacaataacacaaatattactttaataaaacaaattattcatattgttatgttacgtggcttggcacgtaacttctacctagtgtattctaattatattgttatgttaattataatagtgcaattagtacttattaaatacataaaattacactgtgtgcgtttattgctatataatattgtgacaattcaaaaactaattagctgtgacaagcgcgcgattatacataatatatattaagtatatatacacatccccttttatatatatagcataggtacttattccactctatccggaattaatgataatatatattaattaagatatacatacagaactaacttacaaaactaatatttctcaattatttgtgcctatcttggaattgttggcgaggtttgtcgatttcatatgatttattgtttgggttatatctatatatttcaatgcgtgacatatttgatcggaaattgagcgagaatctaaacactaaattaatacaagaaatatatatattattctagattatttgtcattgtgtataacaaattagtatcttgtatgaaatttagatcaaataataatacaagccatgcatgtatatcatataaaaaaatatccattggcagaatcaaaaattattttttaagagctatgagtaatgttaagtttagagaaacttataaattataattgtcattttattataattttaggctattgtaatgatatatgatgaatatatatattgacgacaataaaaaaaaaaattatatcatattgggactgtagtttccaaatcattatccgtcacacgtcagcaatataaagagaccctactctttcattattttattttttattttttttttcaaaactctgtttcattaattattaatgatatttatgtctcatgttttaagtaagagaaatgttaaatgacaccttagtattatattatgtgttaatagtgttatttgtccaattaaatattaggttccatataatttaatataataatttttaaaatatatggctaaacaatcgcaaaatatgtcgaaaaaatattaagcaccacaagtgattaatagcaattgttttttttttt

SEQ ID NO: 187294 - DNA, 5801 bp, Cannabis indica
aaacaaaaccagaatatagaggatcacaatatataagatgaaattatcattttcaatatgaatttataaacatgcatcaagaatcaactggacaacattttactgatgcaatagacagttaggggctggatgaaatatacaaatgatgatttggcaaaaccatttatatagcatgtaagatgaacatatttctttatgtgccagacagctggcagcctggtacaaattcacaaattacatgacatttgcggtattcctcacatgacatacagttgtttttcttttgaaaaagtcattccataagatatacaagcagaagagtcaattatgaaatcatataaacaattaacattatagatatacagacaatatcagaaggtttgatgaatggaaaatggaaaacatagctaaatcagtaatttgtaacaagagaaggctgatattatacatttactcaatacctgattcaaaccacttgacaaaaaaaaaatacctgaatcaaaccatacatccattgtgtctgtcccttttacatactgtgatgctttatcgcgatatttaccaggaagaagatcctccaccttcatgtaccaccaggcatcactacccttttcggctattatagctgccaattcaaatataaaaataataaaattgtattgacctattataggtgcatcaaatttgaagtgggatgattaattgcacagcatatccatttatataaattattctttgtagccatgcacagtatgtgtgtgtgctcacaaagagcagcagagtagagaagtggcacagagaaaaaaatcttgaatcaatctaccattaggagagccgttgctataattagataactcttacatttgatatgattaacagtctcttcattcatcagaggttcctttgtttgcacatgataaaagactggaattggaacaccccacgtcctttgccgtgatatacaccaatcagaccggctagtagtcattgcagaaattctgttctctgcctgcagaaacaaagctcacgcacacaaaagatagtaaacaattttgcaaaatcgcaaggtaccccaagaaaagaagaggaaaaacactataaaaatgtcaaaatgtacaggaaatacctgagatggaatccattttatttgaccaattgcgtccatggcagcttggcgaaatccttcaactgatgcgaaccattgttctgttgccctaaatattgtgggttttttggttctccaatcatatggatacttgtgtgcttcaaaataataaatggaatttttttgtaactgccacatgttgtttatatggtacaacctcaagaataaaaagaaaattgactggattaataattgaaagcttgaaccagaataaaagaagacttaccataagattcttccataataagtgacaaattctcatccaagtatttcacaacagcaacattaccatcagcgagtacatcaagcccattaaattgtccagcttcttcagtgaactttccatcatcgtcaacaggggaaagtagtggcagtccgtacttcatgccagtcacatagtcctcctgaccatgtccaggagctgtatggaccagcccagttcctgattctgtagtaatataatctcctccgataacaacaggacattctttattactaattggatgtatatacctggtatagaaccatacttcagccaacaggtattcattaaatatcattttataaatgctcagtatatatagaggaatttaatcattactcagttttatgtttatatcatcatctgtcacctgcaattttcgagatccgaacccaacagaactttcctcacaacaagctttacactccatttaccctctaatgttgacacaagatctgaagctacaataagaaaaggcttcttttcctccttcagaacatttcccagctgttgttttttatttccagcagataaggaggcatcttctgagagtgattgtacttcaactatggcatattgaagcttagcattcacagcaacagctgaaaattttgagagaagacaagttgctagattataactataaggaagatgaataactcagaacagaacatgactgtattttaatgaatccacgtcatggaaatatataataaacttccagcaaaggaaacagaaaaaaaaaataagcaaacattgtgaaaaaaacattgacctgaagaagaatacgaggaactcaaagcattgattataataaaacatataccatttatgtttgatctgtaatagtgaataactgttcaggaactcaaaacatgtttgattataataaaataaatgtatttatattttatgtgtaatagtgaataaccattcagatatttctatataacgatcaaattggcattaacaagcaattacattttataactattaagtaaaaaaatatacccaccagcattcgctggaatagtccagggggttgtagtccaaatagccaagcacaaatctgggaaatagtcatttaataagcccccagaagctggaggtgcactaaccattctgaaagtagcatatatgcttcttgaaatatgcccttctggatactgcatagtgaaattttgagttgagtattaaattaaattaacataatattttgacttaagcataggcgtcaaacaactcgtagaacttgaataattcattaagtagcacattattactaatgacggggaatgaatgttttattccatatatagtttgtgtgtgttgtgtacatagagaggggaaaaaaaaaaactctacttgagatgattcagtatattttatcaatttactggaaatacagaaatacatcacaagtttcgatttagatgatgaaagaggtttagagcattacttagaaaagggtgtttccaagcaaaatgtaaaacagcactaatataacttgctagagtatggtctctcctgaatacaacacactaatggaagtggccatattcagattaattaaattttcaatgttacattaagaaaaacagaaataatacctccaactcagcctctgcaagagcagttcgtgatgagggactccagtgaactggtttcctacctctataaatatagccttggattgccatttggccaaatacttcaatctaccagtttatacaacaaacaaaacaatcagataactacaaataagatcaaaaaaattatataaaagatacaaagatagaaactgaatacaatgctaattcatgaattgaatgcaacttttacagccacaactttttttttttaaaaaaaaattccaatttaagctaaagataatctatcttctacagtttgtcctatagaaggatttgtacagagtcaacaaataacccagagttataaagatgtgcataaagtgatatcattggtgcagtaatagctacctgagcagcttcatattctggatcaagagttagatatggattatcccagtctgcccacactccaaaacgctgcaacatcaaatagttcttgattcctttagaaatatccaaaattcccttttatttgaaagtaacattagactgcactaaatttagaacataagtttcatttaatttataaattatacataagaagttcgaaaagtcatctggtaataaattcgtgaaaattaggggtgttcactggatcccattcaatgtttttaagcttatccagattcgatccaattatatattggatgttaattttaccatatgatccaatctaattaatttcagtcatccaatctgatccgatcacaattggatatccaatgtttggcagttaattgtaattggattggatcgatgtatgcacaccctaatgaaaatgtggcaaatagttcaaatcaaaactaaaggagagactatacaggggatgttaccttaaatgaagtcatttgagttttgacagttgctttggcaaatttagctgccttggctcgtaactttactggtgtgagatcctttctagtgttttcatccagtgactgcaaaactaataattaaaatgatgacccacatatgtattagaacttttccttagtctcaacaaaacataccataggaaggttggtaatacatccaaaaaaatgagttaaagtggaagtgatccttaatatatatgtcatcatgccacagtagtaagagaaagttgcaaaatacacttgcctttcaactcaattggtaagccatgacaatcccaaccaggaatataataaactctataattttgaagaagctgtcatcaagagaagaaaaaaaaaaggatgaattcatatgaatattgtgaataacataaacatttgataataagctaaattaactagaggtttggatcttaacttttcaaagacaaatatgttgatatcatacttgtattgaaggacacaatcaggcaaaaggctaaacaataatatcatgattaataaataggccaaacaataatatgtagtgaaacacaaaataatagcaggaataccttgtaacgattgatcatatccttcaaaatcttgttcagagcatgtcccatgtgaaggtccccattggcatatggaggaccatcatgaagaataaaattttcctgaacatgcaaaaaaagtcagaaaaaaggtcaagtaacaaaacgttaatagaaccaaggtaaacttaaaaactcaccccggaattcttatcaacaactctcttgaacacctgattgtcatcccaaattttctgaatttcaggctccctaaccaaagagtttgctctcatgccaaaagttgtcttaggcagatcaactgtgtgcttgtattttccatcttcctgctttgcgcctagacaatcaaattaacccagacatgaaaattagtgcatgctcattcttcacaataaatttttcagtaaaagtttcctgtgggacacatttaaaattttaagaaccatcttctaaacaatgcctccaaagcatgaatatttagtaaaagcaaataagtgcacaacaaagagacaccttcagccgctttctttgcagccataacaggtcccctagccctccgctttgtgaaggaaaatcttcagaggaataagtagaatagcttgttgtattaaaaagggtaatacttggttgaagagcttcctttgagatgaaacaagctggcagaagtcctcctaaaagatgggctggtctttgtgacaaaacctgaaatgtacacagcacagttcatcagtagccattcgccactttagaaacaaaggaagtcatagagtttttacaaaaaaaagtgtcagattcaaatcgtgactaattaccaacataacattaaaactaaataaataaataacaataataataataattgcatttatagaagcaaaagttataagggaaaaaaagaagaagcaaaatttaattgaaatggttcacatgttcttatacctttgtaaaaactccactaccccctgagacacaatggaaggttccatgtatcaagagaaaaatttgaagagctctacatggctctaacaaaaacttcatttctacgaagtgcacaaatcaactttttgcatgcaattactatcaagccttaaccccataatagagttttggtaattggattaacgttatgtttatgattgaaatctattaaaaaactttttgcatgcaatttgaattttttgaaaattgtacatttagtttcaatgaagcttatgcctgtaataatatataatactgatttttgtagaattctaaattatttatcatctataaaagacgatgaagttgacatttggc

SEQ ID NO: 187295 - DNA, 1681 bp, Cannabis indica
cggataaatgagattcgtgttacttttccttatatgaagcttggtcaggtcaatgatgtagtaaagttaaatctagtgtgctattttccaataatttatcaaaggaaagaatggaagaagtcttggctgctctggaactttcaaagatcaagggggatgaacgacatctcggcaacccatttgttttcagtaggaggaagaaggaagattatcaaaggctgaaggacaatatgcagaaacgattggaagggtggaagatgaagcttttatcgtacgcggcgagggtggtgctaatcaaatctgtggccgcttcccttcctgtttacaacatgtctaccaacaaggtcccaatttcaatatgtcgagatttggatgtgttagttagaagatattggtggctggggcacttggaaaagaatcggtttctggctttgagatcgtgggacaagatttgccaaccaaagaattctggggggcttggtttgaaacgatttgaagatatgaataaagccttgctagcgaaactggtttggtctttgggtcgaaaagaggataagccataggttaactgtttgctaagtaaatactgtaatcagcaaaatttttggtcagtctctccaaagagtaatgattcgtatctttggaaaagtttgttagaagttagaggtgttgtgcttcagggttttaatggtggtgacagctagaggagattctagtgatatgtggattcaaccatggattccgtggttgagttatgaagagtttcgggatctaatggaaggtttgaacagacgtttgtttactgtaagaacaattgctgatatatcttgtgataatgtttggaacaaagaaatagtcttccaaatctttggggaagaactcggtcagagaatagtagagataccgagaattcctctaagccaccatgatcaggttgtttggaggaataacttaaatgggatttttacgttgcagagtgcctactgtgcagatcaaagctttagattcagtccaagaagtaaaatctggaagtggatttggaaatcggatgttcaccctaagatgactatgtttatgtggagggtactcaatgaagtccttcctacaagagataaattacctttctctcttgataaagagtgccttttttgtggtgaaggattggaaagctgcttacatattttctgggagtgtagtgtggttaagattctttggataatgggggatataccaatcttctgcactaacattccaggtaacaacatgaaggaatatgttcagaatttattgtcaatcttccctggtagtgacagatccactcttatcaattacttgggatgtttattccaaaatgtctggaatgtgaggaatgataagctctttaagggaagtaatattttctttccccttcttcaaaagaaaatatctgatctctggaatgaagtttccaatgctgagggggctaaggaatatgttatgtcgattcctgaaggcatgcgaaggaaggtggactctgctaatatcattttgatgacagatgcttcttggttagaagtggatgcaggtttagcagctgtaatggtcaatttgtcttgtggtagttgggctgtcaagatggaaagagctaaagcttactcggcggtcgaagcagagacaaaagcagtttatatggctctctcgt

SEQ ID NO: 187296 - DNA, 4555 bp, Cannabis indica
gtctaatttatgtcataacccaggaagaaattgaagaactggaacgtgagaatcgcctccatagccaacaggtacttatcagaaagcctggatcggtgtagatttcttcttttaatacttcttttttgttatttcccctgctatgtttgttttaatttatttttgttatttaatacacaacaactacaggaagccatgttgaaggctgagcttcgcaacatggaccgaacacagaagagggaaggggtggatttgacatatttgaaaaatgtcatcctaaagcttcttgaaacaggtatttgggtgaatgattgatgtatgaatctaaaaattaaaccgttttatacccactcattttcttcctaacagtgtgctcaactaaaaagaatatttcattattttgagattgaaaaggcttattatagtctctattgtaaaaacacaggtgaagtggaggctcttctgccagtgattggaatgcttcttcaatttagtcctgaagaggtgatatactatacttattgcattggtatcttataataacatgctgttgttttaagcgtggaatttatttagtatgggattagtcaaaattgtgagtttttgttatttggaacgaaaatccgttgatcacagggggtgtagtagtaaggttcttctttctagagaatgaaagatatcatacttctttttaaactataagatatcatatgggaaattacaatagcatgagcaacatttgagtcaatgtgaaatacaattatacaataggttttaataacccaatattatccatgtcctgaattactactggtgttcatttgctaatgcagatacaaaagtgtcaacaagcctatcgagcatctacagatgctgttccaagcccatcgggtgatgcttcatcaaaatcttctggctctcttttctctagatttgcatttgcataattgcaaaaaggatacaaagaattctttcgttgcttgtctattgcaatccagggcagcaaagttagctgcttgttgcctttggaggcggagcactgcatgctgtctcattatcaacatcagaagagagttgtctgtcttggtacaacgttatgcaaaaccacaggaaagtgtaaagagagattggcttacataaaattttagagggaggaggaaggaacattttttttgacagtgtgtatatttatactgtccaagagaattaactgtcgtaaagctgattctttgatttttgacaattattttttagtacaggtgaaaaatgcttatagattttgacatagtattgtttggaaataagaccaatatagaatgaagggtactattcagaccaattaagctcagtatagaaaccccaagtaatttggacttgaggagtggctctagattcgatcagtcttcattgtgttcataatgtataatattaaactgtcttatatgttttgaccattatttgtacactcttctcgcactacttgttcattgtgaacctttaatattgtttgtggcaagttcaattcatgttgatgaggattgttataaagcacacgtactgtcgagtcgactataatatctataaatatatacgtggtaaaattgttgacaatgatgcaaaattcgtacaatcttaatcaatttgtcggccaccatttgtaatataagaagaataatttagtctatacttttttagcaaatagttgtaaattttaccctaaaagaatatgtttctgttaataatagcaataaaaatggatattttctgataccgactgagaagtatattcccttctggaactttttcttcagtcctttttccaactttttccaaccaaaaaaaaaaaaaaccacaaagaggaaattttgaatagtagtactttatagttgaatatgattcccttcaaatataaaaaagagtacatttgaaattgaatatgattcccttaatgagctaagctaacacagtagtgcatagagattgatttgattcattcatcccttaataattagggaactaaaaaactttgttgattattattactactctcaaataaaaaccatggccactccaaagaaaaaagagcaaaatcaagaagaaacaaatgctgcaaactctagtactagtagaatagtagaatctgaaaaaggggtatgattcaattcaattcaattcaaatcaattcaagcatgcttagcttgaaaatctttcatgaaagcaaccaacttttcaactccagccaaaggcatagcattgtaaatagaagcacgcatacctcccactgatctatgccccttgagttgaaccatcttctccttagcagcctccttaacaaactcaccttccaactcagacttctcaagtgtgaatggcacattcatcaatgacctcactgacttctccactggacacctgaagaacccattgctctcatcaatagcattgtaaagaatctcagctttcttctgattcttcttctctacttccttcaaaccaccctgttccaacaaatcctcaaacactaaaccacacatgtaaataccataacaaggaggagtgttgtaaagtgagttgttctcagcatgaatcttgtaatccaacatcactggtgtctgttcttgtgcattaccaataagatctttccttatgattacaatggtgactccagatggtccaacattcttctgtgctccagcatagatcacaccaaacttagacacatcaactggctttgaacagaaatttgaagacatgtctgcaactaaaatgcctgtggagttttgtggtgtcgggtagtttttgaactcaactccatgaattgtctcattggcgcatatatgcaaatacttggcatctgggttttgttccaaaccctcgaaagttgggatctttgtgtacttttcagattttcctgaccaaatcaaattagggttacagtacttcttagcttccttaatagccttatcaccccaagacccagtaacgagaaaatcaacagggtcacttggtgagcagagattcaaaggtatggcggcgaattgagtggtggcgccaccctggagaaataagacagcgtattcatctgggatttcgagtagggttcggagatcggattcggctttttgaataatggaaaggaattcttttcctctgtggctcatttccatgacactcatgccagatccacggtagttgtagagctctgactgagcctttaagagaacattttccggtaggatggctggaccggcggcgaagttaaaaagcctttcttgggagtgagctgggagtggtggacgatcttggatttgggttgaggtggcggcgcatgagatggagattctgcggttggggatggtgaatctagagaaagcgttaaagggtttaaagattgaggttttgggaagttggtggtgaggttgagttgggttttggaggagaagtgagtgtggtgtggttgccattgccatggtgattggtgacggctctcagatttgaaaaggcagagagagagagagagagaaggggtttgtttcgtagtggcgaagatcaaagttgctttgagtgtgaatttatataaaaagaaattaagaaataaatataaaaatcagatcttggaagtagtgatagtgccaaggactcagggcaaggcaacaagtactatatcattttcgatggggttggttggtttggtaggtaaaggtaaaaaggttgactaaggaagccaattttgatgtcgttttcatcacaaattcatgtcgttgttatcacaaattgatgtcgttttttaccacaaattgatgtcgtttttgtcaaagaaacagatgtcgtttatgacccagatagtgtcgtttatgacctagctagtgtccactaaccaccactttatactaaatgggatattttaatatagttagtatttcttagtctctctatcaatatgagagagttcaaatagatgatgatgatggcaaaacaaagagaagaaacaaaaatgaagttgagtattattattgccacattattgttcaaagggaacaataaaataaaagtaaaattgattaaaagacagtccaaagtgaaaaaaatatcgtagtaataataataagagagagagagagagagaaagatattgttgtatgctcaattggaacatagacattaagaatggctgtaaagcaatgaacaaccaaaccaaccaactaaccaatccggctgcaaatttagaatatatcgaattcccaggccgcaaccttggttgctgctgctgctgttgttgatgctgaattattatgtgcacatattagagtagagagtagagtaaagtagagtagagtagagtagtcatgagtcatgagtcatgttgttgctgttgttgttattgttaagagtagagtagctgctgctgtaatataatacatgccttcctctcctcttctgctgctattgtagttgttgagtcttctgcaacagaaaatttgctggttcacattttgatgtgtatccaaacttagatgtacagtacttcctatgaacccctgttagctttcctgtt

SEQ ID NO: 187297 - DNA, 1034 bp, Cannabis indica
aacaacaacaacaacaacaagttcaatgaaattatccaagattagcagcctcagtcatatgtaccagtaaaatctcaaatcaagtttctggattttctcaattagaaaataacccatctaaaggaaatccagactttgatctttcttaaaaatttcaggttctcttgtttgtgattgtcactttatcaatcaagtagacaaaaaaaaaaaaaaagacaatcggcattaacttgtactcggtaatgtgaagagcaatggatgaagttaacaaatcatggtgagcagattttatgttaatatatatatatatatatatatataaataaacactactcaaaaacaacaacaacagcaacaacaaaaaagtctggtttgtattcttggaacaatctgcattatttatttattatttatttttaaaaaagaaatcactcctttttctcccgttaaaataaagtataaaatagtaatagcaccaattgaaaaggcaaactaatttagaggggaatcaaagttgaaaacttgaaagagaactacaaagaaaatacagggcacatatcatagtaattaagaataagtagtagttgataaaataaaaaagagaacctggttcttcattttctgtttcaaaaaatggatcgaatctccatgaattttgattcatttccatatcgtgaaatatactctaaaaacaagtctaaagatatggtggaatagcagacattctcaacataatttctacaaacatttgttatgattgtcatcccaagtgaaataatttattaagtgtattttatttttatttatttttttcaacaatcagtggaagagtaggtatgttgtttggaaacagggttaactaaaattcgaacctgggtgagtaagtttggtgaaagaggacttaaaagacaagaagaagaagtacacactccaattttttgagctgaaaattttgaatttcataagaaagtaagatgaggggtcccaagttttgaaaactcatcccattaccttaaattctttttttttttttt

SEQ ID NO: 187298 - DNA, 1587 bp, Cannabis indica
tttttttcccttccttttctgcgacttcattaaacatccacagctccgaaccttgagccagaaaggcatccaagacctgaacagcatagatgtaaaaggagtaacttcacccaacttaaatagattattctacgatgtgccattatagatgtaataagtaaaagttctatgattggcaattgcagaagtgcgatccattacaaagaatttaacacaaagcagtaaactgtttcggacatggctgagcatgtactattagcatgatcgcagaaccctttgcccttgtgacattaccataatcatatcttccatatctcgtcgccaaccacaaaaaagtatcttttcttctttcgttggaacaataaagtctctgggtagacttcctctccaaacctgcagcattcaggcgaaaaagggaaattaggagcttcaatagaaagacttaccacaatcatatcatcaatgtccctcctccatccacatagtagaatcttctgtggctttcttgctggccgagaagtgtgtataaatgatgcctctttgacctgaatgatcaaagtgattgtacttttgtgagtttaaataagggcatccacatcccccatttattaaaactccactgtctgcaacagcaagtcatgcaaaacttttcatttttaaaacatgtattccttcctatttcttattcctcaatatttcctcctctttaaactttgagcctggatatagctttagctgaagtggagcatgccaagcctctgacagctcattcagcaattatatttttccttgaataagaactgctggatggaaccgttcctccaatttagttcataccacaatagtgcttgtacacaaatatttcttgagctcaatttttagtcaaatttattctcaatatgaccaaaattttctaatttaaatacaaatatattaaaagaaaaacaaaaataattttgactaaaattgtggtaaaataaatcttttatataacaaattttaatattaactagactaaaggagggtaagcaggtaataaaacaaacatcagaatcatcaggattgagtattaagggaattgtgaaagtaccataggtaaagcagctggagcatacgtatcatcatcctctgctataacaagaacttcatcgccttcttgtagaacataggaatcgtcaggattcagaatgatctttccatctaatgatgcaaccttgaccccacaaggaattgcatcaggaaaacttatcagcacattttcaaaatgcatgccatccaactgttgccaccttttgatgtagaactcacaattttcaaacccaaggatatcttcccaaatctgtcataacgtgctcatcattgagaaagtaataaacttgagatttaaaaaaactaaataaaaaacgaaacgaaaaagtagatatgaccatccataataatgttagaagtaacctgcgcaaggcctggctgtctagcgcattgaatcatcagacgaccaattacatcatgagccacaacagtctcacaaggtccccaccacaagtttacagaacctcatgtcaagatcacttagttcaaccactatat

SEQ ID NO: 187299 - DNA, 1574 bp, Cannabis indica
atatttgaataattcgagtgtgataatatacatttaaataatgtattgtatactacataaatttcaaaacaatcatactgcgataaagtgatgaactatttgaattctgatttcgacaaataaaaagtaattataaataatgattaaaaccaatcactacccaacaattttaaatatacatatttataaatatatatggttttatgaggctacaagatgggaaactactactttatgtgagcatgtatgattgtgtacgattctatgtcattgtctttggtctctcttctctttttttgtgtttgctaatgttatatgcccattgttatatggtgccttttctattcttatgtccaaacacacccattaaataggggtagtggttatagtggagcaccactacatttagacctttcaatctttttttttttaattttcttcttcatcttattcttttgttttctttcttttttgcttgcccattttcttgttactgttttttatgtgccttcattaggttctttcatgagcaattgtttcattttgggaccattcatggtgaattaagactattgttcttttgaagaaaggcttgttgagttttggtgctcaaatttttcatttagtgcgaaaaaaagtatagttaaattaagagtattggtattgggtatcagtagagcttagcacttctaaacacgtcgcattgcgattgactaatgatactctctaaaaattattatattaaactatataagatctaatacttagaccaatagtgatattaacacataagaaagtactatgcaccactagtacattttaacattttttttaaaaattaattagaagattttttctcacttcaaaaacaaaacaaaacaattttaaaatcatcattgttagctctttcttcttataattctagccccactattacaaaagacaaaaacaaataaaccatacaactaaaaataatgccaagttcatgagcaagaccactaaagtttttgatgttaccttgagtgcattatcttatcaaatgagttgtcatatattcattggttggacatggtaaagacatgagaaatggggcatgggattttaatccttacaaaggaataaaatccaaaaggtataaatggatggatcatcacataaatatgtgttttctttcttagaagtccataaacattattaaataaatatgtgcttagtgatcataactaaatagggttaataagatgttaaattttgtaaaagttattggttagattgctcattttattaaataataaaaaagaaattgtattttttaaaatagtataaatagacattgagtttaatttttgacaattttatttttaatacaatcaacttgaagaaaatttctagtacgaacagtagaatacgtaactagttttgtcacaacatctctatatcatgttattattaaggtttattttgacaaaaaatcaattcaatgtactatttagtattattttaaaaaatacaaaatctaatttgtcattttataaaacagagggtccatacaataacttttataaaatataaga

SEQ ID NO: 187300 - DNA, 3067 bp, Cannabis indica
actattggtcactttgtggacccattacccatactcaaagctgaaaaacataaatactcatctcctcttcttctgtgttgaattaatgttgaaatttggaaattaatgtttacaaagtcttttttcatatattttagaatattgatattgggtactagtggtacttaattagtatcacttagagatagtgtcatatgtttagttagtaatattctttaaaaattattaccttaagttatatgagatctgataattaattgtatcaataataatataatactgaggagagtgataaacatcatcagtatattttagcgtttctctatattttatatagaaatactaaaagacatgagtgctagtatatgtgtaaggtataatattgctattagtaggataatatcatatcctacttattttgctttaactaagattatataaaatcactaaccaattataaagtgtcacctgataattgtactaggtaccttagtgccccatattaatattctattttatattgaccatttctactagctacaataattgtgctaggtaccttagtgccccatattaatattctattttatattgaccatttctactaggtacaatagtgtctaacaccactccaggtgacactctataaatgactagcaatttattataattattattaaaataaaataagagaccctacataaattgtacttgtagtaatatgacacctcataagaatgcactactatctaatactatcacgaggtggtgccttacaaatagtattagtgtcatacaaatttttcgaagcacttaaataaacgagtttaatcgcatgacacgtgtacaaagtaataaatgataaataaagtaagactcattaggtcgcataataaagaaataaattcatataacaatcccgaaaagacacttcacgaaatattggcaaaactatgttaagacctaatttggtcaaagaagacaactctccacttcagatattaaatatatttgactactcgctcaaaacatcctatctcaagaatgctttggcaacacactctacttgaggtgcctctcttcaagaaagaagataaccatgtgtcttgcataggtaagaaatggtcaataatgctgatttggctgtcgaatttatcttgaagaagcttaatttgatctatggtcctttcgataagcttttagagaagaatgtagaacaaattctgctcgactgaaacatgctttgaccaagtcaaagcaccagttcatttattttttcaaaacataagtaggtatttttatttcttgcctatgcataaacatgtaaaacatagggaaaatcacattatataattgccctttagataaaaatgaataattgttattctacttctataaatagcaatgaaaataatagttgaaggggacataaaattttgtatatcaaatccctgcaaaaatttatacacaaacactcagagaaataaaagtgacttgtgaactacgtagatttaattacaaaattacgtaaaaatccttacctttatttaatgtagccattacatttcaagtataatttattacataattatttcaaagtatcaattatcaagacttatttatgttaatgaaattttaaattaacagttttctgttttcattagagtttttgatcattaaaactcataaacacatctccctaaccacgatctgtaactacagaaaatgatcctcggaatgttcatatgaaacaggaggaacatgatagaatgacccataggtctggaaaagagccctaagaaactcatcctgtgaatactgcaaacacatgaagaggccccaatgtttcaaccatggaaagacctaccattggtgctcttgagatgacgagaaattttgatggcgcatataatcccacaagatatgtctccattatcaaagtagagaatcgacaattgtaataaaggttggctaaatccaatcgaaggaacgtaaaacttgagcgtgaagcaactgaggcccgcacgactgcgaatgaggcgttacctcaatttcgacatccggaagaaaggccctggggatctagggcatggataagttaaatgtccctcttgtgaatgagaatgtaccccacataactcgcccccaagattaacaacacgaggcaacaagaatgtgccaattaatctggaaggtcattttaatcctaacggttcaaaccacatggaaatgtgacctgatattcttgaaccttctcatagaaacatgggaccaccaccttcaccaattcacaatcctccaccaagcaaacatcctcctcctagagaccctcataggtcgattaggagtcacatatcttacttgtttgctcaaaggagtcgagcaagacaagagactcactcacatagaacaagttcgaacaatgttagtaacaaacacagggacagtcaatcccaacgtcaatcttccagatcccgcaccggggaagtatcacatggaagaggtaactctccttgccaaaatcatggcagacaacgcacccacgttatctagaaagttaccactcagaaagtattgttggccaggtcgatcaataatatgatcatgccccaaatgtattagtggaaaggcagagaagaaacagagaaaaagaaagtcatcttttactgaatgagtgaaaagtgaattgaattgattgatacaataatgttcagctagacttatatagcagtgtacatcaagtaacaaaaataacggtctaagagcccccttcaagatggagtgtaaaaaattttgacactcatcttggaaataagatcatggaagtgggatggaaacagaggcttcatcatgatctctgctatattggatttggacggaacatgatttgttttgattgtaccagtgttgatcttttcacggatgagaagacagtctatttcgacgtgcttggtgcgctcgtgatagacgggattctctgatatgcggagtgcagctttgttgtcacaaaacagagtggagggaagttgtatgttgatgccgagttctttgatgatggagtggagcc

SEQ ID NO: 187301 - DNA, 2550 bp, Cannabis indica
ttccttttttttttccttaatccaacgggagagaaagtgtttggtgacgcagaaattcaaattaaaagatatagtttttgtggaatcataaggaggagaagggagaaatatacgaaacccagttgttgaatctggccaatgcggtctttgagaaggccgcaacgagaaaaacagcaggagaagtatagatctgaattgggttttgaatcgggaaggcattgtcggtggtcggtggatgatttggggaagtgggttcggatctgatggtggtgagtttgaggctatgggcgttgttgttgctgttgttattggtagatgtttctatagtttcgagttggggcgttggttcaatttgtgctagcgtgaagaaggggctgcataaacgacgatgcagcttcgcttctcgcctagcatgagaagcatcacgatctcaagcaccaatggctttattgacttgatgaagatcaaggtcgcagctcgccatatctcttacagaaccctttttcacaccattcttattcttgctttcttgctgccatttgtcttcattcttactgcagttgttacccttgaaggtgtcaacaagtgctcctcatttggtacttttctcaatcaactttgttttgatcactcttgtatttgatagatcttgattgttgttccacatattggtttctttctctgaatttaattgttttatcatatgggtttgttggttcgtttgcctgaattttgattgctttgtcatttgggatcagttcccacatttgttttttgctctgagctttgattactttgttattaggttcacttcgatttgaatcaagttctacgtattagtttatgtggcatttctagcaatttcattcgtgtgttcatgttgtggtgttctatggtattggcattttgtatcactagattggattaatctgttcatgcaacttctttagtgatagcttaaagcttcatctcatttggctcgagtagtcagttcaaattaggataaactttaggactttcaaccttaaattctgcagagcaacaacaatttacttttgactcaagttgtcatagaagatcaagcagcatttcatcgattattcttctgcatggttttttttttaattcaatttttaattgtgatatgcataatgaaatgtggtgattttgattgctgtacttcaggtcttctaagatctgtagtggagaatggtatatgtaatgtggtttgtgttgatttgaatttgaatctttgtatatcttctcctttgagaacaataatacgcatttgcgagtttattcaaagctatatgatctttctataatcatgctgctttttatgtccctttctctttattactttgtttctttgatgatggtcatcgacttttatcctttaatgctgtaatgatgagttaatgattttgtgctccttttatttcatgctcagattgtttaggcagacggttgggaccaaggcttcttggtagagttgatgattccggggtaaaacactttctctatgagccaagttttttttttttctaatttccttttaagctgaattctttattttgttttgactaacaaattgtatttatacgtttttctttctctttttgtctagatctttggttaactattctctttggtgatattttaagctgaattctttattttgttttgatggtgcagcagaaacttgtcagagacttctacaaggttcttaaccaagtaaacgctgaagatataccaactgatttgaaattgccagattcatttagtaatcttgtttccgaaatgaaggacaaccaatatgatgcaaagacctttgcttttatgttaagggcaatggtatgttacatgtgccagattcattttgtcacttattttttatttttttcaaagcaaatatagtttttcattttccctttgttttattggataatatatgtaatctgcaaggattccttgctgtcgtaaatctagggataaattgtttcttacaagtgcttgcttattattgcacagatggagaaacttgaaaaggagatgagagagtccaagtttgctgagctgatgaacaaacattttgctgcaagttccatacctaaaggaatccattgtctttctcttcgtttgactgatgaatattcatccaatgctcacgcgcgcaaacagttgcctcctcctgagttactacctttgctctctgacaattcttaccaccattttatactggcaaccgataacattttggctgcttcagttgttgttacttctgctgtccagtcatctaaagtccccgagaagatagtttttcatgtcattactgacaagaaacatatgcgggtatgcactcatggtttgctctaaaccctgtatcccctgccattgttgaggtcaaaggtgtccgaccagttttgactggttaaccagagtaaaaatgttcctgtgctcgaagctgtagagaccaaaatgggataaagcgtaatgttatcatgggaaatcatgtagcaggagtccgaaatctcagtgatacatctccct

SEQ ID NO: 187302 - DNA, 5146 bp, Cannabis indica
aaatagactaaaaaattctcttgtaagacaaaataaataaagaatctactgaaacactcatttaaaagtgcactgtagactcaccctaaacttttaagtattaaaagttaaaagaaacactttttgtttcactcaaataaaataaactaaataagaaaatttgtgtagtatatagtgtagtaaatttttatttattttgaaaattgaggtcagtgtactattttatattattttaaaaaatacataatttaatttattttacaaaataaatagttgaatcaataacttttatataacacgtaaatcaaaataatattaactatttttttaataactaaggatatatcaccacttagtatatagtaaaataaatatgagatcttatatatttatatttataaatattataattatttacattaatatcacaatatataaatgtttttagataatgatatggatgatgatcaattccccaaaattataattaaataaaaaaaaaaagtatgaacttgaaagtgaccccacaatctagaaaaatatacaatataagaaattttcctatgcaaatacatgcttataaaatgaaattatagtgaaggagaaaggaaaatacttagaaaaattacatcatatctttatattagattaattaaattaaactagttattgtttttaattggtttggtccttctctatatattaccaaaactcataaataattaagactttgactctaaatcaagaagaataaattattttattgaataatgccatcattcaacgttactgtcaataagtttggtaagattaaacaaattcaagcataaataaattagtgttattattaacaacaataattaaatgtttttgttactttatataatatctagggtaattagtagagtagtaaatatattaaattttaatatacaaaacgtatttagatataaaatggtaattagtatttataaattattaatgtcttgtttgttaaaattattagtaattataaagtgtaattgagatctcttaatatattacgtccaaatacataattatagtataattacgtggttaaacaaatatacaaaattatatgattaccttcaattatactcaattctaattcttttctgattttctaaacaaacctgaaaatagtatataatatagaagatttatctatatcctttgaatgttgttgctttccattggtatttatagtagagtgtaatgattttataagattggtaactttaaagtcatgtgtgaaataatcagtcactcgtgtgttaaaaacaattaaaatatatatccatatgaaaaagtgaaattgtataatttcattcaaattaatttcaggtccttaataagttcaggtattaatttcatacttaatgtttcatatttcattttagttaattattatttaactactatgaaaagaaaaatattaaagggtatttataatgtctaacattattataaggtttaatataaataaaaatgataggaagtctcaaagttactagttacattttaagtaaacgggtacttagcgaaattgtggacaacaaagttaagagatctaaaattcataaaacttctacaattagtaacatagttatcaatttcttacatcaagtttaaagaagtgcttcaaatcataactatttgactcggacatgttctaaaagtcaaagcatttcgaattgtttgttgacacagacaaagtcaaggaaacctttgactgctttaataattgtgttagaatcattttccataataacaaattacaaacctctgttcgcaatgcagtagacaaaaaaaatacaaatccttcaatacaatacaatggtggagatgctttaattagaaagtctctttttgtagaagcttatcaagctaacagtaatggtaaaaactaagaacaaataaagactttaaagaagagagaacagaagaagaatagctcgaaagcttaactctaataatgagctaaggcctttatttatatgcaagagaatacaaggcaggtacaaacaattcagttaaaataactgaaacaaactaattgaaaattacaacagtttattggttaatattccccctcaaacgaaaaggggtaacaaccattttgagtttgcctttgagatacatgaaccgatcagtagacaaaactttggtgagggaattagccacctgatctactgctgggatgtatctgaccgaaagttcttttgcaagaatttaatctctaacaaagtggagatcaatctctatgtgtttggacctagcatggaagatggggttggctgcaagagcagcagctccttgattatcaacccaaataactggaggagaagcaggtgatatgtgtagttctgacagcaagtgttcaagccattttatttcagcagctgtatttgctaaacttcgaaattcactctcaatactcgatctggcaattacatgttgcttctttgctgaccaagagacaaggttacctctaagaaaaacaacataaccacctgttgattttctgtcatcaaccgcactggcccaatcagcatcagagtatgcgcaaatgtccatagatgttgttggtctaagtaacagtccatcagcaattgtccctttgagatacctaagtaaccgtttgcatgcttcccaacgagtaacagtaggagcatgaataaattgactaagtttgttgatgatgaacgcaacatcaggccgagttaaagtaaaaaattaaagttcaccaagagtacttcgataaagagtaggatcttggaatggatcaccatcggttaggggcaattttttatgagagcttgcacgattaggacaacttttgactccatcaagttgtcatctagtaagtaaatcagtgatgtacttacttagagagagatacataccactagcatctctgtaaatttcaatacccaaaaaataatgaactggacccaagtcttttaaagcaaatgaattattgagattagtcaccaatttggagataagggtagagttttgtccagtttctagtatgtcatcaacatacactagtaagatgatcaagttggaacctgtaccatagataaaaagggaggtgtctgacctagaagcatgaaatccccattgcaatagtgtgttcctcaatttttcattccaagctctaggagcttgcttcaatccatagataactttgtgaagatggcacacatgatttggtctagttggatcctcaaaaccctttggctgcctcatgtagactgtctcatgcaaatcaccattcaagaaagcattactaacatccaattgtttgactggccaatctgaggtgacagcaagagaaagaactgttctaacagtgacaggttttaccacaagactaaaggtctcttcataatcaaccctaagagtttgtagataccctttagccactaatattgacttgtaattatttagagacccatctgcattaagcttaattctgtagacccgcttgttgtcaataacatgcatatatggatgatatggaacaagagtccaagttttggacttgatcaaggctgtattctctctctgcatagactgaaaccatttgggatctttgagggcttgctgaactcaccttggttcagttgggaagagagattcttttagaggatatctagtagccaattaactacttctctcatatccaattagttttgagatgaaactccatgtgtcttaaaatctaaaaaacgatccaaaaaattgaatcaaagtcaaaaaaagacacttataatttggagattgtgggccaatgtgtggatgttagtgagtcacacacagccatgtgatacaatatcaattgtatcaagacacactattcgagttgatgccaaactctaaatgtatttttcaagacagtgtcgatctctaattgaactaaaattctattttcttattccatatccataatacttacacaattataaatttatatgatttcacactaattacaaattactaataagcccatacactctttcatagtacagtagaacctctatttaagaatacacttggaccaagcaaattatattctaattgagagattataactaaatagagttacactagaaaaaaaaaatactaaataatatcaatgtaacaataataacaataaacaatcattaatactatattataatagaggtatatatattttttattaagatgtaattattcttatatagatgtaaattttgttaatatagacttagaaaatgtataattaattacaatttaaaagttattcttatttataattgactcaaattcaaacttaaattttttataacaaattagaagttattatggaatatagtaagtttcactgtataacactatgcatctttcaaattacaaagcagctactttatactcaccaaatttaatttctttatccttttcaaaaaaaaaatgaatttctttattttattttctttttcaaattttgacgcgttgcattaacaagttgaaatatttgaacaaatatttaactgtatattacgcgaaggtaggaagaagacgtgtaaagaagcttgcttctctagatggaaagcatttcatcatgtgttatgtatgaatatttcatattctatccacttttactatatttggctttggcttaccaaatcccatattttgttgcaacaaatttcaattctatttttcatttgaagacaatttttatggtgacatatttgtactttttgatcatttacgggccaaatgtgctttttttagttagttattagtcactataaaaaactgttacttttaatgataattttttagtctacaacataaaattttttgtgactaaatgtgacttttggtcacaataaaaatttacttgtgactaaaacatagtatttaactgcaagttgtcactaatttaattttaaatctacaacaaattgtaattttttgtaactaatactttttaaccacggtacactttagttactaacattagaaataataatttataattagtctacaacttttttaactttagtactacaattttttagttgttagcttaaaaaagtaaatttttttagtactagggtacttaaaa

SEQ ID NO: 187303 - DNA, 3242 bp, Cannabis indica
ttttttttttttttggtttctatcattgggggaacttgctgaaaaccctagacagaggaacaaggaagaagaagaagaagaaaaagaatacgaaagaagtaatcgacaaatggatttggaccagtggatctcgaaggtcaaggaaggccagcaccttttggaggacgagcttcaacttctctgcgaatacgttcgtgttttttcttcctattttcgttatttttccgaaatgttttcttcgctttgtttcttcgatctattttgatcttgttttgctcgttttctgattgcttgtctagaaaagttcttcgaacttaatttccgagtaggatttatttgccggggtacttttacgttaatgtgtgtatatttgctgtttatctccgtggagatcggagaaaatggggctttaaaattgcatacccttgttttttgtcaaatctgataatttagatagaaatatgctttcttatttagagctagcaagagcaaccgaatttaatatattcattgtttagtgaagacggagggcataatttcagtgtagtgcaaacagtatttgttatcgaatccatgggtgccacaagaggaactaagaggtgaaagtaactggttgcgtttcttgattggtttcttgtaggtgctacatttccccaaatttattattggatgtgagatctatagaattttcaagactaattgagattcttgaatgaatgacactgagaaatgagcaaaatttagttgtttgaaatagtggagcaaaatttggttcttttttccattatggttgatccttttccaggcattgcttcttgactcagtttgaatgtttgattgctccatgccctccaactgttacgatgcttaaacctctggcttggcagtcttttactctactagatcaataattttgaattgcttgtggatggagagctaattgtagggccttgcttcatatttacatgattcctgtgtataagggcatataatatagctgtgaactagaatcttcattccacagatagctcgttgcgatttgaagttctgaagtctggagattacgtaaacttgttaatgactacatatggcctactttgaaagccttagatattgatttatttttaaaaatcattgaacattctcttccaagtagttacattttgatcaaatttgaagtggttataattcatatggtgtggtggctaatgtaattactgttatggttaaaagtcaaattctgaatattgttttatgtctatgtcactgtctgaagtcacaagtgatcttcttggatttgatatttaataattgatacttgtgtattaaatggtctagaaatctttttttttttttttccaatttttaagtatttgatgtgttttcttacatatgttcatgtgacattttatgagcactatttatatatttaatatgatatgtattgtggtaattctctctctgaatctcttgtttaaactacattttataggttaaagagattctaattgaggaatctaatgtgcaacctgtaaatagtccagtcactgtttgcggtgatattcatggtcagttccacgatctcatgaaacttttccaaactggtggccatgtcccagagaccaattacatatttatggtatggtatatgcttcttaccatgaatgcaatttaatcctgtcatttcagaatatctgttttccagtgtgcttacaatatttaaattcttcacagggtgattttgttgatcgagggtacaatagtcttgaagttttcacaattcttttgcttcttaaagctaggtatgcttcctatatgtgcatatgcttttctccgactattttgttgaaacagggatgctattgttgtgtcttgcctttgttacactatgttcatttcaacatattttgcacgttcttcctgcattctagctgtggatagtttttggttaacaagatgcatctacaatcttttttaatgattcaatttcttgaaatcataatttgttttctttttcttccggctggatcctagatttgggcttgatggatggttgttatatttctgttctttcattttagacattatttgccatgtcatttggatgaaagaaaattttcctatgtcatgcatttcagtcaaaacttttccacagcaccataacgatattattaaccttgggataatgatctccccttcccaaacttgttcttgtgtagcttgtcatagattccttttggtaatatttgcaaaagttatcaagttctctataatttctagtgtaggttgtcataaatcccttttttgtaatatttgcgaaggtaatcaagttctctataatttctttcattggatgtttcttttcattgttttgttgttttatcttatgtgcttaatcttttaatgccttcctttgagaagctaattcttctttgttttgtttaactttgttcgtttacttacagatatccagcaaacataacacttttgcgtggaaaccatgaaagcaggcaactgacccaggtaggttatgcttgtttttgctagtttgaagaactgctgaccgtgttatcttatgcttagactaagtattttcatcacatgcatggtactcttggtttattatttaatgatgtatttgtttgtgagaatgaacgtcttttattagtcgtcaatcaaaggaaaagagaaactatgactaaatctatctgcctgttatgttttatatttgtaatctacattatcaggttaaatctatgctctgctgtagacccaagtttttagcttctatttgtgggtcaattgttaaggagttcaaagaccttcctttctcttttgattgccgtaactggaaggatttagtgttcaacagttatcaatgcttttgcttctcctttcagttttagaggttgccttatcttctgaatggtttatatattgtccatttcttcgttaaaaagttctgttctgtgcaaaaaaagctcaaaagacaagactttactgtgttacacctaaacagtttctttcacttttatctatagcttagacagtttggtgtgtagaggtgtgtggttcaaacccaagcttttgctaatttaactaatattaaattggtaacaaactgttttttattaaagtttatcagctgttatttttcactgttgataattataactaaaacagagatgctaatgtctctggatagcagtttagaagctttaaggaattcttatcgctgattt

SEQ ID NO: 187304 - DNA, 1454 bp, Cannabis indica
attagtgtcttttcaatttttttcattgtctttttttattaaattcatttttagactgataattccaacgctaaagtttctcatagaaatataccccaaatgtttccgagaggcttattatgtgtaaaagttcaaaagagattttattactatttttcttaaggaatatttttgtcaaataataagggccaaaatccaatgggtcagagtgagaagaatttggcaattacaatttgtccttgttatattttatacaaacaaagtaaaaaaaggcatttggattggaaaattaaactcagcaatacaatgtaagtataataataataatactataataaacacttgaactgtttcaatgtctcaagtgttaaaaggcaaaacatatcctctttatgataagattcttacaaaagataacactttcttattaattcccaaatcccaaaggccaacaacatcacattattggtaagaaacgtagcagaggataagtgactaccgagcaaccctagcgttgcatagctcgtcaccgtgatcagccctttcgaaaacagctgctgcccccattcccgtccctacattaacatttcgattaatgacaccccacaccaacaacctgcataaaacaaatcgctaagagaaagagggtgcgagaacatacctatgcacattgagataactccaaaacgacagtctttgccacggcgtttcatctcatgcaataaagttgcaacacaacgagcacctacaacggaggagcaaagattttcatgagtatttcattcttagctaaaaatgaatcaaactttaatgtaactcgaaattttctcatggtacctgtagcacccaaaggatgaccaatggccattgcacctccgttcacattgattttttcggggtcaagacccagcttattacggcaatacacaaattgggaagcaaatgcctgttcggtagtgcaatcaatgtcatattatgtaatactcatttctccaatgtatgaaaaagataataacatattagaaacaagatcaaatgccaggatatttaaatacctcatttatctcaaagagatcaatatcatccagttcaagaccagcagccttcactgcagcgggaattgcagcagcggggccaactcccataatggcaggatccacacctacagcagcaaaagtcctgcatagccaaacaaaataaccaatgcaaagctaaatacgtgctcgaggaaagtcgagaaagaaacatagagagtccgtgattatacagaatacgaagcatggcataggtaaaataagatgtttagaaagaaaaacatctaactcaacatatctacagacgttacaaaagtatatcatgcatcaagaggaaaaatttatgacatatcaagcaaatctttcttgtgtacaaaataacaggtagcaaatagttcgatcaaactctccattacacaa

SEQ ID NO: 187305 - DNA, 1298 bp, Cannabis indica
agggaaagaaccagtttgtctcgctcatcttaagcttggtgaattcttgggggcttattaacatgcctattcatggtgataagataatctgagataatcagtagtctggtacgaaccatgttaaatctactcttgacaaaggtttagttaatggggcttggcttaagttgttctcgagagttatccttagcagatctcagacttgcaactctgatcatagacctctgtgccttcttacagatggtctgggagaaaactttaaaagaagctttaagtttgaagaaggatggacttgggacgaaaggagcaagttggtaattgactatgcctgaaattgagttgttcactcttgggctcccgccagggtcttcaagaaaattggggcaactcgggtcgctcttacgcactggaataaaactcaatatggtagaattgacaccataagtaaagagttgaaaaggaaactcaactttctttagagtttacctgcggggtcccaaaattgggattctaaacgtgagatctgccggtctcttaatgaggcctgtgagagaaaagagttgtattggaaacaaaaggccagggtatcttagcttaaggaaggggatatatgttctaagttcttcttcctctcagcttccatcagagggagaaggaatgtaattgagagtatcttgagtaaagataatatttgaatctccaggcgggatttaattggtaatgaattcattgacttcttcaaaggatccttatctggagcagataatggtcttgatcttaattgtggtcaccttattcagaataggatattcgatgtggatcaggcagagcttgttaagggtcctactcatgaggaaatctgtcatactatttttgccatgagtaacaataaagcccttggccctgatgggatgtttgtgcttttcttatgcactattgggggtctgtgggtgaggatttttgttaagcggtttatgacttctttcggatgggtattatgcataaggatgtcaatgctacgaatatagtgcttatacccaaggtccaaaatctaaaaagaacaaattattataggtctatctctctatgcaatgtgatgtacaaggtcattttcgaaatcgttgccaatagaattaagcctattttaccctccttaatatgtcctacttaagcttcttttgttccgggtaggaatattcaagataacaatgtgatagtacaagaaattatccactccttcaacagaaaaaaaaaaaggcaaagaaggtttcttctccataaaaattgaccttatgaaa

SEQ ID NO: 187306 - DNA, 684 bp, Cannabis indica
tttttttaatttttttgattttttgaattaggagctacgtcaggaatcggagcggagacggctcaagttttggcgcggcgcggcgcgaggttgattcttccagctcggaatgttaaagccgcggaagaagcaaagtcgcgaatcttgtctgagtatcctgattcggagatcgtcgttatggctctcgatcttagctctcttaactctgttcgtcgattcgttactgagtttgattctcttcggttacctcttaatctcctcatgtaattttcattttgacttgttcaactttctttttagtttttttattacctgtttgtttggatggaaagaaaataagtaagaaaattataataataatggcagaaataacgccggaaagttcgcgcacgagcatggaatttctgaagacggaatcgaaatgaccttcgccactaattatttaggtacttaaattaattaattattaatttaaattaatcagttaattaattatgattttgttattttcaggtcattttctactgacaaaacttttactaaagaatatgatcgaaacggctaacgtttcgggaatccaaggccgaatcgtgaacgtttcgtccactatacacggctggtttaccggcgatacaatccgatatatcggcgagattagccgaaacaataggtgagaaattgaaa

SEQ ID NO: 187307 - DNA, 3726 bp, Cannabis indica
tggatgtctgttaagttcttaaattattaaaataatatccattctaacatagtacttgtgactaagtgtcgttagaaaagacttgtgattatatatcataaggatttttcattgcgaaatttctttggaaggtggaagttggtctgaatttgaacgtacttcttaaggattcttgaagtatatcttgcattattttttccttttatttattagaatttagaaatacctacaattaaaagcccatttgtagatgatcccccctcttattttggcttccttgtaatctaaagacatgtatgtaatgtatactcaagcttgttgtgatgtttatatgcaggttgacttgcgcagagcatataactgtgaaattatgctatcaaagattaaaatacctctgccagaaatgattgtaagttattctttttctcttgtttatttgtgccacaacaagctttcttcttttagtttacaaatttaccttatgcatggatcatgactcaaatatgggatgaagttccacgaactagtcaaatgttggtgatttgcactactactatggatgtttttgtgcgttgtgcagaagctatattcagaatgagttgtctactataaatagaaatgcttaaatagtgtttgatttggggtaatgggaatgagattgaatggtcctcttaaagaatccgccatcacttgtctggtttgcttttctaatgggggaatgtccatcaccaattgacggaataggctttcctacaaattaaatggatgggaagaatattccttttgtagtgtagtatatacatttttatatgtataaatacaaaacataacaaataaaataaaattcttatctccttattatttcatacctatttcatttgtttacaaaatagtacctgatgttttgagtagcttcagcattgttgtagaaactttttagtgtggaacctagtgctaattctactgcttacaagaaggaatatcatatgcttgataatttgttggttgtgtttaggcctcattagtactgttaaaagaatgggggtgtaactattactttatgtttccagaatgctgttctggctttggattcttctacgctggacattgatcaggttgagaatctcattaaattttgtccaacaaaggacgaaatggaaatactcaaggtaagccatttgtttttgttgttacggtctcaagcatgtatgaaagtggataatagctgttgttttctgttttaggtatggtatgctctctcaatgtactgaaaaaaaatatctatgtaacattttgaaattagaaaaaaaaatcttccttttttctttcattttgtttttgggaagtttgaacttaatgcaagaattacagtatgtgtctttcaaggtcaatgaacagattaataatttcaccagaagcaaacagcttgtgaaaaatctcatgtgtgcctgtaatgtggcatgattaacatcaaagtaactctgtttagtctgtttgtattagaatctttcagattggattccaatcacatcagtgagtctcccaggtgtgaagccattctttaagtcaaaacaaaataatttaagttactatctaaacaaagggggttgttaaaggaaaaggagaaacaaagatgtgtatttttttttatctaggaatagtcaagcaaatagctattacctatacatgcatagaaagcaaataaatgtgaatagaccaccagatactctatggtactggtgatctttcgaagtgcttggctccaagccgaggtctgaagtaaatattctttcatttaaacaaggaagaaaagcaaaggttgaattgaatggccctagattatgatggccttatattatattggcttctaatatttatttgtaactagagtaccaattcaaagataagtcataaagtcaaataccagtgtgataaaaaagaaaaaagaaaatctttttgacgagcatttaatgaaatatttattcaaaaaataatacttgacggtgttgtatgaacactcaaaagagtttagggaaagagtttacataaaatactgccattctgtaaataagccagaaaatgaaacacctctttaaactctggtacattgtaaggaaacaactctgcaaagtgttaagtcttttcccacaagcttttaccattaccttccataggagttcccttgttttgttgccagctatatccataattgataattctgtgtacactaaatcaagaagtagattgtggcaaaagtaaattctctgcaccttatgaggttattaagaacatttggtttctgctaatttctttctttgcatcagaattatacaggtgaaaaggaaaagcttgggaggtgtgaacaggttgtatatttattcgggctatcatctcttttattttgaattcaatgtcattcaataaattgattctttggtgacaatgtatgttatttcagtttttctcggaactgatgaaagttccacgagttgaatccaagttgagggtgtttgctttcaaaaatcacattttccagtcaggtactgctaattaaatttcattgtatttatatgattgtgcttgtgcttttaattgttattaattttctctgctgtttgttgtttaggtgactgatttgaaaaataatctgaatacaattaacaatgctactagagaggtactgatgaatttatttttagccaagatgcaatgtataaatgtgattctgggctgtatcaatatgtctcatttatttgcaggtgaaagaatcaggaaaattgcgtcagattatgcagacaattctaactttgggaaatgctctgaatcaaggcactgcacgaggtatctcatttttctttctttgtttcttattctttttgcttcttgacacaatcctaattttgcttttcctcacttttcatattccaggatctgccattgggttcaaattggatagtcttctaaaattgtcggatactcgtgcaagaaataacaaaatgacgttaatgcattacttgtgcaaggtagagaaattcgatttcaatgcattatttttaatcttttatcttatgtattgctttattattaaagctttatacagttcctatattattttttagtttctatgatgtccttcccatatgcttggagagccccctttacaggagtttttatgtttttgttttgtttttttttcctggtgtttactattgttgctactgatatcatttccaggctctgtatattccttttctgcattattttggcatttctgtgtgatattcaagtaatgcctatgaatattcttgtcttgagcagcttcttgccgagaagatgccagagttgttggattttgataaggatcttatgcatttagaaggtgcctctaaggtatgctggtcattttgtagtattggatcctgatattaagacattttaggagatgatctggtttgcattagccttctaaggcaacagcttgctccctttgtttaacttttacttcaaattaatagattcaattgaaagctttggctgaagaaatgcaagctgtgagcaaaggtcttgaaaaggttgagctagaacttgctgcttcagaaagtgatggttcaatctccctcggtttccagacggtgaggattcttaattataattcgcctttccatttcacttttattactataggtttgtgaatgttgaatattgaatatgatggaagaaaaaaaa
